(19) United States
(12) Patent Application Publication
(10) Pub. No.: US 2024/0376449 A1
(43) Pub. Date: Nov. 14, 2024

(54) RNA POLYMERASE VARIANTS

(71) Applicant: Codexis, Inc., Redwood City, CA (US)

(72) Inventors: Marina Mikhailovna Bakhtina, Redwood City, CA (US); Rachelle Copeland, Redwood City, CA (US); Aldo Duran, San Leandro, CA (US); Anders Matthew Knight, Mountain View, CA (US); Melissa Ann Mayo, Foster City, CA (US)

(21) Appl. No.: 18/660,851

(22) Filed: May 10, 2024

Related U.S. Application Data
(60) Provisional application No. 63/502,021, filed on May 12, 2023.

(51) Int. Cl. C12N 9/12; C12N 9/14

(52) U.S. Cl. CPC C12N 9/127; C12N 9/14; C12Y 207/07006; C12Y 306/01001

(57) ABSTRACT

The present disclosure relates to engineered RNA polymerase polypeptides and compositions thereof, as well as polynucleotides encoding the engineered RNA polymerase polypeptides. The present disclosure also provides methods of using the engineered RNA polymerase polypeptides or compositions thereof for producing RNA.

### CROSS-REFERENCE TO RELATED APPLICATIONS

[0001] This application claims the benefit of U.S. Provisional Application No. 63/502,021, filed May 12, 2023, which is incorporated by reference herein.

### REFERENCE TO SEQUENCE LISTING, TABLE OR COMPUTER PROGRAM

[0002] The Sequence Listing concurrently submitted herewith as file name CX9-252US1_ST26.xml, created on May 10, 2024, with a file size of 6,145,482 bytes, and amended on Jul. 22, 2024 with a file size of 6,147,658 bytes, is part of the specification and is incorporated by reference herein.

### TECHNICAL FIELD

[0003] The present disclosure relates to engineered RNA polymerase variants, compositions thereof, and methods of using the engineered RNA polymerase variants.

### BACKGROUND

[0004] RNA polymerases transcribe a DNA, and in some instances RNA, into RNA transcripts. These enzymes represent the primary machinery that drives transcription. RNA polymerases have been isolated and purified sufficiently that they are useful for producing RNA in vitro. In vitro transcription allows for polynucleotide template directed synthesis of RNA molecules of any sequence, ranging in size from short oligonucleotides to several kilobases. Typically, in vitro transcription involves engineering of a template that includes a promoter sequence upstream of the sequence of interest followed by transcription using the corresponding RNA polymerase. RNA transcripts can be further modified by, among others, capping, splicing, and/or addition of a poly-A tail. Some modifications, such as capping and addition of a poly-A tail, can occur as part of the transcription reaction, for example, by co-transcriptional capping by the RNA polymerase and by inclusion of appropriate poly-dT sequences in the polynucleotide template. In other instances, the capping and addition of the poly-A tail can be done post-transcriptionally, for example by use of an RNA capping enzyme (e.g., Faustovirus or Vaccinia virus capping enzyme) and poly-A tailing with a poly(A) polymerase (e.g., E. coli. poly(A) polymerase). In vitro generated transcripts are used in analytical techniques (e.g., hybridization analysis), structural studies (e.g., NMR and X ray crystallography), in biochemical and genetic studies (e.g., as antisense reagents), as functional molecules (e.g., ribozymes and aptamers), and as therapeutic agents.

[0005] RNA has become the focus of therapeutic applications, including, among others mRNA based vaccines, cancer immunotherapeutic, genome engineering (e.g., CRISPR), and enzyme replacement supplementation therapies. Important to such applications is the availability of stable RNA polymerases that can produce RNA at high yield and with high fidelity, while having minimal amount of undesirable products, including, among others, incomplete transcripts, and double stranded RNA products.

### SUMMARY

[0006] The present disclosure provides engineered RNA polymerase polypeptides and compositions thereof, as well as polynucleotides encoding the engineered RNA polymerase polypeptides, where the RNA polymerases are engineered to have improved properties, including but not limited to, increased activity, increased thermostability, increased product yield, and effective co-capping of RNA product. The present disclosure also provides methods of using the engineered RNA polymerase polypeptides and compositions thereof for nucleic acid synthesis and other purposes.

[0007] In one aspect, the present disclosure provides an engineered RNA polymerase, or a functional fragment thereof, comprising an amino acid sequence comprising residues 8 to 890 of SEQ ID NO: 2 or comprising SEQ ID NO: 2, or an amino acid sequence having at least 70%, 75%, 80%, 81%, 82%, 83%, 84%, 85%, 86%, 87%, 88%, 89%, 90%, 91%, 92%, 93%, 94%, 95%, 96%, 97%, 98%, 99%, or more sequence identity to a reference sequence corresponding to residues 8 to 890 of SEQ ID NO: 2, 4, 26, 424, 548, 896, 1030, 1036, 1742, or 1838, or to a reference sequence corresponding to SEQ ID NO: 2, 4, 26, 424,548, 896, 1030, 1036, 1742, or 1838, wherein the amino acid sequence comprises one or more substitutions relative to the reference sequence corresponding to residues 8 to 890 of SEQ ID NO: 2, 4, 26,424,548, 896, 1030, 1036, 1742, or 1838, or relative to the reference sequence corresponding to SEQ ID NO: 2, 4, 26, 424,548, 896, 1030, 1036, 1742, or 1838.

[0008] In some embodiments, the engineered RNA polymerase, or a functional fragment thereof, comprises an amino acid sequence having at least 70%, 75%, 80%, 81%, 82%, 83%, 84%, 85%, 86%, 87%, 88%, 89%, 90%, 91%, 92%, 93%, 94%, 95%, 96%, 97%, 98%, 99%, or more sequence identity to the reference sequence corresponding to residues 8 to 890 of SEQ ID NO: 2, or to the reference sequence corresponding to SEQ ID NO: 2, wherein the amino acid sequence comprises one or more substitutions relative to the reference sequence corresponding to residues 8 to 890 of SEQ ID NO: 2, or relative to the reference sequence corresponding to SEQ ID NO: 2.

[0009] In some embodiments, the engineered RNA polymerase, or a functional fragment thereof, comprises an amino acid sequence having at least 70%, 75%, 80%, 81%, 82%, 83%, 84%, 85%, 86%, 87%, 88%, 89%, 90%, 91%, 92%, 93%, 94%, 95%, 96%, 97%, 98%, 99%, or more sequence identity to the reference sequence corresponding to residues 8 to 890 of SEQ ID NO: 4, 26, 424,548, 896, 1030, 1036, 1742, or 1838, or to the reference sequence corresponding to SEQ ID NO: 4, 26, 424,548, 896, 1030, 1036, 1742, or 1838, wherein the amino acid sequence comprises one or more substitutions relative to the reference sequence corresponding to residues 8 to 890 of SEQ ID NO: 2, or relative to the reference sequence corresponding to SEQ ID NO: 2.

[0010] In some embodiments, the engineered RNA polymerase comprises an amino acid sequence having at least 70%, 75%, 80%, 81%, 82%, 83%, 84%, 85%, 86%, 87%, 88%, 89%, 90%, 91%, 92%, 93%, 94%, 95%, 96%, 97%, 98%, 99% or more sequence identity to a reference sequence corresponding to residues 8 to 890 of an even numbered SEQ ID NO. of SEQ ID NOs: 4-2018, or to a reference sequence corresponding to an even numbered SEQ ID NO. of SEQ ID NOs: 4-2018, wherein the amino acid sequence comprises one or more substitutions relative to the reference sequence corresponding to residues 8 to 890 of SEQ ID NO: 2, or relative to the reference sequence corresponding to SEQ ID NO: 2.

[0011] In some embodiments, the amino acid sequence of the engineered RNA polymerase comprises at least a substitution at amino acid position 7, 11, 12, 13, 15, 18, 21, 23, 25, 26, 30, 34, 41, 45, 54, 56, 57, 59, 60, 61, 64, 66, 67, 71, 74, 75, 76, 77, 78, 82, 84, 98,101,104, 108, 122, 126, 129, 132, 133, 134, 135, 136, 139, 140, 144, 145, 150, 151, 160, 161, 164, 167, 168, 169, 170, 171, 172, 177, 178, 179, 180, 181, 182, 183, 184, 185, 186, 187, 188, 189, 190, 191, 192, 193, 194, 195, 197, 198, 200, 202, 204, 206, 207, 209, 210, 223, 235, 237, 246, 250, 254, 256, 260, 269, 274, 278, 286, 289, 296, 299, 302, 307, 308, 309, 310, 311, 312, 313, 315, 319, 324, 327, 336, 337, 340, 343, 345, 347, 350, 352, 357, 359, 362, 364, 365, 367, 369, 370, 372, 375, 376, 378, 379, 382, 386, 387, 388, 389, 390, 394, 396, 397, 397, 398, 399, 401, 402, 403, 404, 405, 406, 407, 410, 413, 416, 418, 419, 420, 425, 437, 438, 450, 455, 456, 461, 462, 464, 468, 470, 473, 474, 477, 478, 483, 484, 489, 491, 494, 495, 496, 498, 499, 502, 505, 511, 513, 514, 517, 526, 527, 528, 529, 530, 531, 534, 535, 537, 541, 543, 550, 553, 561, 563, 564, 573, 574, 579, 582, 583, 588, 590, 591, 593, 598, 599, 600, 601, 605, 607, 608, 612, 613, 614, 615, 616, 618, 622, 623, 625, 626, 629, 633, 635, 636, 640, 645, 648, 649, 650, 653, 655, 657, 658, 659, 662, 663, 664, 665, 668, 670, 672, 675, 676, 686, 690, 691, 693, 694, 696, 701, 704, 708, 709, 715, 720, 723, 724, 725, 730, 743, 747, 751, 756, 761, 770, 771, 778, 779, 782, 784, 793, 794, 795, 796, 800, 808, 810, 831, 832, 839, 841, 845, 846, 852, 855, 856, 857, 858, 865, 876, 884, or 887, or combinations thereof, wherein the amino acid positions are relative to the reference sequence corresponding to residues 8 to 890 of SEQ ID NO: 2, or relative to the reference sequence corresponding to SEQ ID NO: 2.

[0012] In some embodiments, the amino acid sequence of the engineered RNA polymerase comprises at least a substitution at amino acid position 136, 150, 195, 206, 207, 246, 250, 337, 340, 347, 352, 359, 399, 419, 425, 456, 531, 550, 574, 588, 601, 614, 616, 640, 645, 648, 649, 694, 720, 779, 782, 793, 796, 800, 839, 841, 841, 856, 865, 876, or 884, or combinations thereof, wherein the amino acid positions are relative to the reference sequence corresponding to residues 8 to 890 of SEQ ID NO: 2, or relative to the reference sequence corresponding to SEQ ID NO: 2.

[0013] In some embodiments, the amino acid sequence of the engineered RNA polymerase comprises at least a substitution set at amino acid positions 796/800/841/884, 394/846, 394/808/846, 404/846, or 394/796/845/846, wherein the amino acid positions are relative to the reference sequence corresponding to residues 8 to 890 of SEQ ID NO: 2, or relative to the reference sequence corresponding to SEQ ID NO: 2.

[0014] In some embodiments, the amino acid sequence of the engineered RNA polymerase comprises at least a substitution as set forth in Tables 8.1, 9.1, 10.1, 10.2, 11.1, 12.1, 13.1, 14.1, 15.1, 16.1, 17.1, and 18.1, wherein the amino acid positions are relative to the reference sequence corresponding to residues 8 to 890 of SEQ ID NO: 2, or relative to the reference sequence corresponding to SEQ ID NO: 2.

[0015] In some embodiments, the amino acid sequence of the engineered RNA polymerase comprises at least a substitution or substitution set of an engineered RNA polymerase set forth in Tables 8.1, 9.1, 10.1, 10.2, 11.1, 12.1, 13.1, 14.1, 15.1, 16.1, 17.1, and 18.1, wherein the amino acid positions are relative to the reference sequence corresponding to residues 8 to 890 of SEQ ID NO: 2, or relative to the reference sequence corresponding to SEQ ID NO: 2.

[0016] In some embodiments, the engineered RNA polymerase comprises an amino acid sequence having at least 70%, 75%, 80%, 81%, 82%, 83%, 84%, 85%, 86%, 87%, 88%, 89%, 90%, 91%, 92%, 93%, 94%, 95%, 96%, 97%, 98%, 99%, or more sequence identity to the reference sequence corresponding to residues 8 to 890 of SEQ ID NO: 2, 4, 26, 424,548, 896, 1030, 1036, 1742, or 1838, or to the reference sequence corresponding to SEQ ID NO: 2, 4, 26, 424,548, 896, 1030, 1036, 1742, or 1838.

[0017] In some embodiments, the engineered RNA polymerase comprises an amino acid sequence having at least 70%, 75%, 80%, 81%, 82%, 83%, 84%, 85%, 86%, 87%, 88%, 89%, 90%, 91%, 92%, 93%, 94%, 95%, 96%, 97%, 98%, 99% or more sequence identity to the reference sequence corresponding to residues 8 to 890 of an even numbered SEQ ID NO. of SEQ ID NOs: 2-2018, or to the reference sequence corresponding to an even numbered SEQ ID NO. of SEQ ID NOs: 2-2018.

[0018] In some embodiments, the engineered RNA polymerase comprises an amino acid sequence having at least 70%, 75%, 80%, 81%, 82%, 83%, 84%, 85%, 86%, 87%, 88%, 89%, 90%, 91%, 92%, 93%, 94%, 95%, 96%, 97%, 98%, 99%, or more sequence identity to the reference sequence corresponding to residues 8 to 890 of SEQ ID NO: 4, 26, 424,548, 896, 1030, 1036, 1742, or 1838, or to the reference sequence corresponding to SEQ ID NO: 4, 26, 424,548, 896, 1030, 1036, 1742, or 1838, wherein the amino acid sequence comprises one or more substitutions relative to the reference sequence corresponding to residues 8 to 890 of SEQ ID NO: 4, 26, 424,548, 896, 1030, 1036, 1742, or 1838, or relative to the reference sequence corresponding to SEQ ID NO: 4, 26, 424,548, 896, 1030, 1036, 1742, or 1838.

[0019] In some embodiments, the engineered RNA polymerase comprises an amino acid sequence having at least 70%, 75%, 80%, 81%, 82%, 83%, 84%, 85%, 86%, 87%, 88%, 89%, 90%, 91%, 92%, 93%, 94%, 95%, 96%, 97%, 98%, 99%, or more sequence identity to the reference sequence corresponding to residues 8 to 890 of SEQ ID NO: 4-2018, or to the reference sequence corresponding to SEQ ID NO: 4-2018, wherein the amino acid sequence comprises one or more substitutions relative to the reference sequence corresponding to residues 8 to 890 of SEQ ID NO: 4, 26, 424,548, 896, 1030, 1036, 1742, or 1838, or relative to the reference sequence corresponding to SEQ ID NO: 4, 26, 424,548, 896, 1030, 1036, 1742, or 1838.

[0020] In some embodiments, the amino acid sequence of the engineered RNA polymerase comprises at least a substitution at amino acid position 7, 11, 12, 13, 15, 18, 21, 23, 25, 26, 30, 34, 41, 45, 54, 56, 57, 59, 60, 61, 64, 66, 67, 71, 74, 75, 76, 77, 78, 82, 84, 98, 101,104, 108, 122, 126, 129, 132, 133, 134, 135, 136, 139, 140, 144, 145, 150, 151, 160, 161, 164, 167, 168, 169, 170, 171, 172, 177, 178, 179, 180, 181, 182, 183, 184, 185, 186, 187, 188, 189, 190, 191, 192, 193, 194, 195, 197, 198, 200, 202, 204, 206, 207, 209, 210, 223, 235, 237, 246, 250, 254, 256, 260, 269, 274, 278, 286, 289, 296, 299, 302, 307, 308, 309, 310, 311, 312, 313, 315, 319, 324, 327, 336, 337, 340, 343, 345, 347, 350, 352, 357, 359, 362, 364, 365, 367, 369, 370, 372, 375, 376, 378, 379, 382, 386, 387, 388, 389, 390, 394, 396, 397, 397, 398, 399, 401, 402, 403, 404, 405, 406, 407, 410, 413, 416, 418, 419, 420, 425, 437, 438, 450, 455, 456, 461, 462, 464, 468, 470, 473, 474, 477, 478, 483, 484, 489, 491, 494, 495, 496, 498, 499, 502, 505, 511, 513, 514, 517, 526, 527, 528, 529, 530, 531, 534, 535, 537, 541, 543, 550, 553, 561, 563, 564, 573, 574, 579, 582, 583, 588, 590, 591, 593, 598, 599, 600, 601, 605, 607, 608, 612, 613, 614, 615, 616, 618, 622, 623, 625, 626, 629, 633, 635, 636, 640, 645, 648, 649, 650, 653, 655, 657, 658, 659, 662, 663, 664, 665, 668, 670, 672, 675, 676, 686, 690, 691, 693, 694, 696, 701, 704, 708, 709, 715, 720, 723, 724, 725, 730, 743, 747, 751, 756, 761, 770, 771, 778, 779, 782, 784, 793, 794, 795, 796, 800, 808, 810, 831, 832, 839, 841, 845, 846, 852, 855, 856, 857, 858, 865, 876, 884, or 887, or combinations thereof, wherein the amino acid positions are relative to the reference sequence corresponding to residues 8 to 890 of SEQ ID NO: 4, 26, 424, 548, 896, 1030, 1036, 1742, or 1838, or relative to the reference sequence corresponding to SEQ ID NO: 4, 26, 424,548, 896, 1030, 1036, 1742, or 1838.

[0021] In some embodiments, the amino acid sequence of the engineered RNA polymerase comprises at least a substitution at amino acid position 136, 150, 195, 206, 207, 246, 250, 337, 340, 347, 352, 359, 399, 419, 425, 456, 531, 550, 574, 588, 601, 614, 616, 640, 645, 648, 649, 694, 720, 779, 782, 793, 796, 800, 839, 841, 841, 856, 865, 876, or 884, or combinations thereof, wherein the amino acid positions are relative to the reference sequence corresponding to residues 8 to 890 of SEQ ID NO: 4, 26, 424,548, 896, 1030, 1036, 1742, or 1838, or relative to the reference sequence corresponding to SEQ ID NO: 4, 26, 424,548, 896, 1030, 1036, 1742, or 1838.

[0022] In some embodiments, the engineered RNA polymerase comprises an amino acid sequence having at least 70%, 75%, 80%, 81%, 82%, 83%, 84%, 85%, 86%, 87%, 88%, 89%, 90%, 91%, 92%, 93%, 94%, 95%, 96%, 97%, 98%, 99%, or more sequence identity to the reference sequence corresponding to residues 8 to 890 of SEQ ID NO: 4, or to the reference sequence corresponding to SEQ ID NO: 4, wherein the amino acid sequence comprises one or more substitutions relative to the reference sequence corresponding to residues 8 to 890 of SEQ ID NO: 4, or relative to the reference sequence corresponding to SEQ ID NO: 4.

[0023] In some embodiments, the engineered RNA polymerase comprises an amino acid sequence having at least 70%, 75%, 80%, 81%, 82%, 83%, 84%, 85%, 86%, 87%, 88%, 89%, 90%, 91%, 92%, 93%, 94%, 95%, 96%, 97%, 98%, 99%, or more sequence identity to a reference sequence corresponding to residues 8 to 890 of an even-numbered SEQ ID NO. of SEQ ID NOs: 14-250, or to a reference sequence corresponding to an even-numbered SEQ ID NO. of SEQ ID NOs: 14-250, wherein the amino acid sequence comprises one or more substitutions relative to the reference sequence corresponding to residues 8 to 890 of SEQ ID NO: 4, or relative to the reference sequence corresponding to SEQ ID NO: 4.

[0024] In some embodiments, the amino acid sequence of the engineered RNA polymerase comprises at least a substitution or substitution set at amino acid position(s) 839/841, 884/887, 694, 588, 541, 852, 645, 582, 657, 574, 456, 563, 865, 720, 528, 601, 690, 614, 550, 187, 57,168,531, 347, 18,527,197, 76/537,171, 418, 579, 696, 77, 337, 11,200,186, 64/296,724, 198, 13,529,419, 593, 164, 535, 464, 607, 59, 23,747,169, 71,160,195, 78,612,537, 74,167,192, 64,648,193, 12,254,182, 189, 511, 278, 45, 67, 25, 41,183,202, 858, 76, 82, 82/178,340, 179, 61,505,784, 686, 477, 327, 184, 319, or 668, wherein the amino acid positions are relative to the reference sequence corresponding to residues 8 to 890 of SEQ ID NO: 4, or relative to the reference sequence corresponding to SEQ ID NO: 4.

[0025] In some embodiments, the engineered RNA polymerase comprises an amino acid sequence having at least 70%, 75%, 80%, 81%, 82%, 83%, 84%, 85%, 86%, 87%, 88%, 89%, 90%, 91%, 92%, 93%, 94%, 95%, 96%, 97%, 98%, 99%, or more sequence identity to the reference sequence corresponding to residues 8 to 890 of SEQ ID NO: 26, or to the reference sequence corresponding to SEQ ID NO: 26, wherein the amino acid sequence comprises one or more substitutions relative to the reference sequence corresponding to residues 8 to 890 of SEQ ID NO: 26, or relative to the reference sequence corresponding to SEQ ID NO: 26.

[0026] In some embodiments, the engineered RNA polymerase comprises an amino acid sequence having at least 70%, 75%, 80%, 81%, 82%, 83%, 84%, 85%, 86%, 87%, 88%, 89%, 90%, 91%, 92%, 93%, 94%, 95%, 96%, 97%, 98%, 99%, or more sequence identity to a reference sequence corresponding to residues 8 to 890 of an even-numbered SEQ ID NO. of SEQ ID NOs: 252-540, or to a reference sequence corresponding to an even-numbered SEQ ID NO. of SEQ ID NOs: 252-540, wherein the amino acid sequence comprises one or more substitutions relative to the reference sequence corresponding to residues 8 to 890 of SEQ ID NO: 26, or relative to the reference sequence corresponding to SEQ ID NO: 26.

[0027] In some embodiments, the amino acid sequence of the engineered RNA polymerase comprises at least a substitution or substitution set at amino acid position(s) 622, 831, 598, 419, 198, 588, 21, 579/704, 190, 197, 57, 189,187, 195, 181, 191, 188, 164, 169, 184, 171, 186, 527, 177, 66, 78/565, 172, 161, 193, 593, 668, 18, 67, 170,286, 61, 60, 183,456, 179, 194, 468, 720, 534, 601, 56, 122, 84, 418, 34/526, 701, 530, 59, 260, 82, 413,605, 54, or 256, wherein the amino acid positions are relative to the reference sequence corresponding to residues 8 to 890 of SEQ ID NO: 26, or relative to the reference sequence corresponding to SEQ ID NO: 26.

[0028] In some embodiments, the amino acid sequence of the engineered RNA polymerase comprises at least a substitution or substitution set at amino acid position(s) 337/456/574/601/614/694/720, 197/200/418/550/574/614/690/694, 197/200/337/347/456/550/563/720, 456/563/574/694/720, 171/197/200/456/574/694, 197/347/418/456/574/690, 200/418/456/531/574/614, 418/574, 11/77/200/574, 11/200/347/456/694/720, 11/200/456/574, 171/200/531/582/601/614/720, 456/531/574/690, 13/337/456/550, 11/200/337/456, 77/171/347/456, 13/337/527/550/563/574/601, 197/200/531/550/694, 77/197/200/456/550, 77/197/456/531/574/614/690, 77/200/347/574, 13/200/347/456/720, 13/77/531/574/720, 601/614/694, 13/418/456/694/720, 15/77/200/337/456/550/574/601/614/690/720, 13/550/690, 77/456/550, 77/337/347/550/574, 200/347/456/694, 197/337/347/456/531/574, 13/456/528, 200/337/456/690, 197/337/527/574/601, 197/456/579/614, 13/720, 197/200/418/574/694, 197/200/601, 197/347/418/574, 347/601/694, 550/690, 200/418/550, 200/347, 77/171/197, 77/531/574, 77/171/720, 197/527, 200, 197/200/418/601, 11/531/582, 13/197/200/418/694, 13/77/200/418/456, 77/456/582, 11/690, 11/200, 11/456/531/616, 77/574, 200/531/690, or 337/418/531/574/690, wherein the amino acid positions are relative to the reference sequence corresponding to residues 8 to 890 of SEQ ID NO: 26, or relative to the reference sequence corresponding to SEQ ID NO: 26.

[0029] In some embodiments, the engineered RNA polymerase comprises an amino acid sequence having at least 70%, 75%, 80%, 81%, 82%, 83%, 84%, 85%, 86%, 87%, 88%, 89%, 90%, 91%, 92%, 93%, 94%, 95%, 96%, 97%, 98%, 99%, or more sequence identity to the reference sequence corresponding to residues 8 to 890 of SEQ ID NO: 424, or to the reference sequence corresponding to SEQ ID NO: 424, wherein the amino acid sequence comprises one or more substitutions relative to the reference sequence corresponding to residues 8 to 890 of SEQ ID NO: 44, or relative to the reference sequence corresponding to SEQ ID NO: 424.

[0030] In some embodiments, the engineered RNA polymerase comprises an amino acid sequence having at least 70%, 75%, 80%, 81%, 82%, 83%, 84%, 85%, 86%, 87%, 88%, 89%, 90%, 91%, 92%, 93%, 94%, 95%, 96%, 97%, 98%, 99%, or more sequence identity to the reference sequence corresponding to residues 8 to 890 of an even-numbered SEQ ID NO. of SEQ ID NOs: 542-862, or to the reference sequence corresponding to an even-numbered SEQ ID NO. of SEQ ID NOs: 542-862, wherein the amino acid sequence comprises one or more substitutions relative to the reference sequence corresponding to residues 8 to 890 of SEQ ID NO: 424, or relative to the reference sequence corresponding to SEQ ID NO: 424.

[0031] In some embodiments, the amino acid sequence of the engineered RNA polymerase comprises at least a substitution or substitution set at amino acid position(s) 541/622/723, 541/588/865, 839, 195/347/531/550/588, 419/723, 172/184/550/588, 184/195/347/418/550/588, 171/184/347/531/550, 171/184/347/418/531/550/588, 169/541/588/865, 841, 839/841, 171/347/418/550, 171/184/347/418/588, 195/563/588, 187/195/531/550/588, 347/550/588, 541/865, 347/531/563/588, 419/541/865, 187/347/418/531/550, 169/419, 187/347/531/588, 186/347/550/588, 563/588, 184/418/550/588, 723, 172/418/550/588, 171/186/418/550/588, 347/550/563, 622, 541/723, 419/541/839/841, 171/418/531/550, 171/531/588, 186/347/588, 531/550/563, 171/186/531/550, 187/550, 171/418/531/563/588, 195/550, 347/418/550/588, 171/187/588, 187/347/531/550, 184/531/550, 171/184/418/563/588, 195/588, 169/622/723, 187/588, 184/550/588, 169/189/622, 187/418/550, 588, 531/563/588, 418/563/588, 531/588, 172/184/531/550, 191/531/588, 347/418/550, 563, 172/197/347/588, 172/184/347/418/531/563, 171/195/347/418/588, 171/588, 171/187/550, 171/184/347/418/563, 347/531/588, 172/186/187/531/563/588, 550, 531/550, 172/588, 195/418/550, 195/347/418/531/563, 171/195/550, 181/418/563, 184/347/563/579, 200/347/418, 172/195/550, 197/347/418/563, 171/563, 531/563, 191/418/531/550, 172/195/531/588, 347/531/563, 169/181/198/723/865, 171/418/588, 184/418/588, 541, 418/550, 172/347/531/588, 172/187/550, 169/181/190/419, 723/841, 347/418/563, 186/197/200/550, 347/550, 172/200/588, 186/563, 172/186/347/531/588, 172/184/418/588, 171/347/418/563, 184/200, 172/347/418/588, 198/419/541, 171/187/418/563, 171/184/588, 184/347/588, 172/531/563, 184/195, 186/347, 418/531/550, 169/419/541, 184/197/418/531, 169/541, 169/197/198, 169/419, 184/418, 171/187/531, 171/184/347/531, 184, 197/347/531, 419, 197, 195/418, 171/347/531, 171/186/347/418/563, 184/347/418, 171/186/347/418, 186/347/418/531, 172/184/347/418, 184/195/347/418, 171/418/531, 419/622, 347/418/588, 171/531, 172/197/200/531, 347, 172/186/200/347/418/563, 184/200/418, 171/195/531, 184/197/347, 200/347, 171, 172, 171/347/418, 198/419, 347/531, 200, 531, 171/184, 169, or 189/418/419/541, wherein the amino acid positions are relative to the reference sequence corresponding to residues 8 to 890 of SEQ ID NO: 424, or relative to the reference sequence corresponding to SEQ ID NO: 424.

[0032] In some embodiments, the engineered RNA polymerase comprises an amino acid sequence having at least 70%, 75%, 80%, 81%, 82%, 83%, 84%, 85%, 86%, 87%, 88%, 89%, 90%, 91%, 92%, 93%, 94%, 95%, 96%, 97%, 98%, 99%, or more sequence identity to the reference sequence corresponding to residues 8 to 890 of SEQ ID NO: 548, or to the reference sequence corresponding to SEQ ID NO: 548, wherein the amino acid sequence comprises one or more substitutions relative to the reference sequence corresponding to residues 8 to 890 of SEQ ID NO: 548, or relative to the reference sequence corresponding to SEQ ID NO: 548.

[0033] In some embodiments, the engineered RNA polymerase comprises an amino acid sequence having at least 70%, 75%, 80%, 81%, 82%, 83%, 84%, 85%, 86%, 87%, 88%, 89%, 90%, 91%, 92%, 93%, 94%, 95%, 96%, 97%, 98%, 99%, or more sequence identity to the reference sequence corresponding to residues 8 to 890 of an even-numbered SEQ ID NO. of SEQ ID NOs: 864-1004, or to the reference sequence corresponding to an even-numbered SEQ ID NO. of SEQ ID NOs: 864-1004, wherein the amino acid sequence comprises one or more substitutions relative to the reference sequence corresponding to residues 8 to 890 of SEQ ID NO: 548, or relative to the reference sequence corresponding to SEQ ID NO: 548.

[0034] In some embodiments, the amino acid sequence of the engineered RNA polymerase comprises at least a substitution or substitution set at amino acid position(s) 184/418/419/622/723/865, 419/723/839/841/865, 419/839, 477, 832, 418/419/839/841, 418/419/723/839, 184/419/723/839, 184/418/419/839, 418/839, 419/865, 622/723, 419/723, 418/419/723, 419/839/841/865, 622/839, 839, 171/839/841, 171/419/839/841, 419/839/865, 184/418/622/839/865, 419/622/839/841, 184/418/419/622/839/865, 184/419/622/723, 418/419/622, 180, 185, 184/419/622, 496, 184/622/865, 171/184/418/419/839/841, 171/184/418/419/622/839, 60, 419/622/839, 171/184/419/622/839/841, 418/723/841, 839/841, 483, 865, 418/723/841/865, 419, 307, 419/841/865, 169/418/419/839, 419/841, 420, 495, 416, 857, 499, 41, 30, 75, 26, 670, or 269, wherein the amino acid positions are relative to the reference sequence corresponding to residues 8 to 890 of SEQ ID NO: 548, or relative to the reference sequence corresponding to SEQ ID NO: 548.

[0035] In some embodiments, the amino acid sequence of the engineered RNA polymerase comprises at least a substitution or substitution set at amino acid position(s) 70%, 75%, 80%, 81%, 82%, 83%, 84%, 85%, 86%, 87%, 88%, 89%, 90%, 91%, 92%, 93%, 94%, 95%, 96%, 97%, 98%, 99%, or more sequence identity to the reference sequence corresponding to residues 8 to 890 of SEQ ID NO: 896, or to the reference sequence corresponding to SEQ ID NO: 896, wherein the amino acid sequence comprises one or more substitutions relative to the reference sequence corresponding to residues 8 to 890 of SEQ ID NO: 896, or relative to the reference sequence corresponding to SEQ ID NO: 896.

[0036] In some embodiments, the engineered RNA polymerase comprises an amino acid sequence having at least 70%, 75%, 80%, 81%, 82%, 83%, 84%, 85%, 86%, 87%, 88%, 89%, 90%, 91%, 92%, 93%, 94%, 95%, 96%, 97%, 98%, 99%, or more sequence identity to the reference sequence corresponding to residues 8 to 890 of an even-numbered SEQ ID NO. of SEQ ID NOs: 1006-1156, or to the reference sequence corresponding to an even-numbered SEQ ID NO. of SEQ ID NOs: 1006-1156, wherein the amino acid sequence comprises one or more substitutions relative to the reference sequence corresponding to residues 8 to 890 of SEQ ID NO: 896, or relative to the reference sequence corresponding to SEQ ID NO: 896.

[0037] In some embodiments, the amino acid sequence of the engineered RNA polymerase comprises at least a substitution or substitution set at amino acid position(s) 246/399/517/607/782/856/876, 517/640/670/720/779/782, 246/751/779/782, 404/607/856/876, 246/517/664/751/779, 640/664/779/782, 399/517/664/856/876, 246/379/399/517/751, 404/517/640/664/751/793/876, 517/640/670/720/751/779/782, 517/876, 135/340, 246/399/640/720/779/782/793/856/876, 340, 246/340, 664/720/779/782/793/856, 399/404/517/670/779/782/876, 379/517/640, 136/246/340, 404/751/779/782, 404/517/640/664/720/793, 379/517/640/779/782/793/856/876, 399/404/664/670/720/751/779/782, 640/793, 136/340/379, 15/246/535/607/664, 517/664/720, 517/607/856, 517/664/720/779, 135/416, 517/664/720/779/782/856, 135/136, 856, 135/136/340/375/379, 340/399, 399/664/720/751/793/810/856, 246/404/645/664/720/782/856/876, 379, 246/517/607, 246/664, 517, 7/135/136/340/379/416, 246/517/751/856, 517/670/720/751/779/782/856, 135/136/340, 640/664/751/856/876, 399/404/517/779/782, 640/779/782/856, 136/246, 399/404/517, 246/340/416, 517/664/751/856, 404/640/664, 246/517/751/779/782/856, 399/517/664/856, 404/517/664/720/782, 135/364, 517/607/640/664/720/779/782/856, 136/364/399/404, 136/340, 399/404/517/720/876, 404/416/517/640/645/720/751/779/782, 246/416, 136, 136/340/399, 416, 135/195/246/340/379, 246/340/364, 340/379/399, 399/404/416/517/607, 404/517/664/720, 517/640/751/756, or 517/607/640/645/664/720/751/779, wherein the amino acid positions are relative to the reference sequence corresponding to residues 8 to 890 of SEQ ID NO: 896, or relative to the reference sequence corresponding to SEQ ID NO: 896.

[0038] In some embodiments, the engineered RNA polymerase comprises an amino acid sequence having at least 70%, 75%, 80%, 81%, 82%, 83%, 84%, 85%, 86%, 87%, 88%, 89%, 90%, 91%, 92%, 93%, 94%, 95%, 96%, 97%, 98%, 99%, or more sequence identity to the reference sequence corresponding to residues 8 to 890 of SEQ ID NO: 1030, or to the reference sequence corresponding to SEQ ID NO: 1030, wherein the amino acid sequence comprises one or more substitutions relative to the reference sequence corresponding to residues 8 to 890 of SEQ ID NO: 1030, or relative to the reference sequence corresponding to SEQ ID NO: 1030.

[0039] In some embodiments, the engineered RNA polymerase comprises an amino acid sequence having at least 70%, 75%, 80%, 81%, 82%, 83%, 84%, 85%, 86%, 87%, 88%, 89%, 90%, 91%, 92%, 93%, 94%, 95%, 96%, 97%, 98%, 99%, or more sequence identity to the reference sequence corresponding to residues 8 to 890 of an even-numbered SEQ ID NO. of SEQ ID NOs: 1158-1728, or to the reference sequence corresponding to an even-numbered SEQ ID NO. of SEQ ID NOs: 1158-1728, wherein the amino acid sequence comprises one or more substitutions relative to the reference sequence corresponding to residues 8 to 890 of SEQ ID NO: 1030, or relative to the reference sequence corresponding to SEQ ID NO: 1030.

[0040] In some embodiments, the amino acid sequence of the engineered RNA polymerase comprises at least a substitution or substitution set at amino acid position(s) 60/135/185/420/483/499/832/857, 41/60/135/180/185/420/499/832, 135/136/185/416/420, 135/136/185/307/420/832/857, 135/136/180/185/307/477/832, 60/135/180/185/420/832, 60/135/136/180/185/832, 41/180/185/832/857, 185/307/416/832/857, 41/104/180/185/307/857, 41/135/136/180/185/420/477/832/857, 41/135/185/420/477/832, 41/135/180/185/416/477/832, 794, 41/60/136/185/416/420/477, 41/135/136/185/477/857, 185/477/832, 60/135/136/180/416/420/477/709/832, 135/136/180/185/416/420/832, 135/136/185/416/420/832, 41/135/136/185/307/420/483, 41/136/180/185/307/416/420/483/832/857, 41/185/420/483/832, 41/185/420/794, 185/416/420/832, 135/180/185/420/477/495/794/832, 135/136/185/416/420/794, 41/60/185/416, 41/136/180/307/416/420/832/857, 180/185/416/420/832, 41/180/185/420/477/496/857, 41/60/135/180/185/420/483/496, 41/180/185/307/416/420/832/857, 41/136/185/416/420/477/857, 135/136/180/185/416/832, 41/60/135/136/180/185/416/420/496/832/857, 41/135/136/185/477, 41/135/180/477, 41/180/185/416/420/832, 60/185/477/857, 41/832, 41/180/185/477/483/794/857, 41/136/416/420/483/832, 41/185/416/420/832, 41/136/180/185/420/477/857, 307/794, 60/135/136/185/420/857, 60/135/136/185/416, 180/307/420/832, 136/180/185/416, 41/60/180/185, 41/180/185/477/794, 41/185/794/857, 41/136, 41/60/185/857, 60/135/180/185/794, or 135/136/180/416/857, wherein the amino acid positions are relative to the reference sequence corresponding to residues 8 to 890 of SEQ ID NO: 1030, or relative to the reference sequence corresponding to SEQ ID NO: 1030.

[0041] In some embodiments, the amino acid sequence of the engineered RNA polymerase comprises at least a substitution set at amino acid positions 132/246/399/640/720/779/782/793/856/876, 134/399/640/720/779/782/793/856/876, 134/246/640/720/779/782/793/856/876, 246/399/640/655/720/779/782/793/856/876, 246/387/399/640/720/779/782/793/856/876, 246/370/399/640/720/779/782/793/856/876, 246/357/399/640/720/779/782/793/856/876, 246/399/635/640/720/779/782/793/856/876, 246/327/399/640/720/779/782/793/856/876, 246/296/399/640/720/779/782/793/856/876, 246/399/640/720/779/782/793/856/876, 246/309/399/640/720/779/782/793/856/876, 246/399/640/720/723/779/782/793/856/876, 399/640/664/720/779/782/793/856/876, 246/378/399/640/720/779/782/793/856/876, 246/399/640/691/720/779/782/793/856/876, 133/246/379/399/640/720/779/782/793/856/876, 246/310/399/640/720/779/782/793/856/876, 246/399/462/640/720/779/782/793/856/876, 246/399/502/640/720/779/782/793/856/876, 246/399/629/640/720/779/782/793/856/876, 246/399/499/640/720/779/782/793/856/876, 246/399/582/640/720/779/782/793/856/876, 399/640/720/779/782/793/856/876, 246/399/418/640/720/779/782/793/856/876, 246/399/489/640/720/779/782/793/856/876, 246/389/399/640/720/779/782/793/856/876, 246/399/494/640/720/779/782/793/856/876, 246/394/399/640/720/779/782/793/856/876, 399/640/720/751/779/782/793/856/876, 246/399/498/640/720/779/782/793/856/876, 246/399/616/640/720/779/782/793/856/876, 246/399/403/640/720/779/782/793/856/876, 246/399/613/640/720/779/782/793/856/876, 246/352/399/640/720/779/782/793/856/876, 246/399/529/640/720/779/782/793/856/876, 223/246/399/640/720/779/782/793/856/876, 246/379/399/640/720/779/782/793/856/876, 246/399/573/640/720/779/782/793/856/876, 246/336/399/640/720/779/782/793/856/876, 246/399/484/640/720/779/782/793/856/876, 246/399/640/672/720/779/782/793/856/876, 246/386/399/640/720/779/782/793/856/876, 246/399/640/720/725/779/782/793/856/876, 399/416/640/720/779/782/793/856/876, 246/399/598/640/720/779/782/793/856/876, 246/399/530/640/720/779/782/793/856/876, 246/399/491/640/720/779/782/793/856/876, 246/365/399/640/720/779/782/793/856/876, 246/399/640/720/724/779/782/793/856/876, 246/399/461/640/720/779/782/793/856/876, 246/399/615/640/720/779/782/793/856/876, 246/362/399/640/720/779/782/793/856/876, 246/359/399/640/720/779/782/793/856/876, 246/399/633/640/720/779/782/793/856/876, 246/302/399/640/720/779/782/793/856/876, 246/324/399/640/720/779/782/793/856/876, 133/246/399/640/720/779/782/793/856/876, 246/299/399/640/720/779/782/793/856/876, 246/399/640/675/720/779/782/793/856/876, 246/399/416/640/720/779/782/793/856/876, 246/399/405/640/720/779/782/793/856/876, 246/399/593/640/720/779/782/793/856/876, 246/640/720/779/782/793/856/876, 246/399/564/640/720/779/782/793/856/876, 246/399/590/640/720/779/782/793/856/876, 246/399/517/640/720/779/782/793/856/876, 246/399/622/640/720/779/782/793/856/876, 364/399/640/720/779/782/793/856/876, 246/399/626/640/720/779/782/793/856/876, 246/376/399/640/720/779/782/793/856/876, 246/399/625/640/720/779/782/793/856/876, 246/379/399/416/640/720/779/782/793/856/876, 246/350/399/640/720/779/782/793/856/876, 246/399/599/640/720/779/782/793/856/876, 246/399/600/640/720/779/782/793/856/876, 246/399/640/659/720/779/782/793/856/876, 246/399/425/640/720/779/782/793/856/876, 246/399/640/668/720/779/782/793/856/876, 246/399/640/720/730/779/782/793/856/876, 246/399/591/640/720/779/782/793/856/876, 246/343/399/640/720/779/782/793/856/876, 246/367/399/640/720/779/782/793/856/876, 246/399/640/720/779/782/793/846/856/876, 246/399/561/640/720/779/782/793/856/876, 246/372/399/640/720/779/782/793/856/876, 246/399/640/690/720/779/782/793/856/876, 246/399/455/640/720/779/782/793/856/876, 246/399/537/640/720/779/782/793/856/876, 246/399/583/640/720/779/782/793/856/876, 246/369/399/640/720/779/782/793/856/876, 246/399/640/720/779/782/793/876, 246/399/437/640/720/779/782/793/856/876, 246/340/640/720/779/782/793/856/876, 246/399/623/640/720/779/782/793/856/876, 246/399/464/640/720/779/782/793/856/876, 246/382/399/640/720/779/782/793/856/876, 246/399/579/640/720/779/782/793/856/876, 246/399/618/640/720/779/782/793/856/876, 246/399/514/640/720/779/782/793/856/876, 246/399/607/640/720/779/782/793/856/876, 340/399/640/720/779/782/793/856/876, 246/399/640/676/720/779/782/793/856/876, 246/399/640/720/751/779/782/793/856/876, 246/399/640/664/720/779/782/793/856/876, 136/399/640/720/779/782/793/856/876, 246/399/517/640/720/779/782/793/856, 246/399/410/640/720/779/782/793/856/876, 246/313/399/640/720/779/782/793/856/876, 246/364/399/640/720/779/782/793/856/876, 135/246/399/640/720/779/782/793/856/876, or 246/399/608/640/720/779/782/793/856/876, wherein the amino acid positions are relative to the reference sequence corresponding to residues 8 to 890 of SEQ ID NO: 1030, or relative to the reference sequence corresponding to SEQ ID NO: 1030.

[0042] In some embodiments, the amino acid sequence of the engineered RNA polymerase comprises at least a substitution or substitution set at amino acid position(s) 664, 352/357/359/378/633/672, 352/633, 357/370/387/394/625/725, 352/387/629, 357, 310/357/359/387/389/489/561/625, 310/357, 310/352/357/359/725, 352/357/362/561/725, 357/359/370, 352/378/403/561, 378/579/625/633/636, 357/359/378/394/403/725, 387/389/489/579/625, 352/378, 357/378/394, 357/625, 352/362/387/561, 310/357/359/387/672/725, 658, 310/352/359/561/579/625/691/725, 310/357/403, 310/352/403/579/629, 310/352/378/489/579/629/633, 625, 310/352/378/394/403/691/725, 310/357/359/403, 310/352/359/403/579/625, 310/352/370/579/625, 312, 310/352/625, 310/352/625/725, 310/357/394, 310/352, 725, 352/359, 308, 310/387/672, 310/359/370/625, 378/561, 370, 359/725, 237, 378, 352, 310, 370/691/770, 310/357/359/489/672, 357/359/579/691, 310/352/579, 352/370/625, 625/672, 310/357/359/394/489/561/625/725, 625/725, 310/625, 657, 352/359/394/579/672, 311, 359/370/579, 649, 489, 561, 370/378/489/691/725, 394/489/579/625, 98, 132,310/561/579/672, 309, 403/629, 315, 662, 650, 108, 359/625, 665, 310/394/489/579/633/691, 362/394/561/625, 310/378/691, 653, 307, 310/352/370/394/625/725, 663, 310/370/625, 352/394, 352/362/672, 101, 561/579/629/672/725, 352/625, 135, 668, 145, or 126, wherein the amino acid positions are relative to the reference sequence corresponding to residues 8 to 890 of SEQ ID NO: 1030, or relative to the reference sequence corresponding to SEQ ID NO: 1030.

[0043] In some embodiments, the engineered RNA polymerase comprises an amino acid sequence having at least 70%, 75%, 80%, 81%, 82%, 83%, 84%, 85%, 86%, 87%, 88%, 89%, 90%, 91%, 92%, 93%, 94%, 95%, 96%, 97%, 98%, 99%, or more sequence identity to the reference sequence corresponding to residues 8 to 890 of SEQ ID NO: 1036, or to the reference sequence corresponding to SEQ ID NO: 1036, wherein the amino acid sequence comprises one or more substitutions relative to the reference sequence corresponding to residues 8 to 890 of SEQ ID NO: 1036, or relative to the reference sequence corresponding to SEQ ID NO: 1036.

[0044] In some embodiments, the engineered RNA polymerase comprises an amino acid sequence having at least 70%, 75%, 80%, 81%, 82%, 83%, 84%, 85%, 86%, 87%, 88%, 89%, 90%, 91%, 92%, 93%, 94%, 95%, 96%, 97%, 98%, 99%, or more sequence identity to the reference sequence corresponding to residues 8 to 890 of an even-numbered SEQ ID NO. of SEQ ID NOs: 1730-1800, or to the reference sequence corresponding to an even-numbered SEQ ID NO. of SEQ ID NOs: 1730-1800, wherein the amino acid sequence comprises one or more substitutions relative to the reference sequence corresponding to residues 8 to 890 of SEQ ID NO: 1036, or relative to the reference sequence corresponding to SEQ ID NO: 1036.

[0045] In some embodiments, the amino acid sequence of the engineered RNA polymerase comprises at least a substitution or substitution set at amino acid position(s) 139/309/310/357/387, 135/139/357/359/387/655/658, 139/633, 145/237/250/378/648/649, 139/310/387/633/655/658, 144/237/648/649, 250/352/359/648/649, 237/378/648/649, 145/648/649, 135/139/352/655/658, 135/139/151, 310/655/658, 135/139/310, 126/237/648/649, 135/310/655/658, 144/145/359/633/648/649, 151/310/655/658, 237/250/308/378/633/648/649/663, 250/310/633, 308/310/633/655/725, 237/250, 357/633/648/649, 310/352/633/648, 308/655/658, 237/633, 139/308/310, 139/308/655/658/725, 145/250/308/310, 139/357/655/658, 633/655/658/725, 250/310, 237/250/650, 139/151/308/310/352/359/633, 310/357/359/633/658, 237/309/310, or 237/308/310/633, wherein the amino acid positions are relative to the reference sequence corresponding to residues 8 to 890 of SEQ ID NO: 1036, or relative to the reference sequence corresponding to SEQ ID NO: 1036.

[0046] In some embodiments, the engineered RNA polymerase comprises an amino acid sequence having at least 70%, 75%, 80%, 81%, 82%, 83%, 84%, 85%, 86%, 87%, 88%, 89%, 90%, 91%, 92%, 93%, 94%, 95%, 96%, 97%, 98%, 99%, or more sequence identity to the reference sequence corresponding to residues 8 to 890 of SEQ ID NO: 1742, or to the reference sequence corresponding to SEQ ID NO: 1742, wherein the amino acid sequence comprises one or more substitutions relative to the reference sequence corresponding to residues 8 to 890 of SEQ ID NO: 1742, or relative to the reference sequence corresponding to SEQ ID NO: 1742.

[0047] In some embodiments, the engineered RNA polymerase comprises an amino acid sequence having at least 70%, 75%, 80%, 81%, 82%, 83%, 84%, 85%, 86%, 87%, 88%, 89%, 90%, 91%, 92%, 93%, 94%, 95%, 96%, 97%, 98%, 99%, or more sequence identity to the reference sequence corresponding to residues 8 to 890 of an even-numbered SEQ ID NO. of SEQ ID NOs: 1802-1912, or to the reference sequence corresponding to an even-numbered SEQ ID NO. of SEQ ID NOs: 1802-1912, wherein the amino acid sequence comprises one or more substitutions relative to the reference sequence corresponding to residues 8 to 890 of SEQ ID NO: 1742, or relative to the reference sequence corresponding to SEQ ID NO: 1742.

[0048] In some embodiments, the amino acid sequence of the engineered RNA polymerase comprises at least a substitution or substitution set at amino acid position(s) 139/140/633/659/662/663/743/782/784/793, 129/132/150/206/207/209/357/425/541/778, 101/129/132/150/206/209/357/425/778, 132/150/206/207/311/357/778, 140/206/210/633/659/782, 140/206/659/663/782/784/855, 139/140/144/206/210/633/662/782/784/795, 139/206/210/633/659/662/663/784, 139/633/659/663/782/784, 140/206/210/663, 206/207/209/357/425/778, 139/140/144/662/782, 129/132/150/206/207/209/425/543, 139/140/206/210/633/659/782, 101/132/150/206/209/357/425/541, 139/206/210/662, 207/209/357/425/778, 132/425/541/778, 150/206/207/425, 132/206/207/778, 139/659/662/782/784, 140/662/782, 206/210/633/659, 139/210/633/662/782, 139/206/210/659/663, 129/132/150/204/207/357, 139/144/659/662/782, 129/132/150/206/207/209/235/357/778, 206/210/633/795, 778, 662/663/782, 132/206/207/209/357/425/541/778, 129/132/207/235/425/778, 132/150/206, 140/206/210/662/663, 425/541/778, 139/206/659/663/782/795, 101/132/150/425/541/778, 139/144/659/782, 140, 659, 150/206/209/235/357/543/778, 101/132/206/209/543/778, 132/204/206/357/778, 129/132/150/206/207/209/543, 139/144/659/662/663/782/793, 357/778, 139/140/206/210/633/659/663, 129/132/235/357/541, 129/132/311/357/541, 101/129/132/206/209/778, 101/132/206/209, 140/659/663, 206/210/633/662/663, 140/144/659/663/743, or 139/140/633/659/662, wherein the amino acid positions are relative to the reference sequence corresponding to residues 8 to 890 of SEQ ID NO: 1742, or relative to the reference sequence corresponding to SEQ ID NO: 1742.

[0049] In some embodiments, the engineered RNA polymerase comprises an amino acid sequence having at least 70%, 75%, 80%, 81%, 82%, 83%, 84%, 85%, 86%, 87%, 88%, 89%, 90%, 91%, 92%, 93%, 94%, 95%, 96%, 97%, 98%, 99%, or more sequence identity to the reference sequence corresponding to residues 8 to 890 of SEQ ID NO: 1838, or to the reference sequence corresponding to SEQ ID NO: 1838, wherein the amino acid sequence comprises one or more substitutions relative to the reference sequence corresponding to residues 8 to 890 of SEQ ID NO: 1838, or relative to the reference sequence corresponding to SEQ ID NO: 1838.

[0050] In some embodiments, the engineered RNA polymerase comprises an amino acid sequence having at least 70%, 75%, 80%, 81%, 82%, 83%, 84%, 85%, 86%, 87%, 88%, 89%, 90%, 91%, 92%, 93%, 94%, 95%, 96%, 97%, 98%, 99%, or more sequence identity to the reference sequence corresponding to residues 8 to 890 of an even-numbered SEQ ID NO. of SEQ ID NOs: 1914-2018, or to the reference sequence corresponding to an even-numbered SEQ ID NO. of SEQ ID NOs: 1914-2018, wherein the amino acid sequence comprises one or more substitutions relative to the reference sequence corresponding to residues 8 to 890 of SEQ ID NO: 1838, or relative to the reference sequence corresponding to SEQ ID NO: 1838.

[0051] In some embodiments, the amino acid sequence of the engineered RNA polymerase comprises at least a substitution or substitution set at amino acid position(s) 473, 696, 450, 397/771, 397, 402, 378, 396, 841, 289, 388, 514, 474, 406, 357, 170/474, 761, 855, 367, 708, 407, 324, 345, 478, 513, 404, 390, 398, 715, 709, 399, 327, 438, 410, 76, 389,517, 274, 693, 553, 401, or 470, wherein the amino acid positions are relative to the reference sequence corresponding to residues 8 to 890 of SEQ ID NO: 1838, or relative to the reference sequence corresponding to SEQ ID NO: 1838.

[0052] In some embodiments, the amino acid sequence of the engineered RNA polymerase comprises at least a substitution as set forth in Tables 8.1, 9.1, 10.1, 10.2, 11.1, 12.1, 13.1, 14.1, 15.1, 16.1, 17.1, and 18.1, wherein the amino acid positions are relative to the reference sequence corresponding to residues 8 to 890 of SEQ ID NO: 2, 4, 26, 424,548, 896, 1030, 1036, 1742, or 1838, or relative to the reference sequence corresponding to SEQ ID NO: 2, 4, 26, 424,548, 896, 1030, 1036, 1742, or 1838.

[0053] In some embodiments, the amino acid sequence of the engineered RNA polymerase comprises at least a substitution or substitution set of an engineered RNA polymerase set forth in Tables 8.1, 9.1, 10.1, 10.2, 11.1, 12.1, 13.1, 14.1, 15.1, 16.1, 17.1, and 18.1, wherein the amino acid positions are relative to the reference sequence corresponding to residues 8 to 890 of SEQ ID NO: 2, 4, 26, 424,548, 896, 1030, 1036, 1742, or 1838, or relative to the reference sequence corresponding to SEQ ID NO: 2, 4, 26, 424, 548, 896, 1030, 1036, 1742, or 1838.

[0054] In some embodiments, the engineered RNA polymerase comprises an amino acid sequence having at least 70%, 75%, 80%, 81%, 82%, 83%, 84%, 85%, 86%, 87%, 88%, 89%, 90%, 91%, 92%, 93%, 94%, 95%, 96%, 97%, 98%, 99% or more sequence identity to a reference sequence having a substitution or substitution set as set forth in Tables 8.1, 9.1, 10.1, 10.2, 11.1, 12.1, 13.1, 14.1, 15.1, 16.1, 17.1, and 18.1, wherein the amino acid positions are relative to the reference sequence corresponding to residues 8 to 890 of SEQ ID NO: 2, 4, 26, 424,548, 896, 1030, 1036, 1742, or 1838, or relative to the reference sequence corresponding to SEQ ID NO: 2, 4, 26, 424,548, 896, 1030, 1036, 1742, or 1838.

[0055] In some embodiments, the engineered RNA polymerase comprises an amino acid sequence comprising residues 8 to 890 of an even numbered SEQ ID NO. of SEQ ID NOs: 2-2018, or comprises an even numbered SEQ ID NO. of SEQ ID NOs: 2-2018, optionally wherein the amino acid sequence has 1, 2, 3, 4, 5, 6, 7, 8, 9, or up to 10 substitutions.

[0056] In some embodiments, the engineered RNA polymerase comprises an amino acid sequence comprising residues 8 to 890 of SEQ ID NO: 2, 4, 26, 424,548, 896, 1030, 1036, 1742, or 1838, or comprising SEQ ID NO: 2, 4, 26, 424,548, 896, 1030, 1036, 1742, or 1838, optionally wherein the amino acid sequence has 1, 2, 3, 4, 5, 6, 7, 8, 9, or up to 10 substitutions.

[0057] In some embodiments, the engineered RNA polymerase is characterized by at least one improved property as compared to a reference RNA polymerase. In some embodiments, the improved property is selected from i) increased activity, ii) increased thermostability, iii) increased capping activity, or iv) increased RNA product yield, or any combination of i), ii), iii) and iv), as compared to a reference RNA polymerase, wherein the reference RNA polymerase has the sequence corresponding to residues 8 to 890 of SEQ ID NO: 2, 4, 26, 424,548, 896, 1030, 1036, 1742, or 1838, or the sequence corresponding to SEQ ID NO: 2, 4, 26, 424,548, 896, 1030, 1036, 1742, or 1838.. In some embodiments, the reference RNA polymerase has the sequence corresponding to residues 8 to 890 of SEQ ID NO: 2, or the sequence corresponding to SEQ ID NO: 2.

[0058] In some further embodiments, the engineered RNA polymerase is purified. In some embodiments, the engineered RNA polymerase is provided in solution, as a lyophilizate, or is immobilized on a substrate or support medium, such as surfaces of solid substrates or membranes or particles.

[0059] In another aspect, the present disclosure provides recombinant polynucleotides encoding the engineered RNA polymerases disclosed herein.

[0060] In some embodiments, the recombinant polynucleotide comprises a polynucleotide sequence having at least 70%, 75%, 75%, 80%, 81%, 82%, 83%, 84%, 85%, 90%, 91%, 92%, 93%, 94%, 95%, 96%, 97%, 98%, 99%, or more sequence identity to a reference polynucleotide sequence corresponding to nucleotide residues 21 to 2670 of an odd-numbered SEQ ID NO. of SEQ ID NOs: 3-2017, or to an odd-numbered SEQ ID NO. of SEQ ID NOs: 1-2017, wherein the recombinant polynucleotide encodes an RNA polymerase.

[0061] In some embodiments, the recombinant polynucleotide comprises a polynucleotide sequence having at least 70%, 75%, 75%, 80%, 81%, 82%, 83%, 84%, 85%, 90%, 91%, 92%, 93%, 94%, 95%, 96%, 97%, 98%, 99%, or more sequence identity to a reference polynucleotide sequence corresponding to nucleotide residues 21 to 2670 of SEQ ID NO: 1, 3, 25, 423,547, 895, 1029, 1035, 1741, or 1837, or a reference polynucleotide sequence corresponding to SEQ ID NO: 1, 3, 25, 423,547, 895, 1029, 1035, 1741, or 1837, wherein the recombinant polynucleotide encodes an RNA polymerase.

[0062] In some embodiments, the polynucleotide sequence of the recombinant polynucleotide encoding an engineered RNA polymerase is codon optimized. In some embodiments, the polynucleotide sequence is codon optimized for expression in a bacterial cell, fungal cell, insect cell, or mammalian cell.

[0063] In some embodiments, the recombinant polynucleotide comprises a polynucleotide sequence comprising nucleotide residues 21 to 2670 of an odd-numbered SEQ ID NO. of SEQ ID NOs: 1-2017, or a polynucleotide sequence comprising an odd numbered SEQ ID NO. of SEQ ID NOs: 1-2017.

[0064] In a further aspect, the present disclosure provides expression vectors comprising at least one recombinant polynucleotide encoding an engineered RNA polymerase described herein. In some embodiments, the recombinant polynucleotide of the expression vector is operably linked to a control sequence. In some embodiments, the control sequence comprises a promoter, particularly a heterologous promoter.

[0065] In another aspect, the present disclosure also provides a host cell comprising at least one expression vector provided herein. In some embodiments, the host cell is a prokaryotic cell or a eukaryotic cell. In some embodiments, the host cell is bacterial cell, fungal cell, insect cell, or mammalian cell. In some embodiments, the host cell is a bacterial cell, such as E. coli. or B. subtilis.

[0066] In a further aspect, the present disclosure provides a method of producing an engineered RNA polymerase polypeptide, the method comprising culturing a host cell described herein under suitable culture conditions such that at least one engineered RNA polymerase is produced. In some embodiments, the method further comprises recovering or isolating the engineered RNA polymerase from the culture and/or host cells. In some embodiments, the method further comprises purifying the engineered RNA polymerase.

[0067] In another aspect, the present disclosure provides a composition comprising at least one engineered RNA polymerase disclosed herein. In some embodiments, the composition further comprises at least a buffer. In some embodiments, the composition further comprises a reducing agent, such as dithiothreitol or mercaptoethanol. In some embodiments, the composition further comprises at least one or more nucleotide triphosphate (NTP) substrates, particularly rNTP substrates. In some embodiments, the composition further comprises a cap analog. In some embodiments, the composition further comprises a target DNA template. In some embodiments, the target DNA template comprises a promoter recognized by the engineered RNA polymerase. In some embodiments, the composition further comprises an additive, such as a molecular crowding agent. In some embodiments, the composition further comprises a pyrophosphatase and/or RNase inhibitor.

[0068] In a further aspect, the present disclosure provides a method of producing RNA, the method comprising contacting a target DNA template with an engineered RNA polymerase described herein in presence of one or more nucleotide triphosphates under conditions suitable for transcription of the target DNA template. In some embodiments, the method further comprises providing a cap analog. In some embodiments, the suitable conditions comprise a temperature of about 25° C. to about 50° C. In some embodiments, the suitable conditions include an additive, such as a molecular crowding agent. In some embodiments, the method further comprises a pyrophosphatase and/or RNase inhibitor in the reaction with the engineered RNA polymerase.

[0069] In a further aspect, the present disclosure also provides a kit comprising at least one engineered RNA polymerase disclosed herein. In some embodiments, the kit further comprises one or more of a buffer, one or more rNTPs, Mg⁺², and a reducing agent. In some embodiments, the kit further comprises a DNA template. In some embodiments, the kit further comprises a molecular crowding agent.

### DETAILED DESCRIPTION

[0070] The present disclosure provides engineered RNA polymerase polypeptides and compositions thereof, where the engineered RNA polymerase displays one or more improved properties. The present disclosure further provides recombinant polynucleotides encoding the engineered RNA polymerase polypeptides and methods of using the engineered RNA polymerases for producing RNA. In some embodiments, the expressed RNA encodes a polypeptide or is a non-coding RNA, such as shRNA, miRNA, or guide RNA.

### Abbreviations and Definitions

[0071] In reference to the present disclosure, the technical and scientific terms used in the descriptions herein will have the meanings commonly understood by one of ordinary skill in the art, unless specifically defined otherwise.

[0072] Furthermore, the headings provided herein are not limitations of the various aspects or embodiments of the invention which can be had by reference to the application as a whole.

[0073] It is to be understood that the invention herein is not limited to the particular methodology, protocols, and reagents described, as these may vary, depending upon the context they are used by those of skill in the art. Accordingly, the terms defined immediately below are more fully described by reference to the application as a whole.

[0074] As used herein, the singular “a”, “an,” and “the” include the plural references, unless the context clearly indicates otherwise.

[0075] As used herein, the term “comprising” and its cognates are used in their inclusive sense (i.e., equivalent to the term “including” and its corresponding cognates).

[0076] It is also to be understood that where description of embodiments use the term “comprising” and its cognates, the embodiments can also be described using language “consisting essentially of” or “consisting of.”

[0077] Moreover, numeric ranges are inclusive of the numbers defining the range. Thus, every numerical range disclosed herein is intended to encompass every narrower numerical range that falls within such broader numerical range, as if such narrower numerical ranges were all expressly written herein. It is also intended that every maximum (or minimum) numerical limitation disclosed herein includes every lower (or higher) numerical limitation, as if such lower (or higher) numerical limitations were expressly written herein.

[0078] As used herein, the term “about” means an acceptable error for a particular value. In some instances “about” means within 0.05%, 0.5%, 1.0%, or 2.0%, of a given value range. In some instances, “about” means within 1, 2, 3, or 4 standard deviations of a given value.

[0079] “ATCC” refers to the American Type Culture Collection whose biorepository collection includes genes and strains.

[0080] “NCBI” refers to National Center for Biological Information and the sequence databases provided therein.

[0081] “Protein,” “polypeptide,” and “peptide” are used interchangeably to denote a polymer of at least two amino acids covalently linked by an amide bond, regardless of length or post-translational modification (e.g., glycosylation or phosphorylation).

[0082] “Amino acids” are referred to herein by either their commonly known three-letter symbols or by the one-letter symbols recommended by IUPAC-IUB Biochemical Nomenclature Commission. The abbreviations used for the genetically encoded amino acids are conventional and are as follows: alanine (Ala or A), arginine (Arg or R), asparagine (Asn or N), aspartate (Asp or D), cysteine (Cys or C), glutamate (Glu or E), glycine (Gly or G), glutamine (Gln or Q), histidine (His or H), isoleucine (Ile or I), leucine (Leu or L), lysine (Lys or K), methionine (Met or M), phenylalanine (Phe or F), proline (Pro or P), serine (Ser or S), threonine (Thr or T), tryptophan (Trp or W), tyrosine (Tyr or Y), and valine (Val or V). When the three-letter abbreviations are used, unless specifically preceded by an “L” or a “D” or clear from the context in which the abbreviation is used, the amino acid may be in either the L- or D-configuration about α-carbon (Ca). For example, whereas “Ala” designates alanine without specifying the configuration about the α carbon, “D-Ala” and “L-Ala” designate D-alanine and L-alanine, respectively. When the one-letter abbreviations are used, upper case letters designate amino acids in the L-configuration about the α-carbon and lower case letters designate amino acids in the D-configuration about the α-carbon. For example, “A” designates L-alanine and “a” designates D-alanine. When polypeptide sequences are presented as a string of one-letter or three-letter abbreviations (or mixtures thereof), the sequences are presented in the amino (N) to carboxy (C) direction in accordance with common convention.

[0083] “RNA polymerase” or “RNAP” refers to an enzyme that catalyzes the synthesis of RNA in the 5′ to 3′ direction using a polynucleotide as a template. In some embodiments, the RNA polymerase uses a DNA template and is, in some embodiments, referred to as a DNA-directed or DNA-dependent RNA polymerase. In some embodiments, the RNA polymerase uses a RNA template and is, in some embodiments, referred to as an RNA-directed or RNA-dependent RNA polymerase. In some embodiments, an RNA polymerase is capable of using DNA and RNA as a template for synthesis of the RNA. In some embodiments, the RNA product is referred to as a “RNA transcript.”

[0084] “Cap” as used herein refers to the nucleoside that is joined via its 5′ carbon to a triphosphate group that is, in turn joined to the 5′ carbon of the most 5′ nucleotide of an RNA transcript. In some embodiments, the nucleoside of the cap is a guanine. In some embodiments, the nitrogen at the 7-position of guanine in the cap is methylated and is denoted as m7G. In some embodiments, the cap is a dinucleotide cap, trinucleotide cap, or a tetranucleotide cap. The terms “capped RNA,” “5′ capped RNA,” and “capped mRNA” refer to RNA and mRNA, respectively that comprise the cap.

[0085] “Fusion protein,” and “chimeric protein” and “chimera” refer to hybrid proteins created through the joining of two or more polynucleotides that originally encode separate proteins. In some embodiments, fusion proteins are created by recombinant technology (e.g., molecular biology techniques known in the art).

[0086] “Polynucleotide,” “nucleic acid,” or “oligonucleotide” is used herein to denote a polymer comprising at least two nucleotides where the nucleotides are either deoxyribonucleotides or ribonucleotides or mixtures of deoxyribonucleotides and ribonucleotides. In some embodiments, the abbreviations used for genetically encoding nucleosides are conventional and are as follow: adenosine (A); guanosine (G); cytidine (C); thymidine (T); and uridine (U). Unless specifically delineated, the abbreviated nucleosides may be either ribonucleosides or 2′-deoxyribonucleosides. The nucleosides may be specified as being either ribonucleosides or 2′-deoxyribonucleosides on an individual basis or on an aggregate basis. When polynucleotide, nucleic acid, or oligonucleotide sequences are presented as a string of one-letter abbreviations, the sequences are presented in the 5′ to 3′ direction in accordance with common convention, and the phosphates are not indicated. The term “DNA” refers to deoxyribonucleic acid. The term “RNA” refers to ribonucleic acid. The polynucleotide or nucleic acid may be single-stranded or double-stranded, or may include both single-stranded regions and double-stranded regions.

[0087] “Duplex” and “ds” refer to a double-stranded nucleic acid (e.g., DNA or RNA) molecule comprised of two single-stranded polynucleotides that are complementary in their sequence (A pairs to T or U, C pairs to G), arranged in an antiparallel 5′ to 3′ orientation, and held together by hydrogen bonds between the nucleobases (e.g., adenine [A], guanine [G], cytosine [C], thymine [T], uridine [U]).

[0088] “Engineered,” “recombinant,” “non-naturally occurring,” and “variant,” when used with reference to a cell, a polynucleotide or a polypeptide refer to a material or a material corresponding to the natural or native form of the material that has been modified in a manner that would not otherwise exist in nature or is identical thereto but produced or derived from synthetic materials and/or by manipulation using recombinant techniques.

[0089] “Wild-type” and “naturally occurring” refer to the form found in nature. For example, a wild-type polypeptide or polynucleotide sequence is a sequence present in an organism that can be isolated from a source in nature and which has not been intentionally modified by human manipulation.

[0090] “Coding sequence” refers to that part of a nucleic acid (e.g., a gene) that encodes an amino acid sequence of a protein.

[0091] “Percent (%) sequence identity” refers to comparisons among polynucleotides and polypeptides, and are determined by comparing two optimally aligned sequences over a comparison window, wherein the portion of the polynucleotide or polypeptide sequence in the comparison window may comprise additions or deletions (i.e., gaps) as compared to the reference sequence for optimal alignment of the two sequences. The percentage may be calculated by determining the number of positions at which the identical nucleic acid base or amino acid residue occurs in both sequences to yield the number of matched positions, dividing the number of matched positions by the total number of positions in the window of comparison and multiplying the result by 100 to yield the percentage of sequence identity. Alternatively, the percentage may be calculated by determining the number of positions at which either the identical nucleic acid base or amino acid residue occurs in both sequences or a nucleic acid base or amino acid residue is aligned with a gap to yield the number of matched positions, dividing the number of matched positions by the total number of positions in the window of comparison and multiplying the result by 100 to yield the percentage of sequence identity. Those of skill in the art appreciate that there are many established algorithms available to align two sequences. Optimal alignment of sequences for comparison can be conducted, e.g., by the local homology algorithm of Smith and Waterman (Smith and Waterman, Adv. Appl. Math., 1981, 2:482), by the homology alignment algorithm of Needleman and Wunsch (Needleman and Wunsch, J. Mol. Biol., 1970, 48:443), by the search for similarity method of Pearson and Lipman (Pearson and Lipman, Proc. Natl. Acad. Sci. USA, 1988, 85:2444), by computerized implementations of these algorithms (e.g., GAP, BESTFIT, FASTA, and TFASTA in the GCG Wisconsin Software Package), or by visual inspection, as known in the art. Examples of algorithms that are suitable for determining percent sequence identity and sequence similarity include, but are not limited to the BLAST and BLAST 2.0 algorithms (see, e.g., Altschul et al., J. Mol. Biol., 1990, 215: 403-410; and Altschul et al., Nucleic Acids Res., 1977, 3389-3402). Software for performing BLAST analyses is publicly available through the National Center for Biotechnology Information website. This algorithm involves first identifying high scoring sequence pairs (HSPs) by identifying short words of length “W” in the query sequence, which either match or satisfy some positive-valued threshold score “T,” when aligned with a word of the same length in a database sequence. T is referred to as the neighborhood word score threshold (see Altschul et al, supra). These initial neighborhood word hits act as seeds for initiating searches to find longer HSPs containing them. The word hits are then extended in both directions along each sequence for as far as the cumulative alignment score can be increased. Cumulative scores are calculated using, for nucleotide sequences, the parameters “M” (reward score for a pair of matching residues; always >0) and “N” (penalty score for mismatching residues; always <0). For amino acid sequences, a scoring matrix is used to calculate the cumulative score. Extension of the word hits in each direction are halted when: the cumulative alignment score falls off by the quantity “X” from its maximum achieved value; the cumulative score goes to zero or below, due to the accumulation of one or more negative-scoring residue alignments; or the end of either sequence is reached. The BLAST algorithm parameters W, T, and X determine the sensitivity and speed of the alignment. The BLASTN program (for nucleotide sequences) uses as defaults a wordlength (W) of 11, an expectation (E) of 10, M=5, N=−4, and a comparison of both strands. For amino acid sequences, the BLASTP program uses as defaults a wordlength (W) of 3, an expectation (E) of 10, and the BLOSUM62 scoring matrix (see, e.g., Henikoff and Henikoff, Proc. Natl. Acad. Sci. USA, 1989, 89:10915). Exemplary determination of sequence alignment and % sequence identity can employ the BESTFIT or GAP programs in the GCG Wisconsin Software package (Accelrys, Madison WI), using default parameters provided.

[0092] “Reference sequence” refers to a defined sequence used as a basis for a sequence comparison. A reference sequence may be a subset of a larger sequence, for example, a segment of a full-length gene or polypeptide sequence. Generally, a reference sequence is at least 20 nucleotide or amino acid residues in length, at least 25 residues in length, at least 50 residues in length, at least 100 residues in length or the full length of the nucleic acid or polypeptide. Since two polynucleotides or polypeptides may each (1) comprise a sequence (i.e., a portion of the complete sequence) that is similar between the two sequences, and (2) may further comprise a sequence that is divergent between the two sequences, sequence comparisons between two (or more) polynucleotides or polypeptide are typically performed by comparing sequences of the two polynucleotides or polypeptides over a “comparison window” to identify and compare local regions of sequence similarity. In some embodiments, a “reference sequence” can be based on a primary amino acid sequence, where the reference sequence is a sequence that can have one or more changes in the primary sequence. For instance, the phrase “a reference sequence corresponding to SEQ ID NO: 4, having an aspartate at the residue corresponding to X64” (or “a reference sequence corresponding to SEQ ID NO: 4, having an aspartate at the residue corresponding to position 64”) refers to a reference sequence in which the corresponding residue at position X64 in SEQ ID NO: 4 (e.g., a glycine), has been changed to aspartate.

[0093] “Comparison window” refers to a conceptual segment of contiguous nucleotide positions or amino acids residues wherein a sequence may be compared to a reference sequence. In some embodiments, the comparison window is at least 15 to 20 contiguous nucleotides or amino acids and wherein the portion of the sequence in the comparison window may comprise additions or deletions (i.e., gaps) of 20 percent or less as compared to the reference sequence (which does not comprise additions or deletions) for optimal alignment of the two sequences. In some embodiments, the comparison window can be longer than 15-20 contiguous residues, and includes, optionally 30, 40, 50, 100, or longer windows.

[0094] “Corresponding to”, “reference to,” and “relative to” when used in the context of the numbering of a given amino acid or polynucleotide sequence refer to the numbering of the residues of a specified reference sequence when the given amino acid or polynucleotide sequence is compared to the reference sequence. In other words, the residue number or residue position of a given polymer is designated with respect to the reference sequence rather than by the actual numerical position of the residue within the given amino acid or polynucleotide sequence. For example, a given amino acid sequence, such as that of an engineered RNA polymerase, can be aligned to a reference sequence by introducing gaps to optimize residue matches between the two sequences. In these cases, although the gaps are present, the numbering of the residue in the given amino acid or polynucleotide sequence is made with respect to the reference sequence to which it has been aligned. In some embodiments, the sequence is tagged (e.g., with a histidine tag).

[0095] “Mutation” refers to the alteration of a nucleic acid sequence. In some embodiments, mutations result in changes to the encoded polypeptide sequence (i.e., as compared to the original sequence without the mutation). In some embodiments, the mutation comprises a substitution, such that a different amino acid is produced. In some alternative embodiments, the mutation comprises an addition, such that an amino acid is added (e.g., insertion) to the original polypeptide sequence. In some further embodiments, the mutation comprises a deletion, such that an amino acid is deleted from the original polypeptide sequence. Any number of mutations may be present in a given sequence.

[0096] “Amino acid difference” and “residue difference” refer to a difference in the amino acid residue at a position of a polypeptide sequence relative to the amino acid residue at a corresponding position in a reference sequence. The positions of amino acid differences generally are referred to herein as “Xn,” where n refers to the corresponding position in the reference sequence upon which the residue difference is based. For example, a “residue difference at position X64 as compared to SEQ ID NO: 4” (or a “residue difference at position 64 as compared to SEQ ID NO: 4”) refers to a difference of the amino acid residue at the polypeptide position corresponding to position 64 of SEQ ID NO: 4. Thus, if the reference polypeptide of SEQ ID NO: 4 has an arginine at position 64, then a “residue difference at position X64 as compared to SEQ ID NO: 4” refers to an amino acid substitution of any residue other than arginine at the position of the polypeptide corresponding to position 64 of SEQ ID NO: 4. In some instances herein, the specific amino acid residue difference at a position is indicated as “XnY” where “Xn” specified the corresponding residue and position of the reference polypeptide (as described above), and “Y” is the single letter identifier of the amino acid found in the engineered polypeptide (i.e., the different residue than in the reference polypeptide). In some instances (e.g., in the Tables in the Examples), the present disclosure also provides specific amino acid differences denoted by the conventional notation “AnB”, where A is the single letter identifier of the residue in the reference sequence, “n” is the number of the residue position in the reference sequence, and B is the single letter identifier of the residue substitution in the sequence of the engineered polypeptide. In some embodiments, the amino acid difference, e.g., a substitution, is denoted by the abbreviation “nB,” without the identifier for the residue in the reference sequence. In some embodiments, the phrase “an amino acid residue nB” denotes the presence of the amino residue in the engineered polypeptide, which may or may not be a substitution in context of a reference sequence. In some embodiments, the “substitution” comprises the deletion of an amino acid, and can be denoted by “−” symbol.

[0097] In some instances, a polypeptide of the present disclosure can include one or more amino acid residue differences relative to a reference sequence, which is indicated by a list of the specified positions where residue differences are present relative to the reference sequence. In some embodiments, where more than one amino acid can be used in a specific residue position of a polypeptide, the various amino acid residues that can be used are separated by a “/” (e.g., L23I/L23T, L23I/T, or 23I/T). The present disclosure includes engineered polypeptide sequences comprising one or more amino acid differences that include either/or both conservative and non-conservative amino acid substitutions, as well as insertions and deletions of amino acids in the sequence.

[0098] “Amino acid substitution set” and “substitution set” refers to a group of amino acid substitutions within a polypeptide sequence. In some embodiments, substitution sets comprise 2, 3, 4, 5, 6, 7, 8, 9, 10, 11, 12, 13, 14, 15, or more amino acid substitutions. In some embodiments, a substitution set refers to the set of amino acid substitutions that is present in any of the variant RNA polymerase polypeptides listed in any of the Tables in the Examples. In these substitution sets, the individual substitutions are separated by a semicolon (“;”; e.g., K394R; C846N) or slash (“/”; e.g., K394R/C846N or 394R/846N).

[0099] “Conservative amino acid substitution” refers to a substitution of a residue with a different residue having a similar side chain, and thus typically involves substitution of the amino acid in the polypeptide with amino acids within the same or similar defined class of amino acids. By way of example and not limitation, an amino acid with an aliphatic side chain may be substituted with another aliphatic amino acid (e.g., alanine, valine, leucine, and isoleucine); an amino acid with hydroxyl side chain is substituted with another amino acid with a hydroxyl side chain (e.g., serine and threonine); an amino acids having aromatic side chains is substituted with another amino acid having an aromatic side chain (e.g., phenylalanine, tyrosine, tryptophan, and histidine); an amino acid with a basic side chain is substituted with another amino acid with a basis side chain (e.g., lysine and arginine); an amino acid with an acidic side chain is substituted with another amino acid with an acidic side chain (e.g., aspartic acid or glutamic acid); and a hydrophobic or hydrophilic amino acid is replaced with another hydrophobic or hydrophilic amino acid, respectively.

[0100] “Non-conservative substitution” refers to substitution of an amino acid in the polypeptide with an amino acid with significantly differing side chain properties. Non-conservative substitutions may use amino acids between, rather than within, the defined groups and affect: (a) the structure of the peptide backbone in the area of the substitution (e.g., proline for glycine); (b) the charge or hydrophobicity; and/or (c) the bulk of the side chain. By way of example and not limitation, exemplary non-conservative substitutions include an acidic amino acid substituted with a basic or aliphatic amino acid; an aromatic amino acid substituted with a small amino acid; and a hydrophilic amino acid substituted with a hydrophobic amino acid.

[0101] “Deletion” refers to modification to the polypeptide by removal of one or more amino acids from the reference polypeptide. Deletions can comprise removal of 1 or more amino acids, 2 or more amino acids, 5 or more amino acids, 10 or more amino acids, 15 or more amino acids, or 20 or more amino acids, up to 10% of the total number of amino acids, or up to 20% of the total number of amino acids making up the reference polypeptide while retaining biological activity and/or retaining the improved properties of an engineered RNA polymerase. Deletions can be directed to the internal portions and/or terminal portions of the polypeptide. In various embodiments, the deletion can comprise a continuous segment or can be discontinuous. Deletions are indicated by “−”, and may be present in substitution sets.

[0102] “Insertion” refers to modification to the polypeptide by addition of one or more amino acids from the reference polypeptide. Insertions can be in the internal portions of the polypeptide, or to the carboxy or amino terminus. Insertions as used herein include fusion proteins as is known in the art. The insertion can be a contiguous segment of amino acids or separated by one or more of the amino acids in the naturally occurring polypeptide.

[0103] “Functional fragment” and “biologically active fragment” are used interchangeably herein, to refer to a polypeptide that has an amino-terminal and/or carboxy-terminal deletion(s) and/or internal deletions, but where the remaining amino acid sequence is identical to the corresponding positions in the sequence to which it is being compared (e.g., a full length engineered RNA polymerase of the present disclosure) and that retains substantially all of the activity of the full-length polypeptide.

[0104] “Isolated polypeptide” refers to a polypeptide which is substantially separated from other contaminants that naturally accompany it (e.g., protein, lipids, and polynucleotides). The term embraces polypeptides which have been removed or purified from their naturally occurring environment or expression system (e.g., host cell or in vitro synthesis). The recombinant RNA polymerase polypeptides may be present within a cell, present in the cellular medium, or prepared in various forms, such as lysates or isolated preparations. As such, in some embodiments, the recombinant RNA polymerase polypeptides provided herein are isolated polypeptides.

[0105] “Substantially pure polypeptide” refers to a composition in which the polypeptide species is the predominant species present (i.e., on a molar or weight basis it is more abundant than any other individual macromolecular species in the composition), and is generally a substantially purified composition when the object species comprises at least about 50 percent of the macromolecular species present by mole or % weight. Generally, a substantially pure RNA polymerase composition will comprise about 60% or more, about 70% or more, about 80% or more, about 90% or more, about 95% or more, and about 98% or more of all macromolecular species by mole or % weight present in the composition. In some embodiments, the object species is purified to essential homogeneity (i.e., contaminant species cannot be detected in the composition by conventional detection methods) wherein the composition consists essentially of a single macromolecular species. Solvent species, small molecules (<500 Daltons), and elemental ion species are not considered macromolecular species. In some embodiments, the isolated recombinant RNA polymerase polypeptides are substantially pure polypeptide compositions.

[0106] “Improved property” refers to an engineered RNA polymerase polypeptide that exhibits an improvement in any RNA polymerase property as compared to a reference RNA polymerase polypeptide, such as a wild-type RNA polymerase polypeptide or another engineered RNA polymerase polypeptide.

[0107] Improved properties include, but are not limited to, such properties as increased protein expression, increased activity, increased stability, increased thermostability, increased pH stability, increased chemical stability, improved solvent stability, increased solubility, increased inhibitor resistance, increased processivity, and increased yield.

[0108] “Increased enzyme activity” and “enhanced enzyme activity” refer to an improved property of the engineered RNA polymerase polypeptides, which can be represented by an increase in specific activity as compared to the reference RNA polymerase polypeptide (e.g., wild-type RNA polymerase and/or another engineered RNA polymerase). Exemplary methods to determine enzyme activity are provided in the Examples. Improvements in enzyme activity can be from about 1.1 fold the enzyme activity of the corresponding wild-type or reference polypeptide, to about 1.5 fold, 2-fold, 5-fold, 10-fold, 20-fold, 25-fold, 50-fold, 75-fold, 100-fold, 150-fold, 200-fold or more enzyme activity than the naturally-occurring RNA polymerase or another engineered RNA polymerase from which the RNA polymerase polypeptides were derived.

[0109] “Codon optimized” refers to changes in the codons of the polynucleotide encoding a protein to those preferentially used in a particular organism such that the encoded protein is more efficiently expressed in that organism. Although the genetic code is degenerate, in that most amino acids are represented by several codons, called “synonyms” or “synonymous” codons, it is well known that codon usage by particular organisms is nonrandom and biased towards particular codon triplets. This codon usage bias may be higher in reference to a given gene, genes of common function or ancestral origin, highly expressed proteins versus low copy number proteins, and the aggregate protein coding regions of an organism's genome. In some embodiments, the polynucleotides encoding the RNA polymerase polypeptides are codon optimized for optimal production from the host organism selected for expression.

[0110] “Control sequence” refers herein to include all components that are necessary or advantageous for the expression of a polynucleotide and/or polypeptide of the present disclosure. Each control sequence may be native or foreign to the nucleic acid sequence encoding the polypeptide. Such control sequences include, but are not limited to, leaders, polyadenylation sequences, propeptide sequences, promoter sequences, signal peptide sequences, initiation sequences, and transcription terminators. At a minimum, the control sequences include a promoter, and transcriptional and translational stop signals. In some embodiments, the control sequences are provided with linkers for the purpose of introducing specific restriction sites facilitating ligation of the control sequences with the coding region of the nucleic acid sequence encoding a polypeptide.

[0111] “Operably linked” or “operatively linked” refers to a configuration in which a control sequence is appropriately placed (i.e., in a functional relationship) at a position relative to a polynucleotide of interest such that the control sequence directs or regulates the expression of the polynucleotide, and where relevant, expression of an encoded polypeptide of interest.

[0112] “Promoter” or “promoter sequence” refers to a nucleic acid sequence that is recognized by a host cell for expression of a polynucleotide of interest, such as a coding sequence. The promoter sequence contains transcriptional control sequences that mediate the expression of a polynucleotide of interest. The promoter may be any nucleic acid sequence which shows transcriptional activity in the host cell of choice including mutant, truncated, and hybrid promoters, and may be obtained from genes encoding extracellular or intracellular polypeptides either homologous or heterologous to the host cell. In some embodiments, the term “promoter” or “promoter sequence” refers to the transcriptional promoter sequence recognized by an engineered RNA polymerase.

[0113] “Suitable reaction conditions” or “suitable conditions” refers to those conditions (e.g., temperature, pH, buffers, co-solvents, etc.) under which an RNA polymerase of the present disclosure is capable of synthesizing an RNA transcript. Exemplary “suitable conditions” are provided herein (see, the Examples).

[0114] “Culturing” refers to the growing of a population of microbial cells under suitable conditions using any suitable medium (e.g., liquid, gel, or solid).

[0115] “Vector” is a recombinant construct for introducing a polynucleotide of interest into a cell. In some embodiments, the vector is an expression vector that is operably linked to a suitable control sequence capable of effecting the expression in a suitable host of the polynucleotide or a polypeptide encoded in the polynucleotide. In some embodiments, an “expression vector” has a promoter sequence operably linked to the polynucleotide (e.g., transgene) to drive expression in a host cell, and in some embodiments, also comprises a transcription terminator sequence.

[0116] “Expression” includes any step involved in the production of the polypeptide including, but not limited to, transcription, post-transcriptional modification, translation, and post-translational modification. In some embodiments, the term also encompasses secretion of the polypeptide from a cell.

[0117] “Produces” refers to the production of proteins and/or other compounds by cells. It is intended that the term encompass any step involved in the production of polypeptides including, but not limited to, transcription, post-transcriptional modification, translation, and post-translational modification. In some embodiments, the term also encompasses secretion of the polypeptide from a cell.

[0118] “Heterologous” or “recombinant” refers to the relationship between two or more nucleic acid or polypeptide sequences (e.g., a promoter sequence, signal peptide, terminator sequence, etc.) that are derived from different sources and are not associated in nature.

[0119] “Host cell” and “host strain” refer to suitable hosts for expression vectors comprising a polynucleotide provided herein (e.g., a polynucleotide sequences encoding at least one RNA polymerase variant). In some embodiments, the host cells are prokaryotic or eukaryotic cells that have been transformed or transfected with vectors constructed using recombinant DNA techniques as known in the art.

[0120] “Analogue” in the context of a polypeptide means a polypeptide more than 70% sequence identity but less than 100% sequence identity (e.g., more than 75%, 78%, 80%, 83%, 85%, 88%, 90%, 91%, 92%, 93%, 94%, 95%, 96%, 97%, 98%, 99% sequence identity) with a reference polypeptide. In some embodiments, analogues include non-naturally occurring amino acid residues including, but not limited, to homoarginine, ornithine and norvaline, as well as naturally occurring amino acids. In some embodiments, analogues also include one or more D-amino acid residues and non-peptide linkages between two or more amino acid residues.

### Engineered RNA Polymerase Polypeptides

[0121] In one aspect, the present disclosure provides RNA polymerases engineered to have improved properties, including, among others, increased activity, increased stability, increased thermostability, increased processivity, and/or increased yield/integrity of full length RNA transcript.

[0122] In some embodiments, the engineered RNA polymerase, or a functional fragment thereof, comprises an amino acid sequence comprising residues 8 to 890 of SEQ ID NO: 2 or comprising SEQ ID NO: 2, or an amino acid sequence having at least 70%, 75%, 80%, 81%, 82%, 83%, 84%, 85%, 86%, 87%, 88%, 89%, 90%, 91%, 92%, 93%, 94%, 95%, 96%, 97%, 98%, 99%, or more sequence identity to a reference sequence corresponding to residues 8 to 890 of SEQ ID NO: 2, 4, 26, 424,548, 896, 1030, 1036, 1742, or 1838, or to a reference sequence corresponding to SEQ ID NO: 2, 4, 26, 424,548, 896, 1030, 1036, 1742, or 1838, wherein the amino acid sequence comprises one or more substitutions relative to the reference sequence corresponding to residues 8 to 890 of SEQ ID NO: 2, 4, 26, 424,548, 896, 1030, 1036, 1742, or 1838, or relative to the reference sequence corresponding to SEQ ID NO: 2, 4, 26, 424, 548, 896, 1030, 1036, 1742, or 1838.

[0123] In some embodiments, the engineered RNA polymerase comprises an amino acid sequence having at least 70%, 75%, 80%, 81%, 82%, 83%, 84%, 85%, 86%, 87%, 88%, 89%, 90%, 91%, 92%, 93%, 94%, 95%, 96%, 97%, 98%, 99%, or more sequence identity to the reference sequence corresponding to residues 8 to 890 of SEQ ID NO: 2, or to the reference sequence corresponding to SEQ ID NO: 2, wherein the amino acid sequence comprises one or more substitutions relative to the reference sequence corresponding to residues 8 to 890 of SEQ ID NO: 2, or relative to the reference sequence corresponding to SEQ ID NO: 2.

[0124] In some embodiments, the engineered RNA polymerase comprises an amino acid sequence having at least 70%, 75%, 80%, 81%, 82%, 83%, 84%, 85%, 86%, 87%, 88%, 89%, 90%, 91%, 92%, 93%, 94%, 95%, 96%, 97%, 98%, 99%, or more sequence identity to the reference sequence corresponding to residues 8 to 890 of SEQ ID NO: 4, 26, 424,548, 896, 1030, 1036, 1742, or 1838, or to the reference sequence corresponding to SEQ ID NO: 4, 26, 424,548, 896, 1030, 1036, 1742, or 1838, wherein the amino acid sequence comprises one or more substitutions relative to the reference sequence corresponding to residues 8 to 890 of SEQ ID NO: 2, or relative to the reference sequence corresponding to SEQ ID NO: 2.

[0125] In some embodiments, the engineered RNA polymerase comprises an amino acid sequence having at least 70%, 75%, 80%, 81%, 82%, 83%, 84%, 85%, 86%, 87%, 88%, 89%, 90%, 91%, 92%, 93%, 94%, 95%, 96%, 97%, 98%, 99% or more sequence identity to the reference sequence corresponding to residues 8 to 890 of an even numbered SEQ ID NO. of SEQ ID NOs: 4-2018, or to the reference sequence corresponding to an even numbered SEQ ID NO. of SEQ ID NOs: 4-2018, wherein the amino acid sequence comprises one or more substitutions relative to the reference sequence corresponding to residues 8 to 890 of SEQ ID NO: 2, or relative to the reference sequence corresponding to SEQ ID NO: 2.

[0126] In some embodiments, the amino acid sequence of the engineered RNA polymerase comprises at least a substitution at amino acid position 7, 11, 12, 13, 15, 18, 21, 23, 25, 26, 30, 34, 41, 45, 54, 56, 57, 59, 60, 61, 64, 66, 67, 71, 74, 75, 76, 77, 78, 82, 84, 98,101,104, 108, 122, 126, 129, 132, 133, 134, 135, 136, 139, 140, 144, 145, 150, 151, 160, 161, 164, 167, 168, 169, 170, 171, 172, 177, 178, 179, 180, 181, 182, 183, 184, 185, 186, 187, 188, 189, 190, 191, 192, 193, 194, 195, 197, 198, 200, 202, 204, 206, 207, 209, 210, 223, 235, 237, 246, 250, 254, 256, 260, 269, 274, 278, 286, 289, 296, 299, 302, 307, 308, 309, 310, 311, 312, 313, 315, 319, 324, 327, 336, 337, 340, 343, 345, 347, 350, 352, 357, 359, 362, 364, 365, 367, 369, 370, 372, 375, 376, 378, 379, 382, 386, 387, 388, 389, 390, 394, 396, 397, 397, 398, 399, 401, 402, 403, 404, 405, 406, 407, 410, 413, 416, 418, 419, 420, 425, 437, 438, 450, 455, 456, 461, 462, 464, 468, 470, 473, 474, 477, 478, 483, 484, 489, 491, 494, 495, 496, 498, 499, 502, 505, 511, 513, 514, 517, 526, 527, 528, 529, 530, 531, 534, 535, 537, 541, 543, 550, 553, 561, 563, 564, 573, 574, 579, 582, 583, 588, 590, 591, 593, 598, 599, 600, 601, 605, 607, 608, 612, 613, 614, 615, 616, 618, 622, 623, 625, 626, 629, 633, 635, 636, 640, 645, 648, 649, 650, 653, 655, 657, 658, 659, 662, 663, 664, 665, 668, 670, 672, 675, 676, 686, 690, 691, 693, 694, 696, 701, 704, 708, 709, 715, 720, 723, 724, 725, 730, 743, 747, 751, 756, 761, 770, 771, 778, 779, 782, 784, 793, 794, 795, 796, 800, 808, 810, 831, 832, 839, 841, 845, 846, 852, 855, 856, 857, 858, 865, 876, 884, or 887, or combinations thereof, wherein the amino acid positions are relative to the reference sequence corresponding to residues 8 to 890 of SEQ ID NO: 2, or relative to the reference sequence corresponding to SEQ ID NO: 2.

[0127] In some embodiments, the amino acid sequence of the engineered RNA polymerase comprises at least a substitution or an amino acid residue 7N, 11E, 12E, 13G, 15E/N, 18C/V, 21E/L, 23I/T, 25V, 26Q, 30Y, 34M, 41A/S, 45T, 54Q, 56I/L, 57A/G/V, 59H/I/L, 60E/M/V, 61C/E/K, 64D/H, 66D, 67Q/R, 71E, 74R, 75R, 76E/T, 77L/T, 78I/N/Q, 82F/L, 84V, 98A/G, 101R, 104S, 108K/R, 122G, 126M, 129V, 132I/L/S/V/W, 133Q, 134H, 135G/R, 136E, 139A/L/R, 140R/S, 144I/L, 145G/S, 150K, 151R, 160C, 161V, 164I/R, 167D/S, 168I/T, 169V, 170N/R, 171E/G/Y, 1721, 177V, 178S, 179D/P, 180E/G/K/V, 181G/P/R/T, 182F, 183A/C, 184P/S/T, 185A/D/N, 186A/C/G/N/Q, 187A/N/V, 188G, 189I/K/L/Q/V, 190A/I/S, 191C/P, 192T, 193G/I/L, 194C/R, 195D/E/H/N/R/T, 197Q/V/W, 198S/V, 200E/L/N/T, 202V, 204E, 206G/V, 207V, 209E/P, 210G/M/R, 223A, 235L/T, 237L/R/S, 246A, 250R, 254M/T, 256L, 260Y, 269V, 274A, 278M, 286V, 289F/L/V, 296N/V, 299R, 302A, 307G/H, 308G/P/V/W, 309K/R/S, 310E/F/H/K/L, 311F/G/M/V, 312G/P/Q/R/S/T/V, 313M, 315T, 319D, 324L/Y, 327I/L, 336K, 3371, 340E/L/T, 343A, 345S, 347T, 350K, 352K, 357R, 359I, 362I, 364H, 365E, 367E/L, 369M, 370K, 372E, 375Y, 376M, 378D/K/P, 379E/S, 382T, 386R, 387A, 388M, 389A/C/E, 390E, 394R, 396M/R/S, 397E/G, 397I, 398D, 399I/M, 401L, 402L, 403I, 404L/R/Y, 405L, 406S, 407W, 410E/G/K, 413D, 416G/S/V, 418E/H/V, 419E/M/N/V, 420H/V, 425W/Y, 437S, 438F, 450T/V, 455K, 456E/T/Y, 461K, 462E, 464L/Y, 468R, 470G, 473K/R, 474L/M, 477E/G, 478C, 483G/Q, 484E, 4891, 491E, 494E, 495A/G/R, 496V, 498A, 499S, 502S, 505T, 511G, 513S, 514C/L/R, 517G/N/Q/R/Y, 526V, 527E/M/R, 528A, 529Q/T, 530H/T, 531S, 534E, 535C/T, 537S/V, 541M/Q, 543W, 550L, 553L, 561V, 563A, 564R, 573T, 574P/Y, 579C/G/L/Q, 582A, 583K, 588A/H/M/N/R, 590Q, 591A, 593A, 598D/E, 599N, 600E, 601M/S/V, 605R, 607E/P/R/Y, 608N, 612K, 613S, 614Q, 615K, 616A/V, 618L, 622A/E/T, 623L, 625G, 626Q, 629A, 633T, 635S, 636A, 640P, 645P/V, 648A/V, 649L, 650A/P, 653W, 655E/Q, 657I/L, 658K/R/V, 659E/G/K, 662V, 663G/L, 664K/R/W, 665G, 668A/R/S/W/Y, 670N/R, 672L, 675T, 676Q, 686Q, 690D/E, 691S, 693K, 694E/G, 696C/F, 701R, 704D, 708K, 709V, 715S, 720A/E/P/Q/R, 723A/G, 724E, 725I, 730L/Q, 743H, 747R, 751R, 756Q, 761K, 770I, 771D, 778V, 779R, 782A/G/M/V, 784A, 793F/L, 794N, 795A, 796N, 800M, 808A, 810R, 831R, 832R, 839F, 841D/N, 845E, 846N/V/Y, 852L, 855A/R, 8561, 857V, 858K, 865K/R, 876K, 884K, or 887Y, or combinations thereof, wherein the amino acid positions are relative to the reference sequence corresponding to residues 8 to 890 of SEQ ID NO: 2, or relative to the reference sequence corresponding to SEQ ID NO: 2.

[0128] In some embodiments, the amino acid sequence of the engineered RNA polymerase comprises at least a substitution H7N, I11E, N12E, I13G, K15E/N, F18C/V, 121E/L, L23I/T, A25V, I26Q, T30Y, H34M, R41A/S, A45T, G54Q, A561/L, R57A/G/V, R59H/I/L, K60E/M/V, M61C/E/K, R64D/H, L66D, K67Q/R, V71E, N74R, A75R, A76E/T, A77L/T, K78I/N/Q, T82F/L, L84V, E98A/G, A101R, G104S, T108K/R, A122G, I126M, T129V, C132I/L/S/V/W, L133Q, T134H, S135G/R, A136E, T139A/L/R, T140R/S, V1441/L, A145G/S, R150K, A151R, R160C, I161V, L1641/R, K167D/S, H1681/T, F169V, K170N/R, K171E/G/Y, N172I, L177V, N178S, K179D/P, R180E/G/K/V, V181G/P/R/T, G182F, H183A/C, V184P/S/T, Y185A/D/N, K186A/C/G/N/Q, K187A/N/V, A188G, F189I/K/L/Q/V, M190A/I/S, Q191C/P, V192T, V193G/I/L, E194C/R, A195D/E/H/N/R/T, M197Q/V/W, L198S/V, K200E/L/N/T, L202V, G204E, E206G/V, A207V, S209E/P, S210G/M/R, C223A, S235L/T, H237L/R/S, Q246A, T250R, A254M/T, E256L, A260Y, A269V, M274A, C278M, T286V, T289F/L/V, A296N/V, K299R, Q302A, R307G/H, S308G/P/V/W, L309K/R/S, A310E/F/H/K/L, A311F/G/M/V, L312G/P/Q/R/S/T/V, R313M, Y315T, S319D, 1324L/Y, V3271/L, R336K, V337I, K340E/L/T, D343A, A345S, A347T, Q350K, Q352K, A357R, V359I, M362I, R364H, G365E, M367E/L, A369M, R370K, L372E, D375Y, T376M, E378D/K/P, 1379E/S, K382T, K386R, E387A, A388M, S389A/C/E, A390E, K394R, K396M/R/S, A397E/G, A397I, R398D, V3991/M, R401L, R402L, L403I, S404L/R/Y, M405L, E406S, F407W, S410E/G/K, N413D, A416G/S/V, Y418E/H/V, K419E/M/N/V, A420H/V, Q425W/Y, P437S, M438F, L450T/V, Q455K, G456E/T/Y, E461K, D462E, F464L/Y, K468R, H470G, N473K/R, T474L/M, V477E/G, D478C, P483G/Q, Q484E, V489I, D491E, T494E, N495A/G/R, I496V, E498A, C499S, A502S, E505T, E511G, D513S, S514C/L/R, C517G/N/Q/R/Y, A526V, G527E/M/R, V528A, 1529Q/T, N530H/T, H531S, S534E, Y535C/T, C537S/V, L541M/Q, F543W, I550L, F553L, I561V, G563A, K564R, E573T, V574P/Y, R579C/G/L/Q, S582A, D583K, V588A/H/M/N/R, K590Q, Q591A, L593A, S598D/E, T599N, T600E, L601M/S/V, T605R, K607E/P/R/Y, K608N, I612K, T613S, E614Q, R615K, T616A/V, Y618L, V622A/E/T, M623L, Q625G, W626Q, E629A, N633T, G635S, V636A, S640P, A645P/V, S648A/V, K649L, E650A/P, F653W, D655E/Q, V6571/L, L658K/R/V, S659E/G/K, I662V, Q663G/L, P664K/R/W, A665G, N668A/R/S/W/Y, K670N/R, D672L, L675T, N676Q, K686Q, N690D/E, A691S, S693K, V694E/G, V696C/F, E701R, N704D, S708K, A709V, A715S, K720A/E/P/Q/R, D723A/G, T724E, V725I, C730L/Q, W743H, K747R, Q751R, L756Q, Q761K, T770I, N771D, A778V, H779R, E782A/G/M/V, G784A, Q793F/L, D794N, G795A, S796N, K800M, K808A, G810R, L831R, F832R, M839F, S841D/N, S845E, C846N/V/Y, F852L, Q855A/R, F856I, A857V, D858K, L865K/R, N876K, E884K, or F887Y, or combinations thereof, wherein the amino acid positions are relative to the reference sequence corresponding to residues 8 to 890 of SEQ ID NO: 2, or relative to the reference sequence corresponding to SEQ ID NO: 2.

[0129] In some embodiments, the amino acid sequence of the engineered RNA polymerase comprises at least a substitution at amino acid position 136, 150, 195, 206, 207, 246, 250, 337, 340, 347, 352, 359, 399, 419, 425, 456, 531, 550, 574, 588, 601, 614, 616, 640, 645, 648, 649, 694, 720, 779, 782, 793, 796, 800, 839, 841, 841, 856, 865, 876, or 884, or combinations thereof, wherein the amino acid positions are relative to the reference sequence corresponding to residues 8 to 890 of SEQ ID NO: 2, or relative to the reference sequence corresponding to SEQ ID NO: 2.

[0130] In some embodiments, the amino acid sequence of the engineered RNA polymerase comprises at least a substitution or amino acid residue 136E, 150K, 195H, 206V, 207V, 246Q, 250R, 3371, 340E, 347T, 352K, 3591, 399V, 419E, 425W, 456E, 531S, 550L, 574Y, 588M, 601V, 614Q, 616V, 640S, 645V, 648A, 649L, 694G, 720P, 779H, 782E, 793Q, 796N, 800M, 839F, 841S, 841D, 856F, 865R, 876N, or 884K, or combinations thereof, wherein the amino acid positions are relative to the reference sequence corresponding to residues 8 to 890 of SEQ ID NO: 2, or relative to the reference sequence corresponding to SEQ ID NO: 2.

[0131] In some embodiments, the amino acid sequence of the engineered RNA polymerase comprises at least a substitution 136E, A195H, A207V, A246Q, A347T, A645V, D841S, E206V, E614Q, E720P, E884K, G456E, H531S, I550L, I856F, K340E, K419E, K649L, K720P, K800M, K876N, L601V, L793Q, L865R, M399V, M839F, P640S, Q352K, Q425W, R150K, R779H, S648A, S796N, S841D, T250R, T616V, V337I, V359I, V574Y, V588M, V694G, or V782E, or combinations thereof, wherein the amino acid positions are relative to the reference sequence corresponding to residues 8 to 890 of SEQ ID NO: 2, or relative to the reference sequence corresponding to SEQ ID NO: 2.

[0132] In some embodiments, the amino acid sequence of the engineered RNA polymerase comprises at least a substitution set at amino acid positions 337/456/574/601/614/694/K720, 195/347/531/550/588, 419/839/841/865, 136/340, 246/399/616/640/720/779/782/793/856/876, 250/352/359/648/649, or 150/206/207/425, wherein the amino acid positions are relative to the reference sequence corresponding to residues 8 to 890 of SEQ ID NO: 2, or relative to the reference sequence corresponding to SEQ ID NO: 2.

[0133] In some embodiments, the amino acid sequence of the engineered RNA polymerase comprises at least a substitution set or amino acid residues 337I/456E/574Y/601V/614Q/694G/K720P, 195H/347T/531S/550L/588M, 419E/839F/841D/865R, 136E/340E, 246Q/399V/616V/640S/720P/779H/782E/793Q/856F/876N, 250R/352K/359I/648A/649L, or 150K/206V/207V/425W, wherein the amino acid positions are relative to the reference sequence corresponding to residues 8 to 890 of SEQ ID NO: 2, or relative to the reference sequence corresponding to SEQ ID NO: 2.

[0134] In some embodiments, the amino acid sequence of the engineered RNA polymerase comprises at least a substitution set V337I/G456E/V574Y/L601V/E614Q/V694G/K720P, A195H/A347T/H531S/I550L/V588M, K419E/M839F/S841D/L865R, A136E/K340E, A246Q/M399V/T616V/P640S/E720P/R779H/V782E/L793Q/I856F/K876N, T250R/Q352K/V359I/S648A/K649L, or R150K/E206V/A207V/Q425W, wherein the amino acid positions are relative to the reference sequence corresponding to residues 8 to 890 of SEQ ID NO: 2, or relative to the reference sequence corresponding to SEQ ID NO: 2.

[0135] In some embodiments, the amino acid sequence of the engineered RNA polymerase comprises at least a substitution set at amino acid positions 796/800/841/884, 394/846, 394/808/846, 404/846, or 394/796/845/846, wherein the amino acid positions are relative to the reference sequence corresponding to residues 8 to 890 of SEQ ID NO: 2, or relative to the reference sequence corresponding to SEQ ID NO: 2.

[0136] In some embodiments, the amino acid sequence of the engineered RNA polymerase comprises at least a substitution set or amino acid residues 796N/800M/841S/884K, 394R/846N, 394R/808A/846N, 404Y/846N, or 394R/796N/845E/846N, wherein the amino acid positions are relative to the reference sequence corresponding to residues 8 to 890 of SEQ ID NO: 2, or relative to the reference sequence corresponding to SEQ ID NO: 2.

[0137] In some embodiments, the amino acid sequence of the engineered RNA polymerase comprises at least a substitution set S796N/K800M/D841S/E884K, K394R/C846N, K394R/K808A/C846N, S404Y/C846N, or K394R/S796N/S845E/C846N, wherein the amino acid positions are relative to the reference sequence corresponding to residues 8 to 890 of SEQ ID NO: 2, or relative to the reference sequence corresponding to SEQ ID NO: 2.

[0138] In some embodiments, the amino acid sequence of the engineered RNA polymerase comprises at least a substitution at an amino acid position set forth in Tables 8.1, 9.1, 10.1, 10.2, 11.1, 12.1, 13.1, 14.1, 15.1, 16.1, 17.1, and 18.1, wherein the amino acid positions are relative to the reference sequence corresponding to residues 8 to 890 of SEQ ID NO: 2, or relative to the reference sequence corresponding to SEQ ID NO: 2.

[0139] In some embodiments, the amino acid sequence of the engineered RNA polymerase comprises at least one substitution set forth in Tables 8.1, 9.1, 10.1, 10.2, 11.1, 12.1, 13.1, 14.1, 15.1, 16.1, 17.1, and 18.1, wherein the amino acid positions are relative to the reference sequence corresponding to residues 8 to 890 of SEQ ID NO: 2, or relative to the reference sequence corresponding to SEQ ID NO: 2.

[0140] In some embodiments, the amino acid sequence of the engineered RNA polymerase comprises at least a substitution or substitution set at the amino acid position(s) set forth in Tables 8.1, 9.1, 10.1, 10.2, 11.1, 12.1, 13.1, 14.1, 15.1, 16.1, 17.1, and 18.1, wherein the amino acid positions are relative to the reference sequence corresponding to residues 8 to 890 of SEQ ID NO: 2, or relative to the reference sequence corresponding to SEQ ID NO: 2.

[0141] In some embodiments, the amino acid sequence of the engineered RNA polymerase comprises at least a substitution or substitution set of an engineered RNA polymerase variant set forth in Tables 8.1, 9.1, 10.1, 10.2, 11.1, 12.1, 13.1, 14.1, 15.1, 16.1, 17.1, and 18.1, wherein the amino acid positions are relative to the reference sequence corresponding to residues 8 to 890 of SEQ ID NO: 2, or relative to the reference sequence corresponding to SEQ ID NO: 2.

[0142] In some embodiments, the engineered RNA polymerase comprises an amino acid sequence having at least 70%, 75%, 80%, 81%, 82%, 83%, 84%, 85%, 86%, 87%, 88%, 89%, 90%, 91%, 92%, 93%, 94%, 95%, 96%, 97%, 98%, 99%, or more sequence identity to a reference sequence comprising a substitution or substitution set as set forth in Tables 8.1, 9.1, 10.1, 10.2, 11.1, 12.1, 13.1, 14.1, 15.1, 16.1, 17.1, and 18.1, wherein the amino acid positions are relative to the reference sequence corresponding to residues 8 to 890 of SEQ ID NO: 2, or relative to the reference sequence corresponding to SEQ ID NO: 2.

[0143] In some embodiments, the engineered RNA polymerase comprises an amino acid sequence having at least 70%, 75%, 80%, 81%, 82%, 83%, 84%, 85%, 86%, 87%, 88%, 89%, 90%, 91%, 92%, 93%, 94%, 95%, 96%, 97%, 98%, 99%, or more sequence identity to the reference sequence corresponding to residues 8 to 890 of SEQ ID NO: 2, 4, 26, 424,548, 896, 1030, 1036, 1742, or 1838, or to the reference sequence corresponding to SEQ ID NO: 2, 4, 26, 424,548, 896, 1030, 1036, 1742, or 1838.

[0144] In some embodiments, the engineered RNA polymerase comprises an amino acid sequence having at least 70%, 75%, 80%, 81%, 82%, 83%, 84%, 85%, 86%, 87%, 88%, 89%, 90%, 91%, 92%, 93%, 94%, 95%, 96%, 97%, 98%, 99% or more sequence identity to the reference sequence corresponding to residues 8 to 890 of an even numbered SEQ ID NO. of SEQ ID NOs: 2-2018, or to the reference sequence corresponding to an even numbered SEQ ID NO. of SEQ ID NOs: 2-2018.

[0145] In some embodiments, the engineered RNA polymerase comprises an amino acid sequence having at least 70%, 75%, 80%, 81%, 82%, 83%, 84%, 85%, 86%, 87%, 88%, 89%, 90%, 91%, 92%, 93%, 94%, 95%, 96%, 97%, 98%, 99%, or more sequence identity to the reference sequence corresponding to residues 8 to 890 of SEQ ID NO: 4, 26, 424,548, 896, 1030, 1036, 1742, or 1838, or to the reference sequence corresponding to SEQ ID NO: 4, 26, 424,548, 896, 1030, 1036, 1742, or 1838, wherein the amino acid sequence comprises one or more substitutions relative to the reference sequence corresponding to residues 8 to 890 of SEQ ID NO: 4, 26, 424,548, 896, 1030, 1036, 1742, or 1838, or relative to the reference sequence corresponding to SEQ ID NO: 4, 26, 424,548, 896, 1030, 1036, 1742, or 1838.

[0146] In some embodiments, the engineered RNA polymerase comprises an amino acid sequence having at least 70%, 75%, 80%, 81%, 82%, 83%, 84%, 85%, 86%, 87%, 88%, 89%, 90%, 91%, 92%, 93%, 94%, 95%, 96%, 97%, 98%, 99%, or more sequence identity to the reference sequence corresponding to residues 8 to 890 of SEQ ID NO: 4-2018, or to the reference sequence corresponding to SEQ ID NO: 4-2018, wherein the amino acid sequence comprises one or more substitutions relative to the reference sequence corresponding to residues 8 to 890 of SEQ ID NO: 4, 26, 424,548, 896, 1030, 1036, 1742, or 1838, or relative to the reference sequence corresponding to SEQ ID NO: 4, 26, 424,548, 896, 1030, 1036, 1742, or 1838.

[0147] In some embodiments, the amino acid sequence of the engineered RNA polymerase comprises at least a substitution at amino acid position 7, 11, 12, 13, 15, 18, 21, 23, 25, 26, 30, 34, 41, 45, 54, 56, 57, 59, 60, 61, 64, 66, 67, 71, 74, 75, 76, 77, 78, 82, 84, 98,101,104, 108, 122, 126, 129, 132, 133, 134, 135, 136, 139, 140, 144, 145, 150, 151, 160, 161, 164, 167, 168, 169, 170, 171, 172, 177, 178, 179, 180, 181, 182, 183, 184, 185, 186, 187, 188, 189, 190, 191, 192, 193, 194, 195, 197, 198, 200, 202, 204, 206, 207, 209, 210, 223, 235, 237, 246, 250, 254, 256, 260, 269, 274, 278, 286, 289, 296, 299, 302, 307, 308, 309, 310, 311, 312, 313, 315, 319, 324, 327, 336, 337, 340, 343, 345, 347, 350, 352, 357, 359, 362, 364, 365, 367, 369, 370, 372, 375, 376, 378, 379, 382, 386, 387, 388, 389, 390, 394, 396, 397, 397, 398, 399, 401, 402, 403, 404, 405, 406, 407, 410, 413, 416, 418, 419, 420, 425, 437, 438, 450, 455, 456, 461, 462, 464, 468, 470, 473, 474, 477, 478, 483, 484, 489, 491, 494, 495, 496, 498, 499, 502, 505, 511, 513, 514, 517, 526, 527, 528, 529, 530, 531, 534, 535, 537, 541, 543, 550, 553, 561, 563, 564, 573, 574, 579, 582, 583, 588, 590, 591, 593, 598, 599, 600, 601, 605, 607, 608, 612, 613, 614, 615, 616, 618, 622, 623, 625, 626, 629, 633, 635, 636, 640, 645, 648, 649, 650, 653, 655, 657, 658, 659, 662, 663, 664, 665, 668, 670, 672, 675, 676, 686, 690, 691, 693, 694, 696, 701, 704, 708, 709, 715, 720, 723, 724, 725, 730, 743, 747, 751, 756, 761, 770, 771, 778, 779, 782, 784, 793, 794, 795, 796, 800, 808, 810, 831, 832, 839, 841, 845, 846, 852, 855, 856, 857, 858, 865, 876, 884, or 887, or combinations thereof, wherein the amino acid positions are relative to the reference sequence corresponding to residues 8 to 890 of SEQ ID NO: 4, 26, 424, 548, 896, 1030, 1036, 1742, or 1838, or relative to the reference sequence corresponding to SEQ ID NO: 4, 26, 424,548, 896, 1030, 1036, 1742, or 1838.

[0148] In some embodiments, the amino acid sequence of the engineered RNA polymerase comprises at least a substitution or an amino acid residue 7N, 11E, 12E, 13G, 15E/N, 18C/V, 21E/L, 23I/T, 25V, 26Q, 30Y, 34M, 41A/S, 45T, 54Q, 56I/L, 57A/G/V, 59H/I/L, 60E/M/V, 61C/E/K, 64D/H, 66D, 67Q/R, 71E, 74R, 75R, 76E/T, 77L/T, 78I/N, 78Q, 82F/L, 84V, 98A/G, 101R, 104S, 108K/R, 122G, 126M, 129V, 132I/L/S/V/W, 133Q, 134H, 135G/R, 136E, 139A/L/R, 140R/S, 144I/L, 145G/S, 150K, 151R, 160C, 161V, 164I/R, 167D/S, 168I/T, 169V, 170N/R, 171E/G/Y, 1721, 177V, 178S, 179D/P, 180E/G/K/V, 181G/P/R/T, 182F, 183A/C, 184P/S/T, 185A/D/N, 186A/C/G/N/Q, 187A/N/V, 188G, 189I/K/L/Q/V, 190A/I/S, 191C/P, 192T, 193G/I/L, 194C/R, 195D/E/H/N/R/T, 197Q/V/W, 198S/V, 200E/L/N/T, 202V, 204E, 206G/V, 207V, 209E/P, 210G/M/R, 223A, 235L/T, 237L/R/S, 246A/Q, 250R, 254M/T, 256L, 260Y, 269V, 274A, 278M, 286V, 289F/L/V, 296N/V, 299R, 302A, 307G/H, 308G/P/V/W, 309K/R/S, 310E/F/H/K/L, 311F/G/M/V, 312G/P/Q/R/S/T/V, 313M, 315T, 319D, 324L/Y, 327I/L, 336K, 3371, 340E/L/T, 343A, 345S, 347T, 350K, 352K, 357R, 359I, 362I, 364H, 365E, 367E/L, 369M, 370K, 372E, 375Y, 376M, 378D/K/P, 379E/S, 382T, 386R, 387A, 388M, 389A/C/E, 390E, 394R, 396M/R/S, 397E/G, 397I, 398D, 399I/M/V, 401L, 402L, 403I, 404L/R/Y, 405L, 406S, 407W, 410E/G/K, 413D, 416G/S/V, 418E/H/V, 419E/M/N/V, 420H/V, 425W/Y, 437S, 438F, 450T/V, 455K, 456E/T/Y, 461K, 462E, 464L/Y, 468R, 470G, 473K/R, 474L/M, 477E/G, 478C, 483G/Q, 484E, 4891, 491E, 494E, 495A/G/R, 496V, 498A, 4995, 5025, 505T, 511G, 5135, 514C/L/R, 517G/N/Q/R/Y, 526V, 527E/M/R, 528A, 529Q/T, 530H/T, 531S, 534E, 535C/T, 537S/V, 541M/Q, 543W, 550L, 553L, 561V, 563A, 564R, 573T, 574P/Y, 579C/G/L/Q, 582A, 583K, 588A/H/M/N/R, 590Q, 591A, 593A, 598D/E, 599N, 600E, 601M/S/V, 605R, 607E/P/R/Y, 608N, 612K, 613S, 614Q, 615K, 616A/V, 618L, 622A/E/T, 623L, 625G, 626Q, 629A, 633T, 635S, 636A, 640S/P, 645P/V, 648A/V, 649L, 650A/P, 653W, 655E/Q, 657I/L, 658K/R/V, 659E/G/K, 662V, 663G/L, 664K/R/W, 665G, 668A/R/S/W/Y, 670N/R, 672L, 675T, 676Q, 686Q, 690D/E, 691S, 693K, 694E/G, 696C/F, 701R, 704D, 708K, 709V, 715S, 720A/E/P/Q/R, 723A/G, 724E, 725I, 730L/Q, 743H, 747R, 751R, 756Q, 761K, 770I, 771D, 778V, 779H/R, 782A/E/G/M/V, 784A, 793F/L/Q, 794N, 795A, 796N, 800M, 808A, 810R, 831R, 832R, 839F, 841D/N/S, 845E, 846N/V/Y, 852L, 855A/R, 856F/I, 857V, 858K, 865K/R, 876K/N, 884E/K, or 887Y, or combinations thereof, wherein the amino acid positions are relative to the reference sequence corresponding to residues 8 to 890 of SEQ ID NO: 4, 26, 424,548, 896, 1030, 1036, 1742, or 1838, or relative to the reference sequence corresponding to SEQ ID NO: 4, 26, 424,548, 896, 1030, 1036, 1742, or 1838.

[0149] In some embodiments, the amino acid sequence of the engineered RNA polymerase comprises at least a substitution at amino acid position 136, 150, 195, 206, 207, 246, 250, 337, 340, 347, 352, 359, 399, 419, 425, 456, 531, 550, 574, 588, 601, 614, 616, 640, 645, 648, 649, 694, 720, 779, 782, 793, 796, 800, 839, 841, 841, 856, 865, 876, or 884, or combinations thereof, wherein the amino acid positions are relative to the reference sequence corresponding to residues 8 to 890 of SEQ ID NO: 4, 26, 424,548, 896, 1030, 1036, 1742, or 1838, or relative to the reference sequence corresponding to SEQ ID NO: 4, 26,424,548, 896, 1030, 1036, 1742, or 1838.

[0150] In some embodiments, the amino acid sequence of the engineered RNA polymerase comprises at least a substitution or an amino acid residue 136E, 150K, 195H, 206V, 207V, 246Q, 250R, 3371, 340E, 347T, 352K, 3591, 399V, 419E, 425W, 456E, 531S, 550L, 574Y, 588M, 601V, 614Q, 616V, 640S, 645V, 648A, 649L, 694G, 720P, 779H, 782E, 793Q, 796N, 800M, 839F, 841S, 841D, 856F, 865R, 876N, or 884K, or combinations thereof, wherein the amino acid positions are relative to the reference sequence corresponding to residues 8 to 890 of SEQ ID NO: 4, 26, 424,548, 896, 1030, 1036, 1742, or 1838, or relative to the reference sequence corresponding to SEQ ID NO: 4, 26, 424,548, 896, 1030, 1036, 1742, or 1838.

[0151] In some embodiments, the engineered RNA polymerase comprises an amino acid sequence having at least 70%, 75%, 80%, 81%, 82%, 83%, 84%, 85%, 86%, 87%, 88%, 89%, 90%, 91%, 92%, 93%, 94%, 95%, 96%, 97%, 98%, 99%, or more sequence identity to the reference sequence corresponding to residues 8 to 890 of SEQ ID NO: 4, or to the reference sequence corresponding to SEQ ID NO: 4, wherein the amino acid sequence comprises one or more substitutions relative to the reference sequence corresponding to residues 8 to 890 of SEQ ID NO: 4, or relative to the reference sequence corresponding to SEQ ID NO: 4.

[0152] In some embodiments, the engineered RNA polymerase comprises an amino acid sequence having at least 70%, 75%, 80%, 81%, 82%, 83%, 84%, 85%, 86%, 87%, 88%, 89%, 90%, 91%, 92%, 93%, 94%, 95%, 96%, 97%, 98%, 99%, or more sequence identity to a reference sequence corresponding to residues 8 to 890 of an even-numbered SEQ ID NO. of SEQ ID NOs: 14-250, or to a reference sequence corresponding to an even-numbered SEQ ID NO. of SEQ ID NOs: 14-250, wherein the amino acid sequence comprises one or more substitutions relative to the reference sequence corresponding to residues 8 to 890 of SEQ ID NO: 4, or relative to the reference sequence corresponding to SEQ ID NO: 4.

[0153] In some embodiments, the amino acid sequence of the engineered RNA polymerase comprises at least a substitution or substitution set at amino acid positions(s) 839/841, 884/887, 694, 588, 541, 852, 645, 582, 657, 574, 456, 563, 865, 720, 528, 601, 690, 614, 550, 187, 57, 168,531, 347, 18, 527,197, 76/537, 171, 418, 579, 696, 77, 337, 11, 200,186, 64/296, 724, 198, 13, 529,419, 593, 164, 535, 464, 607, 59, 23, 747,169, 71, 160,195, 78, 612,537, 74, 167,192, 64, 648,193, 12, 254,182, 189, 511, 278, 45, 67, 25, 41, 183,202, 858, 76, 82, 82/178, 340, 179, 61, 505,784, 686, 477, 327, 184, 319, or 668, wherein the amino acid positions are relative to the reference sequence corresponding to residues 8 to 890 of SEQ ID NO: 4, or relative to the reference sequence corresponding to SEQ ID NO: 4.

[0154] In some embodiments, the amino acid sequence of the engineered RNA polymerase comprises at least a substitution or substitution set, or amino acid residue(s) 839F/841D, 884E/887Y, 694E, 588M, 541Q, 852L, 645V, 582A, 6571, 574P, 456E, 574Y, 563A, 865R, 720P, 528A, 601V, 456T, 690D, 694G, 614Q, 550L, 187N, 57A, 168T, 531S, 347T, 18V, 527R, 197V, 76T/537S, 171E, 418E, 579L, 696F, 77T, 337I, 11E, 197Q, 200L, 186C, 64D/296V, 197W, 200T, 724E, 198V, 13G, 186A, 529T, 419E, 198S, 593A, 164R, 535T, 527M, 464L, 607P, 59L, 23I, 747R, 169V, 71E, 160C, 195T, 78N, 612K, 588H, 537S, 74R, 167S, 192T, 64H, 648V, 1681, 193G, 12E, 254T, 78Q, 601M, 182F, 254M, 23T, 189Q, 511G, 278M, 195D, 77L, 45T, 171G, 67Q, 186G, 25V, 41A, 183A, 59H, 202V, 858K, 76E, 82L, 82L/1785, 167D, 186N, 340T, 189K, 179D, 720E, 61C, 61K, 505T, 607R, 784A, 686Q, 200E, 477E, 579G, 327L, 184T, 319D, or 668S, wherein the amino acid positions are relative to the reference sequence corresponding to residues 8 to 890 of SEQ ID NO: 4, or relative to the reference sequence corresponding to SEQ ID NO: 4.

[0155] In some embodiments, the amino acid sequence of the engineered RNA polymerase comprises at least a substitution or substitution set M839F/S841D, K884E/F887Y, V694E, V588M, L541Q, F852L, A645V, S582A, V657I, V574P, G456E, V574Y, G563A, L865R, K720P, V528A, L601V, G456T, N690D, V694G, E614Q, I550L, K187N, R57A, H168T, H531S, A347T, F18V, G527R, M197V, A76T/C537S, K171E, Y418E, R579L, V696F, A77T, V337I, I11E, M197Q, K200L, K186C, R64D/A296V, M197W, K200T, T724E, L198V, I13G, K186A, I529T, K419E, L198S, L593A, L164R, Y535T, G527M, F464L, K607P, R59L, L23I, K747R, F169V, V71E, R160C, A195T, K78N, I612K, V588H, C537S, N74R, K167S, V192T, R64H, S648V, H168I, V193G, N12E, A254T, K78Q, L601M, G182F, A254M, L23T, F189Q, E511G, C278M, A195D, A77L, A45T, K171G, K67Q, K186G, A25V, R41A, H183A, R59H, L202V, D858K, A76E, T82L, T82L/N178S, K167D, K186N, K340T, F189K, K179D, K720E, M61C, M61K, E505T, K607R, G784A, K686Q, K200E, V477E, R579G, V327L, V184T, S319D, or N668S, wherein the amino acid positions are relative to the reference sequence corresponding to residues 8 to 890 of SEQ ID NO: 4, or relative to the reference sequence corresponding to SEQ ID NO: 4.

[0156] In some embodiments, the engineered RNA polymerase comprises an amino acid sequence having at least 70%, 75%, 80%, 81%, 82%, 83%, 84%, 85%, 86%, 87%, 88%, 89%, 90%, 91%, 92%, 93%, 94%, 95%, 96%, 97%, 98%, 99%, or more sequence identity to the reference sequence corresponding to residues 8 to 890 of SEQ ID NO: 26, or to the reference sequence corresponding to SEQ ID NO: 26, wherein the amino acid sequence comprises one or more substitutions relative to the reference sequence corresponding to residues 8 to 890 of SEQ ID NO: 26, or relative to the reference sequence corresponding to SEQ ID NO: 26.

[0157] In some embodiments, the engineered RNA polymerase comprises an amino acid sequence having at least 70%, 75%, 80%, 81%, 82%, 83%, 84%, 85%, 86%, 87%, 88%, 89%, 90%, 91%, 92%, 93%, 94%, 95%, 96%, 97%, 98%, 99%, or more sequence identity to a reference sequence corresponding to residues 8 to 890 of an even-numbered SEQ ID NO. of SEQ ID NOs: 252-540, or to a reference sequence corresponding to an even-numbered SEQ ID NO. of SEQ ID NOs: 252-540, wherein the amino acid sequence comprises one or more substitutions relative to the reference sequence corresponding to residues 8 to 890 of SEQ ID NO: 26, or relative to the reference sequence corresponding to SEQ ID NO: 26.

[0158] In some embodiments, the amino acid sequence of the engineered RNA polymerase comprises at least a substitution or substitution set at amino acid positions(s) 622, 831, 598, 419, 198, 588, 21, 579/704, 190, 197, 57, 189,187, 195, 181, 191, 188, 164, 169, 184, 171, 186, 527, 177, 66, 78/565, 172, 161, 193, 593, 668, 18, 67,170, 286, 61, 60, 183,456, 179, 194, 468, 720, 534, 601, 56, 122, 84, 418, 34/526, 701, 530, 59, 260, 82, 413,605, 54, or 256, wherein the amino acid positions are relative to the reference sequence corresponding to residues 8 to 890 of SEQ ID NO: 26, or relative to the reference sequence corresponding to SEQ ID NO: 26.

[0159] In some embodiments, the amino acid sequence of the engineered RNA polymerase comprises at least a substitution or substitution set, or amino acid residue(s) 622E, 831R, 598E, 419N, 198S, 588A, 21L, 579Q/704D, 190S, 197V, 57V, 1891, 187A, 195E, 195T, 187V, 181P, 191P, 198V, 588R, 622T, 188G, 189L, 419E, 1641, 169V, 189V, 184S, 171G, 21E, 186Q, 527E, 184P, 57G, 177V, 66D, 78I/565V, 419M, 190A, 1721, 197W, 161V, 193L, 588N, 593A, 668A, 195H, 18C, 67R, 181R, 170R, 286V, 61E, 419V, 60V, 183C, 456Y, 179P, 194R, 468R, 1931, 720A, 534E, 601S, 56L, 191C, 195R, 122G, 60M, 84V, 418V, 181T, 34M/A526V, 701R, 530T, 171Y, 194C, 59H, 260Y, 82F, 413D, 605R, 561, 54Q, 59I, or 256L, wherein the amino acid positions are relative to the reference sequence corresponding to residues 8 to 890 of SEQ ID NO: 26, or relative to the reference sequence corresponding to SEQ ID NO: 26.

[0160] In some embodiments, the amino acid sequence of the engineered RNA polymerase comprises at least a substitution or substitution set V622E, L831R, S598E, K419N, L198S, V588A, I21L, R579Q/N704D, M190S, M197V, R57V, F189I, K187A, A195E, A195T, K187V, V181P, Q191P, L198V, V588R, V622T, A188G, F189L, K419E, L164I, F169V, F189V, V184S, K171G, I21E, K186Q, G527E, V184P, R57G, L177V, L66D, K78I/A565V, K419M, M190A, N172I, M197W, I161V, V193L, V588N, L593A, N668A, A195H, F18C, K67R, V181R, K170R, T286V, M61E, K419V, K60V, H183C, G456Y, K179P, E194R, K468R, V193I, K720A, S534E, L601S, A56L, Q191C, A195R, A122G, K60M, L84V, Y418V, V181T, H34M/A526V, E701R, N530T, K171Y, E194C, R59H, A260Y, T82F, N413D, T605R, A56I, G54Q, R59I, or E256L, wherein the amino acid positions are relative to the reference sequence corresponding to residues 8 to 890 of SEQ ID NO: 26, or relative to the reference sequence corresponding to SEQ ID NO: 26.

[0161] In some embodiments, the amino acid sequence of the engineered RNA polymerase comprises at least a substitution or substitution set at amino acid position(s) 337/456/574/601/614/694/720, 197/200/418/550/574/614/690/694, 197/200/337/347/456/550/563/720, 456/563/574/694/720, 171/197/200/456/574/694, 197/347/418/456/574/690, 200/418/456/531/574/614, 418/574, 11/77/200/574, 11/200/347/456/694/720, 11/200/456/574, 171/200/531/582/601/614/720, 456/531/574/690, 13/337/456/550, 11/200/337/456, 77/171/347/456, 13/337/527/550/563/574/601, 197/200/531/550/694, 77/197/200/456/550, 77/197/456/531/574/614/690, 77/200/347/574, 13/200/347/456/720, 13/77/531/574/720, 601/614/694, 13/418/456/694/720, 15/77/200/337/456/550/574/601/614/690/720, 13/550/690, 77/456/550, 77/337/347/550/574, 200/347/456/694, 197/337/347/456/531/574, 13/456/528, 200/337/456/690, 197/337/527/574/601, 197/456/579/614, 13/720, 197/200/418/574/694, 197/200/601, 197/347/418/574, 347/601/694, 550/690, 200/418/550, 200/347, 77/171/197, 77/531/574, 77/171/720, 197/527, 200, 197/200/418/601, 11/531/582, 13/197/200/418/694, 13/77/200/418/456, 77/456/582, 11/690, 11/200, 11/456/531/616, 77/574, 200/531/690, or 337/418/531/574/690, wherein the amino acid positions are relative to the reference sequence corresponding to residues 8 to 890 of SEQ ID NO: 26, or relative to the reference sequence corresponding to SEQ ID NO: 26.

[0162] In some embodiments, the amino acid sequence of the engineered RNA polymerase comprises at least a substitution or substitution set, or amino acid residue(s) 337I/456E/574Y/601V/614Q/694G/720P, 197V/200T/418E/550L/574P/614Q/690D/694G, 197V/200T/337I/347T/456E/550L/563A/720P, 456E/563A/574P/694G/720P, 171E/197V/200T/456T/574Y/694G, 197V/347T/418E/456E/574Y/690D, 200T/418E/456E/531S/574Y/614Q, 418E/574P, 11E/77T/200T/574P, 11E/200T/347T/456T/694G/720P, 11E/200T/456E/574Y, 171E/200T/531S/582A/601V/614Q/720P, 456E/531S/574P/690D, 13G/337I/456T/550L, 11E/200T/337I/456E, 77T/171E/347T/456T, 13G/337I/527R/550L/563A/574P/601V, 197V/200T/531S/550L/694G, 77T/197V/200T/456E/550L, 77T/197V/456T/531S/574Y/614Q/690D, 77T/200T/347T/574Y, 13G/200T/347T/456T/720P, 13G/77T/531S/574P/720P, 601V/614Q/694G, 13G/418E/456T/694G/720P, 15E/77T/200T/337I/456E/550L/574Y/601V/614Q/690D/720P, 13G/550L/690D, 77T/456T/550L, 77T/337I/347T/550L/574Y, 200T/347T/456E/694G, 197V/337I/347T/456T/531S/574Y, 13G/456E/528A, 200T/337I/456E/690D, 197V/337I/527R/574Y/601V, 197V/456E/579L/614Q, 13G/720P, 197V/200T/418E/574P/694G, 197V/200T/601V, 197V/347T/418E/574Y, 347T/601V/694G, 550L/690D, 200T/418E/550L, 200T/347T, 77T/171E/197V, 77T/531S/574P, 77T/171E/720P, 197V/527R, 200T, 197V/200T/418E/601V, 11E/531S/582A, 13G/197V/200T/418E/694G, 13G/77T/200N/418E/456T, 77T/456T/582A, 11E/690D, 11E/200T, 11E/456E/531S/616A, 77T/574Y, 200T/531S/690D, or 337I/418E/531S/574Y/690D, wherein the amino acid positions are relative to the reference sequence corresponding to residues 8 to 890 of SEQ ID NO: 26, or relative to the reference sequence corresponding to SEQ ID NO: 26.

[0163] In some embodiments, the amino acid sequence of the engineered RNA polymerase comprises at least a substitution or substitution set V337I/G456E/V574Y/L601V/E614Q/V694G/K720P, M197V/K200T/Y418E/I550L/V574P/E614Q/N690D/V694G, M197V/K200T/V337I/A347T/G456E/I550L/G563A/K720P, G456E/G563A/V574P/V694G/K720P, K171E/M197V/K200T/G456T/V574Y/V694G, M197V/A347T/Y418E/G456E/V574Y/N690D, K200T/Y418E/G456E/H531S/V574Y/E614Q, Y418E/V574P, I11 E/A77T/K200T/V574P, I11E/K200T/A347T/G456T/V694G/K720P, I11E/K200T/G456E/V574Y, K171E/K200T/H531S/S582A/L601V/E614Q/K720P, G456E/H531S/V574P/N690D, I13G/V337I/G456T/I550L, I11E/K200T/V337I/G456E, A77T/K171E/A347T/G456T, I13G/V337I/G527R/I550L/G563A/V574P/L601V, M197V/K200T/H531S/I550L/V694G, A77T/M197V/K200T/G456E/I550L, A77T/M197V/G456T/H531S/V574Y/E614Q/N690D, A77T/K200T/A347T/V574Y, I13G/K200T/A347T/G456T/K720P, I13G/A77T/H53IS/V574P/K720P, L601V/E614Q/V694G, I13G/Y418E/G456T/V694G/K720P, K15E/A77T/K200T/V337I/G456E/I550L/V574Y/L601V/E614Q/N690D/K720P, I13G/I550L/N690D, A77T/G456T/I550L, A77T/V337I/A347T/I550L/V574Y, K200T/A347T/G456E/V694G, M197V/V337I/A347T/G456T/H531S/V574Y, I13G/G456E/V528A, K200T/V337I/G456E/N690D, M197V/V337I/G527R/V574Y/L601V, M197V/G456E/R579L/E614Q, I13G/K720P, M197V/K200T/Y418E/V574P/V694G, M197V/K200T/L601V, M197V/A347T/Y418E/V574Y, A347T/L601V/V694G, I550L/N690D, K200T/Y418E/I550L, K200T/A347T, A77T/K171E/M197V, A77T/H531S/V574P, A77T/K171E/K720P, M197V/G527R, K200T, M197V/K200T/Y418E/L601V, I11E/H531S/S582A, I13G/M197V/K200T/Y418E/V694G, I13G/A77T/K200N/Y418E/G456T, A77T/G456T/S582A, I11E/N690D, I11E/K200T, I11E/G456E/H531S/T616A, A77T/V574Y, K200T/H531S/N690D, or V337I/Y418E/H531S/V574Y/N690D, wherein the amino acid positions are relative to the reference sequence corresponding to residues 8 to 890 of SEQ ID NO: 26, or relative to the reference sequence corresponding to SEQ ID NO: 26.

[0164] In some embodiments, the engineered RNA polymerase comprises an amino acid sequence having at least 70%, 75%, 80%, 81%, 82%, 83%, 84%, 85%, 86%, 87%, 88%, 89%, 90%, 91%, 92%, 93%, 94%, 95%, 96%, 97%, 98%, 99%, or more sequence identity to the reference sequence corresponding to residues 8 to 890 of SEQ ID NO: 424, or to the reference sequence corresponding to SEQ ID NO: 424, wherein the amino acid sequence comprises one or more substitutions relative to the reference sequence corresponding to residues 8 to 890 of SEQ ID NO: 424, or relative to the reference sequence corresponding to SEQ ID NO: 424.

[0165] In some embodiments, the engineered RNA polymerase comprises an amino acid sequence having at least 70%, 75%, 80%, 81%, 82%, 83%, 84%, 85%, 86%, 87%, 88%, 89%, 90%, 91%, 92%, 93%, 94%, 95%, 96%, 97%, 98%, 99%, or more sequence identity to the reference sequence corresponding to residues 8 to 890 of an even-numbered SEQ ID NO. of SEQ ID NOs: 542-862, or to the reference sequence corresponding to an even-numbered SEQ ID NO. of SEQ ID NOs: 542-862, wherein the amino acid sequence comprises one or more substitutions relative to the reference sequence corresponding to residues 8 to 890 of SEQ ID NO: 424, or relative to the reference sequence corresponding to SEQ ID NO: 424.

[0166] In some embodiments, the amino acid sequence of the engineered RNA polymerase comprises at least a substitution at amino acid positions(s) 541/622/723, 541/588/865, 839, 195/347/531/550/588, 419/723, 172/184/550/588, 184/195/347/418/550/588, 171/184/347/531/550, 171/184/347/418/531/550/588, 169/541/588/865, 841, 839/841, 171/347/418/550, 171/184/347/418/588, 195/563/588, 187/195/531/550/588, 347/550/588, 541/865, 347/531/563/588, 419/541/865, 187/347/418/531/550, 169/419, 187/347/531/588, 186/347/550/588, 563/588, 184/418/550/588, 723, 172/418/550/588, 171/186/418/550/588, 347/550/563, 622, 541/723, 419/541/839/841, 171/418/531/550, 171/531/588, 186/347/588, 531/550/563, 171/186/531/550, 187/550, 171/418/531/563/588, 195/550, 347/418/550/588, 171/187/588, 187/347/531/550, 184/531/550, 171/184/418/563/588, 195/588, 169/622/723, 187/588, 184/550/588, 169/189/622, 187/418/550, 588, 531/563/588, 418/563/588, 531/588, 172/184/531/550, 191/531/588, 347/418/550, 563, 172/197/347/588, 172/184/347/418/531/563, 171/195/347/418/588, 171/588, 171/187/550, 171/184/347/418/563, 347/531/588, 172/186/187/531/563/588, 550, 531/550, 172/588, 195/418/550, 195/347/418/531/563, 171/195/550, 181/418/563, 184/347/563/579, 200/347/418, 172/195/550, 197/347/418/563, 171/563, 531/563, 191/418/531/550, 172/195/531/588, 347/531/563, 169/181/198/723/865, 171/418/588, 184/418/588, 541, 418/550, 172/347/531/588, 172/187/550, 169/181/190/419, 723/841, 347/418/563, 186/197/200/550, 347/550, 172/200/588, 186/563, 172/186/347/531/588, 172/184/418/588, 171/347/418/563, 184/200, 172/347/418/588, 198/419/541, 171/187/418/563, 171/184/588, 184/347/588, 172/531/563, 184/195, 186/347, 418/531/550, 169/419/541, 184/197/418/531, 169/541, 169/197/198, 169/419, 184/418, 171/187/531, 171/184/347/531, 184, 197/347/531, 419, 197, 195/418, 171/347/531, 171/186/347/418/563, 184/347/418, 171/186/347/418, 186/347/418/531, 172/184/347/418, 184/195/347/418, 171/418/531, 419/622, 347/418/588, 171/531, 172/197/200/531, 347, 172/186/200/347/418/563, 184/200/418, 171/195/531, 184/197/347, 200/347, 171, 172, 171/347/418, 198/419, 347/531, 200, 531, 171/184, 169, or 189/418/419/541, wherein the amino acid positions are relative to the reference sequence corresponding to residues 8 to 890 of SEQ ID NO: 424, or relative to the reference sequence corresponding to SEQ ID NO: 424.

[0167] In some embodiments, the amino acid sequence of the engineered RNA polymerase comprises at least a substitution or substitution set, or amino acid residue(s) 541Q/622E/723G, 541Q/588M/865R, 839F, 195H/347T/531S/550L/588M, 419E/723G, 172I/184P/550L/588M, 184P/195H/347T/418E/550L/588R, 171G/184P/347T/531S/550L, 171G/184P/347T/418E/531S/550L/588M, 169V/541Q/588M/865R, 841D, 839F/841D, 171G/347T/418E/550L, 171G/184P/347T/418E/588M, 195H/563A/588A, 187V/195T/531S/550L/588A, 347T/550L/588M, 541Q/865R, 347T/531S/563A/588R, 419N/541Q/865R, 187A/347T/418E/531S/550L, 169V/419N, 187V/347T/531S/588M, 186Q/347T/550L/588R, 419N/723G, 563A/588M, 184P/418E/550L/588M, 723G, 172I/418E/550L/588M, 171G/186Q/418E/550L/588M, 347T/550L/563A, 622E, 541Q/723G, 419N/541Q/839F/841D, 171G/418E/531S/550L, 171G/531S/588A, 186Q/347T/588M, 531S/550L/563A, 171G/186Q/531S/550L, 563A/588R, 187V/550L, 171G/418E/531S/563A/588A, 195E/550L, 347T/418E/550L/588R, 171G/187V/588M, 187A/347T/531S/550L, 184P/531S/550L, 171G/184P/418E/563A/588R, 195E/588M, 169V/622E/723G, 187V/588M, 184P/550L/588R, 169V/189I/622E, 187A/418E/550L, 588M, 531S/563A/588R, 418E/563A/588M, 531S/588M, 172I/418E/550L/588R, 172I/184P/531S/550L, 531S/588A, 191P/531S/588M, 347T/418E/550L, 563A, 187V/418E/550L, 172I/197V/347T/588M, 172I/184P/347T/418E/531S/563A, 171G/195T/347T/418E/588A, 171G/588M, 171G/187A/550L, 171G/184P/347T/418E/563A, 588A, 347T/531S/588M, 172I/186Q/187A/531S/563A/588A, 550L, 531S/550L, 172I/588M, 195H/418E/550L, 195H/347T/418E/531S/563A, 171G/195E/550L, 181G/418E/563A, 184P/347T/563A/579C, 200T/347T/418E, 172I/195T/550L, 197V/347T/418E/563A, 171G/563A, 531S/563A, 191P/418E/531S/550L, 172I/195H/531S/588A, 347T/531S/563A, 169V/181P/198S/723G/865R, 171G/418E/588M, 184P/418E/588R, 541Q, 418E/550L, 172I/347T/531S/588R, 172I/187V/550L, 169V/181P/190I/419N, 723G/841D, 347T/418E/563A, 186Q/197V/200T/550L, 347T/550L, 172I/200T/588A, 186Q/563A, 172I/186Q/347T/531S/588R, 172I/184P/418E/588M, 171G/347T/418E/563A, 184P/200T, 172I/347T/418E/588R, 198S/419N/541Q, 171G/187V/418E/563A, 171G/184P/588R, 184P/347T/588R, 172I/531S/563A, 184P/195E, 186Q/347T, 531S/588R, 418E/531S/550L, 622T, 169V/419N/541Q, 184P/197V/418E/531S, 169V/541Q, 169V/197V/198S, 169V/419M, 184P/418E, 171G/187V/531S, 171G/184P/347T/531S, 588R, 184P, 197V/347T/531S, 419N, 197V, 195H/418E, 171G/347T/531S, 171G/186Q/347T/418E/563A, 184P/347T/418E, 171G/186Q/347T/418E, 186Q/347T/418E/531S, 1721/184P/347T/418E, 184P/195T/347T/418E, 171G/418E/531S, 419V/622T, 347T/418E/588M, 171G/531S, 172I/197V/200T/531S, 347T, 172I/186Q/200T/347T/418E/563A, 184P/200T/418E, 171G/195E/531S, 184P/197V/347T, 200T/347T, 171G, 172I, 171G/347T/418E, 198S/419N, 347T/53IS, 200T, 531S, 171G/184P, 169V, or 189L/418E/419N/541Q, wherein the amino acid positions are relative to the reference sequence corresponding to residues 8 to 890 of SEQ ID NO: 424, or relative to the reference sequence corresponding to SEQ ID NO: 424.

[0168] In some embodiments, the amino acid sequence of the engineered RNA polymerase comprises at least a substitution or substitution set L541Q/V622E/D723G, L541Q/V588M/L865R, M839F, A195H/A347T/H531S/I550L/V588M, K419E/D723G, N172I/V184P/I550L/V588M, V184P/A195H/A347T/Y418E/I550L/V588R, K171G/V184P/A347T/H53IS/I550L, K171G/V184P/A347T/Y418E/H531S/I550L/V588M, F169V/L541Q/V588M/L865R, S841D, M839F/S841D, K171G/A347T/Y418E/I550L, K171G/V184P/A347T/Y418E/V588M, A195H/G563A/V588A, K187V/A195T/H531S/I550L/V588A, A347T/I550L/V588M, L541Q/L865R, A347T/H531S/G563A/V588R, K419N/L541Q/L865R, K187A/A347T/Y418E/H531S/I550L, F169V/K419N, K187V/A347T/H531S/V588M, K186Q/A347T/I550L/V588R, K419N/D723G, G563A/V588M, V184P/Y418E/I550L/V588M, D723G, N172I/Y418E/I550L/V588M, K171G/K186Q/Y418E/I550L/V588M, A347T/I550L/G563A, V622E, L541Q/D723G, K419N/L541Q/M839F/S841D, K171G/Y418E/H531S/I550L, K171G/H531S/V588A, K186Q/A347T/V588M, H531S/I550L/G563A, K171G/K186Q/H531S/I550L, G563A/V588R, K187V/I550L, K171G/Y418E/H531S/G563A/V588A, A195E/I550L, A347T/Y418E/I550L/V588R, K171G/K187V/V588M, K187A/A347T/H531S/I550L, V184P/H531S/I550L, K171G/V184P/Y418E/G563A/V588R, A195E/V588M, F169V/V622E/D723G, K187V/V588M, V184P/I550L/V588R, F169V/F189I/V622E, K187A/Y418E/I550L, V588M, H531S/G563A/V588R, Y418E/G563A/V588M, H531S/V588M, N172I/Y418E/I550L/V588R, N172I/V184P/H531S/I550L, H531S/V588A, Q191P/H531S/V588M, A347T/Y418E/I550L, G563A, K187V/Y418E/I550L, N172I/M197V/A347T/V588M, N172I/V184P/A347T/Y418E/H531S/G563A, K171G/A195T/A347T/Y418E/V588A, K171G/V588M, K171G/K187A/I550L, K171G/V184P/A347T/Y418E/G563A, V588A, A347T/H531S/V588M, N172I/K186Q/K187A/H531S/G563A/V588A, I550L, H531S/I550L, N172I/V588M, A195H/Y418E/1550L, A195H/A347T/Y418E/H531S/G563A, K171G/A195E/1550L, V181G/Y418E/G563A, V184P/A347T/G563A/R579C, K200T/A347T/Y418E, N172I/A195T/I550L, M197V/A347T/Y418E/G563A, K171G/G563A, H531S/G563A, Q191P/Y418E/H531S/I550L, N172I/A195H/H531S/V588A, A347T/H531S/G563A, F169V/V181P/L198S/D723G/L865R, K171G/Y418E/V588M, V184P/Y418E/V588R, L541Q, Y418E/I550L, N172I/A347T/H531S/V588R, N172I/K187V/I550L, F169V/V181P/M190I/K419N, D723G/S841D, A347T/Y418E/G563A, K186Q/M197V/K200T/I550L, A347T/I550L, N172I/K200T/V588A, K186Q/G563A, N172I/K186Q/A347T/H531S/V588R, N172I/V184P/Y418E/V588M, K171G/A347T/Y418E/G563A, V184P/K200T, N172I/A347T/Y418E/V588R, L198S/K419N/L541Q, K171G/K187V/Y418E/G563A, K171G/V184P/V588R, V184P/A347T/V588R, N172I/H531S/G563A, V184P/A195E, K186Q/A347T, H531S/V588R, Y418E/H531S/I550L, V622T, F169V/K419N/L541Q, V184P/M197V/Y418E/H531S, F169V/L541Q, F169V/M197V/L198S, F169V/K419M, V184P/Y418E, K171G/K187V/H531S, K171G/V184P/A347T/H531S, V588R, V184P, M197V/A347T/H531S, K419N, M197V, A195H/Y418E, K171G/A347T/H531S, K171G/K186Q/A347T/Y418E/G563A, V184P/A347T/Y418E, K171G/K186Q/A347T/Y418E, K186Q/A347T/Y418E/H531S, N172I/V184P/A347T/Y418E, V184P/A195T/A347T/Y418E, K171G/Y418E/H531S, K419V/V622T, A347T/Y418E/V588M, K171G/H531S, N172I/M197V/K200T/H531S, A347T, N172I/K186Q/K200T/A347T/Y418E/G563A, V184P/K200T/Y418E, K171G/A195E/H531S, V184P/M197V/A347T, K200T/A347T, K171G, N172I, K171G/A347T/Y418E, L198S/K419N, A347T/H531S, K200T, H531S, K171G/V184P, F169V, or F189L/Y418E/K419N/L541Q, wherein the amino acid positions are relative to the reference sequence corresponding to residues 8 to 890 of SEQ ID NO: 424, or relative to the reference sequence corresponding to SEQ ID NO: 424.

[0169] In some embodiments, the engineered RNA polymerase comprises an amino acid sequence having at least 70%, 75%, 80%, 81%, 82%, 83%, 84%, 85%, 86%, 87%, 88%, 89%, 90%, 91%, 92%, 93%, 94%, 95%, 96%, 97%, 98%, 99%, or more sequence identity to the reference sequence corresponding to residues 8 to 890 of SEQ ID NO: 548, or to the reference sequence corresponding to SEQ ID NO: 548, wherein the amino acid sequence comprises one or more substitutions relative to the reference sequence corresponding to residues 8 to 890 of SEQ ID NO: 548, or relative to the reference sequence corresponding to SEQ ID NO: 548.

[0170] In some embodiments, the engineered RNA polymerase comprises an amino acid sequence having at least 70%, 75%, 80%, 81%, 82%, 83%, 84%, 85%, 86%, 87%, 88%, 89%, 90%, 91%, 92%, 93%, 94%, 95%, 96%, 97%, 98%, 99%, or more sequence identity to the reference sequence corresponding to residues 8 to 890 of an even-numbered SEQ ID NO. of SEQ ID NOs: 864-1004, or to the reference sequence corresponding to an even-numbered SEQ ID NO. of SEQ ID NOs: 864-1004, wherein the amino acid sequence comprises one or more substitutions relative to the reference sequence corresponding to residues 8 to 890 of SEQ ID NO: 548, or relative to the reference sequence corresponding to SEQ ID NO: 548.

[0171] In some embodiments, the amino acid sequence of the engineered RNA polymerase comprises at least a substitution at amino acid positions(s) 184/418/419/622/723/865, 419/723/839/841/865, 419/839, 477, 832, 418/419/839/841, 418/419/723/839, 184/419/723/839, 184/418/419/839, 418/839, 419/865, 622/723, 419/723, 418/419/723, 419/839/841/865, 622/839, 839, 171/839/841, 171/419/839/841, 419/839/865, 184/418/622/839/865, 419/622/839/841, 184/418/419/622/839/865, 184/419/622/723, 418/419/622, 180, 185, 184/419/622, 496, 184/622/865, 171/184/418/419/839/841, 171/184/418/419/622/839, 60, 419/622/839, 171/184/419/622/839/841, 418/723/841, 839/841, 483, 865, 418/723/841/865, 419, 307, 419/841/865, 169/418/419/839, 419/841, 420, 495, 416, 857, 499, 41, 30, 75, 26, 670, or 269, wherein the amino acid positions are relative to the reference sequence corresponding to residues 8 to 890 of SEQ ID NO: 548, or relative to the reference sequence corresponding to SEQ ID NO: 548.

[0172] In some embodiments, the amino acid sequence of the engineered RNA polymerase comprises at least a substitution or substitution set, or amino acid residue(s) 184P/418E/419E/622E/723G/865R, 419M/723G/839F/841D/865R, 419V/839F, 477G, 832R, 418E/419N/839F/841D, 418E/419M/723A/839F, 184P/419E/723G/839F, 419N/839F, 184P/418E/419V/839F, 418E/839F, 419M/865R, 622E/723G, 419N/723G, 418E/419E/723G, 419E/865R, 419E/839F/841D/865R, 622E/839F, 839F, 171G/839F/841D, 171G/419M/839F/841D, 419N/839F/865R, 184P/418E/622E/839F/865R, 419N/622E/839F/841D, 184P/418E/419N/622E/839F/865R, 419E/839F, 184P/419N/622E/723G, 418E/419E/622E, 180E, 185N, 184P/419M/622E, 496V, 184P/622E/865R, 185D, 171G/184P/418E/419N/839F/841D, 171G/184P/418E/419V/622E/839F, 60E, 419V/622E/839F, 171G/184P/419V/622E/839F/841D, 184P/419N/622E, 418E/723G/841D, 839F/841D, 483Q, 865K, 418E/723G/841D/865R, 419N, 307H, 419M/841D/865R, 419E, 185A, 169V/418E/419V/839F, 419E/841D, 420V, 495G, 180K, 416G, 857V, 499S, 180G, 41S, 30Y, 495A, 495R, 75R, 483G, 420H, 416S, 26Q, 670R, 180V, or 269V, wherein the amino acid positions are relative to the reference sequence corresponding to residues 8 to 890 of SEQ ID NO: 548, or relative to the reference sequence corresponding to SEQ ID NO: 548.

[0173] In some embodiments, the amino acid sequence of the engineered RNA polymerase comprises at least a substitution or substitution set V184P/Y418E/K419E/V622E/D723G/L865R, K419M/D723G/M839F/S841D/L865R, K419V/M839F, V477G, F832R, Y418E/K419N/M839F/S841D, Y418E/K419M/D723A/M839F, V184P/K419E/D723G/M839F, K419N/M839F, V184P/Y418E/K419V/M839F, Y418E/M839F, K419M/L865R, V622E/D723G, K419N/D723G, Y418E/K419E/D723G, K419E/L865R, K419E/M839F/S841D/L865R, V622E/M839F, M839F, K171G/M839F/S841D, K171G/K419M/M839F/S841D, K419N/M839F/L865R, V184P/Y418E/V622E/M839F/L865R, K419N/V622E/M839F/S841D, V184P/Y418E/K419N/V622E/M839F/L865R, K419E/M839F, V184P/K419N/V622E/D723G, Y418E/K419E/V622E, R180E, Y185N, V184P/K419M/V622E, I496V, V184P/V622E/L865R, Y185D, K171G/V184P/Y418E/K419N/M839F/S841D, K171G/V184P/Y418E/K419V/V622E/M839F, K60E, K419V/V622E/M839F, K171G/V184P/K419V/V622E/M839F/S841D, V184P/K419N/V622E, Y418E/D723G/S841D, M839F/S841D, P483Q, L865K, Y418E/D723G/S841D/L865R, K419N, R307H, K419M/S841D/L865R, K419E, Y185A, F169V/Y418E/K419V/M839F, K419E/S841D, A420V, N495G, R180K, A416G, A857V, C499S, R180G, R41S, T30Y, N495A, N495R, A75R, P483G, A420H, A416S, I26Q, K670R, R180V, or A269V, wherein the amino acid positions are relative to the reference sequence corresponding to residues 8 to 890 of SEQ ID NO: 548, or relative to the reference sequence corresponding to SEQ ID NO: 548.

[0174] In some embodiments, the engineered RNA polymerase comprises an amino acid sequence having at least 70%, 75%, 80%, 81%, 82%, 83%, 84%, 85%, 86%, 87%, 88%, 89%, 90%, 91%, 92%, 93%, 94%, 95%, 96%, 97%, 98%, 99%, or more sequence identity to the reference sequence corresponding to residues 8 to 890 of SEQ ID NO: 896, or to the reference sequence corresponding to SEQ ID NO: 896, wherein the amino acid sequence comprises one or more substitutions relative to the reference sequence corresponding to residues 8 to 890 of SEQ ID NO: 896, or relative to the reference sequence corresponding to SEQ ID NO: 896.

[0175] In some embodiments, the engineered RNA polymerase comprises an amino acid sequence having at least 70%, 75%, 80%, 81%, 82%, 83%, 84%, 85%, 86%, 87%, 88%, 89%, 90%, 91%, 92%, 93%, 94%, 95%, 96%, 97%, 98%, 99%, or more sequence identity to the reference sequence corresponding to residues 8 to 890 of an even-numbered SEQ ID NO. of SEQ ID NOs: 1006-1156, or to the reference sequence corresponding to an even-numbered SEQ ID NO. of SEQ ID NOs: 1006-1156, wherein the amino acid sequence comprises one or more substitutions relative to the reference sequence corresponding to residues 8 to 890 of SEQ ID NO: 896, or relative to the reference sequence corresponding to SEQ ID NO: 896.

[0176] In some embodiments, the amino acid sequence of the engineered RNA polymerase comprises at least a substitution at amino acid positions(s) 246/399/517/607/782/856/876, 517/640/670/720/779/782, 246/751/779/782, 404/607/856/876, 246/517/664/751/779, 640/664/779/782, 399/517/664/856/876, 246/379/399/517/751, 404/517/640/664/751/793/876, 517/640/670/720/751/779/782, 517/876, 135/340, 246/399/640/720/779/782/793/856/876, 340, 246/340, 664/720/779/782/793/856, 399/404/517/670/779/782/876, 379/517/640, 136/246/340, 404/751/779/782, 404/517/640/664/720/793, 379/517/640/779/782/793/856/876, 399/404/664/670/720/751/779/782, 640/793, 136/340/379, 15/246/535/607/664, 517/664/720, 517/607/856, 517/664/720/779, 135/416, 517/664/720/779/782/856, 135/136, 856, 135/136/340/375/379, 340/399, 399/664/720/751/793/810/856, 246/404/645/664/720/782/856/876, 379, 246/517/607, 246/664, 517, 7/135/136/340/379/416, 246/517/751/856, 517/670/720/751/779/782/856, 135/136/340, 640/664/751/856/876, 399/404/517/779/782, 640/779/782/856, 136/246, 399/404/517, 246/340/416, 517/664/751/856, 404/640/664, 246/517/751/779/782/856, 399/517/664/856, 404/517/664/720/782, 135/364, 517/607/640/664/720/779/782/856, 136/364/399/404, 136/340, 399/404/517/720/876, 404/416/517/640/645/720/751/779/782, 246/416, 136, 136/340/399, 416, 135/195/246/340/379, 246/340/364, 340/379/399, 399/404/416/517/607, 404/517/664/720, 517/640/751/756, or 517/607/640/645/664/720/751/779, wherein the amino acid positions are relative to the reference sequence corresponding to residues 8 to 890 of SEQ ID NO: 896, or relative to the reference sequence corresponding to SEQ ID NO: 896.

[0177] In some embodiments, the amino acid sequence of the engineered RNA polymerase comprises at least a substitution or substitution set, or amino acid residue(s) 246A/399M/517R/607Y/782V/856I/876K, 517R/640P/670N/720E/779R/782V, 246A/751R/779R/782V, 404L/607Y/856I/876K, 246A/517R/664K/751R/779R, 640P/664R/779R/782V, 399M/517R/664K/856I/876K, 246A/379S/399M/517R/751R, 404L/517R/640P/664K/751R/793L/876K, 517Y/640P/670N/720R/751R/779R/782V, 517R/876K, 135R/340E, 246A/399M/640P/720E/779R/782V/793L/856I/876K, 340E, 246A/340E, 664K/720R/779R/782V/793L/856I, 399M/404L/517R/670N/779R/782V/876K, 379S/517R/640P, 136E/246A/340L, 404L/751R/779R/782V, 404L/517R/640P/664K/720E/793L, 379S/517Y/640P/779R/782V/793L/856I/876K, 399M/404L/664K/670N/720E/751R/779R/782V, 340L, 640P/793L, 136E/340E/379S, 15N/246A/535C/607Y/664K, 517R/664K/720E, 517R/607Y/856I, 517R/664R/720Q/779R, 135R/416V, 517R/664W/720E/779R/782V/856I, 135R/136E, 856I, 135R/136E/340L/375Y/379S, 340L/399M, 399M/664K/720R/751R/793L/810R/856I, 246A/404L/645P/664W/720R/782V/856I/876K, 379S, 246A/517R/607Y, 246A/664R, 517R, 7N/135R/136E/340L/379S/416V, 246A/517Y/751R/856I, 517Y/670N/720E/751R/779R/782V/856I, 135R/136E/340E, 640P/664W/751R/856I/876K, 399M/404L/517Y/779R/782V, 640P/779R/782G/856I, 136E/246A, 399M/404L/517R, 246A/340E/416V, 136E/246A/340E, 517R/664K/751R/856I, 404L/640P/664W, 246A/517Y/751R/779R/782G/856I, 399M/517R/664K/856I, 517R/664R/720Q, 404L/517R/664K/720R/782V, 135R/364H, 517R/607Y/640P/664R/720E/779R/782G/856I, 136E/364H/399M/404L, 136E/340E, 399M/404L/517R/720Q/876K, 404L/416V/517Y/640P/645P/720Q/751R/779R/782V, 246A/416V, 136E, 136E/340L/399M, 416V, 135R/195N/246A/340L/379S, 246A/340L/364H, 340L/379S/399M, 399M/404L/416V/517R/607Y, 404L/517R/664R/720E, 517R/640P/751R/756Q, or 517R/607Y/640P/645P/664R/720Q/751R/779R, wherein the amino acid positions are relative to the reference sequence corresponding to residues 8 to 890 of SEQ ID NO: 896, or relative to the reference sequence corresponding to SEQ ID NO: 896.

[0178] In some embodiments, the amino acid sequence of the engineered RNA polymerase comprises at least a substitution or substitution set Q246A/V399M/C517R/K607Y/E782V/F856I/N876K, C517R/S640P/K670N/P720E/H779R/E782V, Q246A/Q751R/H779R/E782V, S404L/K607Y/F856I/N876K, Q246A/C517R/P664K/Q751R/H779R, S640P/P664R/H779R/E782V, V399M/C517R/P664K/F856I/N876K, Q246A/I379S/V399M/C517R/Q751R, S404L/C517R/S640P/P664K/Q751R/Q793L/N876K, C517Y/S640P/K670N/P720R/Q751R/H779R/E782V, C517R/N876K, S135R/K340E, Q246A/V399M/S640P/P720E/H779R/E782V/Q793L/F856I/N876K, K340E, Q246A/K340E, P664K/P720R/H779R/E782V/Q793L/F856I, V399M/S404L/C517R/K670N/H779R/E782V/N876K, I379S/C517R/S640P, A136E/Q246A/K340L, S404L/Q751R/H779R/E782V, S404L/C517R/S640P/P664K/P720E/Q793L, I379S/C517Y/S640P/H779R/E782V/Q793L/F856I/N876K, V399M/S404L/P664K/K670N/P720E/Q751R/H779R/E782V, K340L, S640P/Q793L, A136E/K340E/I379S, K15N/Q246A/Y535C/K607Y/P664K, C517R/P664K/P720E, C517R/K607Y/F856I, C517R/P664R/P720Q/H779R, S135R/A416V, C517R/P664W/P720E/H779R/E782V/F856I, S135R/A136E, F856I, S135R/A136E/K340L/D375Y/I379S, K340L/V399M, V399M/P664K/P720R/Q751R/Q793L/G810R/F856I, Q246A/S404L/V645P/P664W/P720R/E782V/F856I/N876K, I379S, Q246A/C517R/K607Y, Q246A/P664R, C517R, H7N/S135R/A136E/K340L/I379S/A416V, Q246A/C517Y/Q751R/F856I, C517Y/K670N/P720E/Q751R/H779R/E782V/F856I, S135R/A136E/K340E, S640P/P664W/Q751R/F856I/N876K, V399M/S404L/C517Y/H779R/E782V, S640P/H779R/E782G/F856I, A136E/Q246A, V399M/S404L/C517R, Q246A/K340E/A416V, A136E/Q246A/K340E, C517R/P664K/Q751R/F856I, S404L/S640P/P664W, Q246A/C517Y/Q751R/H779R/E782G/F856I, V399M/C517R/P664K/F856I, C517R/P664R/P720Q, S404L/C517R/P664K/P720R/E782V, S135R/R364H, C517R/K607Y/S640P/P664R/P720E/H779R/E782G/F856I, A136E/R364H/V399M/S404L, A136E/K340E, V399M/S404L/C517R/P720Q/N876K, S404L/A416V/C517Y/S640P/V645P/P720Q/Q751R/H779R/E782V, Q246A/A416V, A136E, A136E/K340L/V399M, A416V, S135R/H195N/Q246A/K340L/I379S, Q246A/K340L/R364H, K340L/I379S/V399M, V399M/S404L/A416V/C517R/K607Y, S404L/C517R/P664R/P720E, C517R/S640P/Q751R/L756Q, or C517R/K607Y/S640P/V645P/P664R/P720Q/Q751R/H779R, wherein the amino acid positions are relative to the reference sequence corresponding to residues 8 to 890 of SEQ ID NO: 896, or relative to the reference sequence corresponding to SEQ ID NO: 896.

[0179] In some embodiments, the engineered RNA polymerase comprises an amino acid sequence having at least 70%, 75%, 80%, 81%, 82%, 83%, 84%, 85%, 86%, 87%, 88%, 89%, 90%, 91%, 92%, 93%, 94%, 95%, 96%, 97%, 98%, 99%, or more sequence identity to the reference sequence corresponding to residues 8 to 890 of SEQ ID NO: 1030, or to the reference sequence corresponding to SEQ ID NO: 1030, wherein the amino acid sequence comprises one or more substitutions relative to the reference sequence corresponding to residues 8 to 890 of SEQ ID NO: 1030, or relative to the reference sequence corresponding to SEQ ID NO: 1030.

[0180] In some embodiments, the engineered RNA polymerase comprises an amino acid sequence having at least 70%, 75%, 80%, 81%, 82%, 83%, 84%, 85%, 86%, 87%, 88%, 89%, 90%, 91%, 92%, 93%, 94%, 95%, 96%, 97%, 98%, 99%, or more sequence identity to the reference sequence corresponding to residues 8 to 890 of an even-numbered SEQ ID NO. of SEQ ID NOs: 1158-1728, or to the reference sequence corresponding to an even-numbered SEQ ID NO. of SEQ ID NOs: 1158-1728, wherein the amino acid sequence comprises one or more substitutions relative to the reference sequence corresponding to residues 8 to 890 of SEQ ID NO: 1030, or relative to the reference sequence corresponding to SEQ ID NO: 1030.

[0181] In some embodiments, the amino acid sequence of the engineered RNA polymerase comprises at least a substitution or substitution set at amino acid positions(s) 60/135/185/420/483/499/832/857, 41/60/135/180/185/420/499/832, 135/136/185/416/420, 135/136/185/307/420/832/857, 135/136/180/185/307/477/832, 60/135/180/185/420/832, 60/135/136/180/185/832, 41/180/185/832/857, 185/307/416/832/857, 41/104/180/185/307/857, 41/135/136/180/185/420/477/832/857, 41/135/185/420/477/832, 41/135/180/185/416/477/832, 794, 41/60/136/185/416/420/477, 41/135/136/185/477/857, 185/477/832, 60/135/136/180/416/420/477/709/832, 135/136/180/185/416/420/832, 135/136/185/416/420/832, 41/135/136/185/307/420/483, 41/136/180/185/307/416/420/483/832/857, 41/185/420/483/832, 41/185/420/794, 185/416/420/832, 135/180/185/420/477/495/794/832, 135/136/185/416/420/794, 41/60/185/416, 41/136/180/307/416/420/832/857, 180/185/416/420/832, 41/180/185/420/477/496/857, 41/60/135/180/185/420/483/496, 41/180/185/307/416/420/832/857, 41/136/185/416/420/477/857, 135/136/180/185/416/832, 41/60/135/136/180/185/416/420/496/832/857, 41/135/136/185/477, 41/135/180/477, 41/180/185/416/420/832, 60/185/477/857, 41/832, 41/180/185/477/483/794/857, 41/136/416/420/483/832, 41/185/416/420/832, 41/136/180/185/420/477/857, 307/794, 60/135/136/185/420/857, 60/135/136/185/416, 180/307/420/832, 136/180/185/416, 41/60/180/185, 41/180/185/477/794, 41/185/794/857, 41/136, 41/60/185/857, 60/135/180/185/794, or 135/136/180/416/857, wherein the amino acid positions are relative to the reference sequence corresponding to residues 8 to 890 of SEQ ID NO: 1030, or relative to the reference sequence corresponding to SEQ ID NO: 1030.

[0182] In some embodiments, the amino acid sequence of the engineered RNA polymerase comprises at least a substitution or substitution set, or amino acid residue(s) 60E/135R/185A/420V/483Q/499S/832R/857V, 41S/60E/135R/180K/185A/420V/499S/832R, 135R/136E/185N/416G/420V, 135R/136E/185A/307H/420V/832R/857V, 135R/136E/180E/185A/307H/477G/832R, 60E/135R/180K/185A/420V/832R, 60E/135R/136E/180K/185A/832R, 41S/180E/185A/832R/857V, 185D/307H/416G/832R/857V, 41S/104S/180K/185A/307H/857V, 41S/135R/136E/180K/185A/420V/477G/832R/857V, 41S/135R/185A/420V/477G/832R, 41S/135R/180K/185A/416G/477G/832R, 794N, 41S/60E/136E/185A/416G/420V/477G, 41S/135R/136E/185D/477G/857V, 185N/477G/832R, 60E/135R/136E/180K/416G/420V/477G/709V/832R, 135R/136E/180K/185A/416G/420V/832R, 135R/136E/185N/416G/420V/832R, 41S/135R/136E/185D/307H/420V/483Q, 41S/136E/180K/185A/307H/416G/420V/483Q/832R/857V, 41S/185A/420V/483Q/832R, 41S/185D/420V/794N, 185N/416G/420V/832R, 135R/180G/185A/420V/477G/495G/794N/832R, 135R/136E/185A/416G/420V/794N, 41S/60E/185N/416G, 41S/136E/180G/307H/416G/420V/832R/857V, 180K/185D/416G/420V/832R, 41S/180E/185A/420V/477G/496V/857V, 41S/60E/135R/180E/185A/420V/483Q/496V, 41S/180K/185A/307H/416G/420V/832R/857V, 41S/136E/185A/416G/420V/477G/857V, 135R/136E/180K/185A/416G/832R, 41S/60E/135R/136E/180K/185A/416G/420V/496V/832R/857V, 41S/135R/136E/185A/477G, 41S/135R/180G/477G, 41S/180K/185A/416G/420V/832R, 60E/185A/477G/857V, 41S/832R, 41S/180E/185A/477G/483Q/794N/857V, 41S/136E/416G/420V/483Q/832R, 41S/185A/416G/420V/832R, 41S/136E/180E/185A/420V/477G/857V, 307H/794N, 60E/135R/136E/185A/420V/857V, 60E/135R/136E/185A/416G, 180K/307H/420V/832R, 136E/180E/185D/416G, 41S/60E/180E/185A, 41S/180K/185A/477G/794N, 41S/185N/794N/857V, 41S/136E, 41S/60E/185N/857V, 185A/416G/420V/832R, 60E/135R/180K/185A/794N, or 135R/136E/180K/416G/857V, wherein the amino acid positions are relative to the reference sequence corresponding to residues 8 to 890 of SEQ ID NO: 1030, or relative to the reference sequence corresponding to SEQ ID NO: 1030.

[0183] In some embodiments, the amino acid sequence of the engineered RNA polymerase comprises at least a substitution or substitution set K60E/S135R/Y185A/A420V/P483Q/C499S/F832R/A857V, R41S/K60E/S135R/R180K/Y185A/A420V/C499S/F832R, S135R/A136E/Y185N/A416G/A420V, S135R/A136E/Y185A/R307H/A420V/F832R/A857V, S135R/A136E/R180E/Y185A/R307H/V477G/F832R, K60E/S135R/R180K/Y185A/A420V/F832R, K60E/S135R/A136E/R180K/Y185A/F832R, R41S/R180E/Y185A/F832R/A857V, Y185D/R307H/A416G/F832R/A857V, R41S/G104S/R180K/Y185A/R307H/A857V, R41S/S135R/A136E/R180K/Y185A/A420V/V477G/F832R/A857V, R41S/S135R/Y185A/A420V/V477G/F832R, R41S/S135R/R180K/Y185A/A416G/V477G/F832R, D794N, R41S/K60E/A136E/Y185A/A416G/A420V/V477G, R41S/S135R/A136E/Y185D/V477G/A857V, Y185N/V477G/F832R, K60E/S135R/A136E/R180K/A416G/A420V/V477G/A709V/F832R, S135R/A136E/R180K/Y185A/A416G/A420V/F832R, S135R/A136E/Y185N/A416G/A420V/F832R, R41S/S135R/A136E/Y185D/R307H/A420V/P483Q, R41S/A136E/R180K/Y185A/R307H/A416G/A420V/P483Q/F832R/A857V, R41S/Y185A/A420V/P483Q/F832R, R41S/Y185D/A420V/D794N, Y185N/A416G/A420V/F832R, S135R/R180G/Y185A/A420V/V477G/N495G/D794N/F832R, S135R/A136E/Y185A/A416G/A420V/D794N, R41S/K60E/Y185N/A416G, R41S/A136E/R180G/R307H/A416G/A420V/F832R/A857V, R180K/Y185D/A416G/A420V/F832R, R41S/R180E/Y185A/A420V/V477G/I496V/A857V, R41S/K60E/S135R/R180E/Y185A/A420V/P483Q/I496V, R41S/R180K/Y185A/R307H/A416G/A420V/F832R/A857V, R41S/A136E/Y185A/A416G/A420V/V477G/A857V, S135R/A136E/R180K/Y185A/A416G/F832R, R41S/K60E/S135R/A136E/R180K/Y185A/A416G/A420V/I496V/F832R/A857V, R41S/S135R/A136E/Y185A/V477G, R41S/S135R/R180G/V477G, R41S/R180K/Y185A/A416G/A420V/F832R, K60E/Y185A/V477G/A857V, R41S/F832R, R41S/R180E/Y185A/V477G/P483Q/D794N/A857V, R41S/A136E/A416G/A420V/P483Q/F832R, R41S/Y185A/A416G/A420V/F832R, R41S/A136E/R180E/Y185A/A420V/V477G/A857V, R307H/D794N, K60E/S135R/A136E/Y185A/A420V/A857V, K60E/S135R/A136E/Y185A/A416G, R180K/R307H/A420V/F832R, A136E/R180E/Y185D/A416G, R41S/K60E/R180E/Y185A, R41S/R180K/Y185A/V477G/D794N, R41S/Y185N/D794N/A857V, R41S/A136E, R41S/K60E/Y185N/A857V, Y185A/A416G/A420V/F832R, K60E/S135R/R180K/Y185A/D794N, or S135R/A136E/R180K/A416G/A857V, wherein the amino acid positions are relative to the reference sequence corresponding to residues 8 to 890 of SEQ ID NO: 1030, or relative to the reference sequence corresponding to SEQ ID NO: 1030.

[0184] In some embodiments, the amino acid sequence of the engineered RNA polymerase comprises at least a substitution set at amino acid positions 132/246/399/640/720/779/782/793/856/876, 134/399/640/720/779/782/793/856/876, 134/246/640/720/779/782/793/856/876, 246/399/640/655/720/779/782/793/856/876, 246/387/399/640/720/779/782/793/856/876, 246/370/399/640/720/779/782/793/856/876, 246/357/399/640/720/779/782/793/856/876, 246/399/635/640/720/779/782/793/856/876, 246/327/399/640/720/779/782/793/856/876, 246/296/399/640/720/779/782/793/856/876, 246/399/640/720/779/782/793/856/876, 246/309/399/640/720/779/782/793/856/876, 246/399/640/720/723/779/782/793/856/876, 399/640/664/720/779/782/793/856/876, 246/378/399/640/720/779/782/793/856/876, 246/399/640/691/720/779/782/793/856/876, 133/246/379/399/640/720/779/782/793/856/876, 246/310/399/640/720/779/782/793/856/876, 246/399/462/640/720/779/782/793/856/876, 246/399/502/640/720/779/782/793/856/876, 246/399/629/640/720/779/782/793/856/876, 246/399/499/640/720/779/782/793/856/876, 246/399/582/640/720/779/782/793/856/876, 399/640/720/779/782/793/856/876, 246/399/418/640/720/779/782/793/856/876, 246/399/489/640/720/779/782/793/856/876, 246/389/399/640/720/779/782/793/856/876, 246/399/494/640/720/779/782/793/856/876, 246/394/399/640/720/779/782/793/856/876, 399/640/720/751/779/782/793/856/876, 246/399/498/640/720/779/782/793/856/876, 246/399/616/640/720/779/782/793/856/876, 246/399/403/640/720/779/782/793/856/876, 246/399/613/640/720/779/782/793/856/876, 246/352/399/640/720/779/782/793/856/876, 246/399/529/640/720/779/782/793/856/876, 223/246/399/640/720/779/782/793/856/876, 246/379/399/640/720/779/782/793/856/876, 246/399/573/640/720/779/782/793/856/876, 246/336/399/640/720/779/782/793/856/876, 246/399/484/640/720/779/782/793/856/876, 246/399/640/672/720/779/782/793/856/876, 246/386/399/640/720/779/782/793/856/876, 246/399/640/720/725/779/782/793/856/876, 399/416/640/720/779/782/793/856/876, 246/399/598/640/720/779/782/793/856/876, 246/399/530/640/720/779/782/793/856/876, 246/399/491/640/720/779/782/793/856/876, 246/365/399/640/720/779/782/793/856/876, 246/399/640/720/724/779/782/793/856/876, 246/399/461/640/720/779/782/793/856/876, 246/399/615/640/720/779/782/793/856/876, 246/362/399/640/720/779/782/793/856/876, 246/359/399/640/720/779/782/793/856/876, 246/399/633/640/720/779/782/793/856/876, 246/302/399/640/720/779/782/793/856/876, 246/324/399/640/720/779/782/793/856/876, 133/246/399/640/720/779/782/793/856/876, 246/299/399/640/720/779/782/793/856/876, 246/399/640/675/720/779/782/793/856/876, 246/399/416/640/720/779/782/793/856/876, 246/399/405/640/720/779/782/793/856/876, 246/399/593/640/720/779/782/793/856/876, 246/640/720/779/782/793/856/876, 246/399/564/640/720/779/782/793/856/876, 246/399/590/640/720/779/782/793/856/876, 246/399/517/640/720/779/782/793/856/876, 246/399/622/640/720/779/782/793/856/876, 364/399/640/720/779/782/793/856/876, 246/399/626/640/720/779/782/793/856/876, 246/376/399/640/720/779/782/793/856/876, 246/399/625/640/720/779/782/793/856/876, 246/379/399/416/640/720/779/782/793/856/876, 246/350/399/640/720/779/782/793/856/876, 246/399/599/640/720/779/782/793/856/876, 246/399/600/640/720/779/782/793/856/876, 246/399/640/659/720/779/782/793/856/876, 246/399/425/640/720/779/782/793/856/876, 246/399/640/668/720/779/782/793/856/876, 246/399/640/720/730/779/782/793/856/876, 246/399/591/640/720/779/782/793/856/876, 246/343/399/640/720/779/782/793/856/876, 246/367/399/640/720/779/782/793/856/876, 246/399/640/720/779/782/793/846/856/876, 246/399/561/640/720/779/782/793/856/876, 246/372/399/640/720/779/782/793/856/876, 246/399/640/690/720/779/782/793/856/876, 246/399/455/640/720/779/782/793/856/876, 246/399/537/640/720/779/782/793/856/876, 246/399/583/640/720/779/782/793/856/876, 246/369/399/640/720/779/782/793/856/876, 246/399/640/720/779/782/793/876, 246/399/437/640/720/779/782/793/856/876, 246/340/640/720/779/782/793/856/876, 246/399/623/640/720/779/782/793/856/876, 246/399/464/640/720/779/782/793/856/876, 246/382/399/640/720/779/782/793/856/876, 246/399/579/640/720/779/782/793/856/876, 246/399/618/640/720/779/782/793/856/876, 246/399/514/640/720/779/782/793/856/876, 246/399/607/640/720/779/782/793/856/876, 340/399/640/720/779/782/793/856/876, 246/399/640/676/720/779/782/793/856/876, 246/399/640/720/751/779/782/793/856/876, 246/399/640/664/720/779/782/793/856/876, 136/399/640/720/779/782/793/856/876, 246/399/517/640/720/779/782/793/856, 246/399/410/640/720/779/782/793/856/876, 246/313/399/640/720/779/782/793/856/876, 246/364/399/640/720/779/782/793/856/876, 135/246/399/640/720/779/782/793/856/876, or 246/399/608/640/720/779/782/793/856/876, wherein the amino acid positions are relative to the reference sequence corresponding to residues 8 to 890 of SEQ ID NO: 1030, or relative to the reference sequence corresponding to SEQ ID NO: 1030.

[0185] In some embodiments, the amino acid sequence of the engineered RNA polymerase comprises at least a substitution set or amino acid residues
[0186] 132L/246Q/399V/640S/720P/779H/782E/793Q/856F/876N,
[0187] 134H/399V/640S/720P/779H/782E/793Q/856F/876N,
[0188] 132I/246Q/399V/640S/720P/779H/782E/793Q/856F/876N,
[0189] 134H/246Q/640S/720P/779H/782E/793Q/856F/876N,
[0190] 246Q/399V/640S/655Q/720P/779H/782E/793Q/856F/876N,
[0191] 246Q/387A/399V/640S/720P/779H/782E/793Q/856F/876N,
[0192] 246Q/370K/399V/640S/720P/779H/782E/793Q/856F/876N,
[0193] 246Q/357R/399V/640S/720P/779H/782E/793Q/856F/876N,
[0194] 246Q/399V/635S/640S/720P/779H/782E/793Q/856F/876N,
[0195] 246Q/327I/399V/640S/720P/779H/782E/793Q/856F/876N,
[0196] 246Q/296N/399V/640S/720P/779H/782E/793Q/856F/876N,
[0197] 246Q/399V/640S/720R/779H/782E/793Q/856F/876N,
[0198] 246Q/309K/399V/640S/720P/779H/782E/793Q/856F/876N,
[0199] 246Q/399V/640S/720P/723G/779H/782E/793Q/856F/876N,
[0200] 399V/640S/664R/720P/779H/782E/793Q/856F/876N,
[0201] 246Q/378P/399V/640S/720P/779H/782E/793Q/856F/876N,
[0202] 246Q/399V/640S/691S/720P/779H/782E/793Q/856F/876N,
[0203] 133Q/246Q/379S/399V/640S/720P/779H/782E/793Q/856F/876N,
[0204] 246Q/310K/399V/640S/720P/779H/782E/793Q/856F/876N,
[0205] 246Q/399V/462E/640S/720P/779H/782E/793Q/856F/876N,
[0206] 246Q/399V/502S/640S/720P/779H/782E/793Q/856F/876N,
[0207] 246Q/399V/629A/640S/720P/779H/782E/793Q/856F/876N,
[0208] 246Q/399V/499S/640S/720P/779H/782E/793Q/856F/876N,
[0209] 246Q/399V/582A/640S/720P/779H/782E/793Q/856F/876N,
[0210] 399V/640S/720P/779H/782E/793Q/856F/876N,
[0211] 246Q/399V/418H/640S/720P/779H/782E/793Q/856F/876N,
[0212] 246Q/399V/489I/640S/720P/779H/782E/793Q/856F/876N,
[0213] 246Q/389A/399V/640S/720P/779H/782E/793Q/856F/876N,
[0214] 246Q/399V/494E/640S/720P/779H/782E/793Q/856F/876N,
[0215] 246Q/394R/399V/640S/720P/779H/782E/793Q/856F/876N,
[0216] 399V/640S/720P/751R/779H/782E/793Q/856F/876N,
[0217] 246Q/399V/498A/640S/720P/779H/782E/793Q/856F/876N,
[0218] 246Q/399V/616V/640S/720P/779H/782E/793Q/856F/876N,
[0219] 246Q/399V/403I/640S/720P/779H/782E/793Q/856F/876N,
[0220] 246Q/399V/613S/640S/720P/779H/782E/793Q/856F/876N,
[0221] 246Q/352K/399V/640S/720P/779H/782E/793Q/856F/876N,
[0222] 246Q/399V/529Q/640S/720P/779H/782E/793Q/856F/876N,
[0223] 223A/246Q/399V/640S/720P/779H/782E/793Q/856F/876N,
[0224] 246Q/379E/399V/640S/720P/779H/782E/793Q/856F/876N,
[0225] 246Q/399V/573T/640S/720P/779H/782E/793Q/856F/876N,
[0226] 246Q/336K/399V/640S/720P/779H/782E/793Q/856F/876N,
[0227] 246Q/399V/484E/640S/720P/779H/782E/793Q/856F/876N,
[0228] 246Q/399V/640S/672L/720P/779H/782E/793Q/856F/876N,
[0229] 246Q/386R/399V/640S/720P/779H/782E/793Q/856F/876N,
[0230] 246Q/379S/399V/640S/720P/779H/782E/793Q/856F/876N,
[0231] 246Q/399V/640S/720P/725I/779H/782E/793Q/856F/876N,
[0232] 399V/416V/640S/720P/779H/782E/793Q/856F/876N,
[0233] 246Q/399V/598D/640S/720P/779H/782E/793Q/856F/876N,
[0234] 246Q/399V/530H/640S/720P/779H/782E/793Q/856F/876N,
[0235] 246Q/399V/491E/640S/720P/779H/782E/793Q/856F/876N,
[0236] 246Q/365E/399V/640S/720P/779H/782E/793Q/856F/876N,
[0237] 246Q/399V/640S/720P/724E/779H/782E/793Q/856F/876N,
[0238] 246Q/399V/461K/640S/720P/779H/782E/793Q/856F/876N,
[0239] 246Q/399V/615K/640S/720P/779H/782E/793Q/856F/876N,
[0240] 246Q/362I/399V/640S/720P/779H/782E/793Q/856F/876N,
[0241] 246Q/359I/399V/640S/720P/779H/782E/793Q/856F/876N,
[0242] 246Q/399V/633T/640S/720P/779H/782E/793Q/856F/876N,
[0243] 246Q/302A/399V/640S/720P/779H/782E/793Q/856F/876N,
[0244] 246Q/324Y/399V/640S/720P/779H/782E/793Q/856F/876N,
[0245] 133Q/246Q/399V/640S/720P/779H/782E/793Q/856F/876N,
[0246] 246Q/299R/399V/640S/720P/779H/782E/793Q/856F/876N,
[0247] 246Q/399V/640S/675T/720P/779H/782E/793Q/856F/876N,
[0248] 246Q/399V/416V/640S/720P/779H/782E/793Q/856F/876N,
[0249] 246Q/399V/405L/640S/720P/779H/782E/793Q/856F/876N,
[0250] 246Q/399V/593A/640S/720P/779H/782E/793Q/856F/876N,
[0251] 246Q/640S/720P/779H/782E/793Q/856F/876N,
[0252] 246Q/399V/564R/640S/720P/779H/782E/793Q/856F/876N,
[0253] 246Q/399V/590Q/640S/720P/779H/782E/793Q/856F/876N,
[0254] 246Q/399V/517Q/640S/720P/779H/782E/793Q/856F/876N,
[0255] 246Q/399V/622A/640S/720P/779H/782E/793Q/856F/876N,
[0256] 364H/399V/640S/720P/779H/782E/793Q/856F/876N,
[0257] 246Q/399V/626Q/640S/720P/779H/782E/793Q/856F/876N,
[0258] 246Q/376M/399V/640S/720P/779H/782E/793Q/856F/876N,
[0259] 246Q/399V/625G/640S/720P/779H/782E/793Q/856F/876N,
[0260] 246Q/379S/399V/416V/640S/720P/779H/782E/793Q/856F/876N,
[0261] 246Q/350K/399V/640S/720P/779H/782E/793Q/856F/876N,
[0262] 246Q/399V/599N/640S/720P/779H/782E/793Q/856F/876N,
[0263] 246Q/399V/600E/640S/720P/779H/782E/793Q/856F/876N,
[0264] 246Q/399V/640S/659E/720P/779H/782E/793Q/856F/876N,
[0265] 246Q/399V/425Y/640S/720P/779H/782E/793Q/856F/876N,
[0266] 246Q/399V/640S/668Y/720P/779H/782E/793Q/856F/876N,
[0267] 246Q/399V/640S/720P/730Q/779H/782E/793Q/856F/876N,
[0268] 246Q/399V/591A/640S/720P/779H/782E/793Q/856F/876N,
[0269] 246Q/343A/399V/640S/720P/779H/782E/793Q/856F/876N,
[0270] 246Q/399V/640S/668W/720P/779H/782E/793Q/856F/876N,
[0271] 246Q/367L/399V/640S/720P/779H/782E/793Q/856F/876N,
[0272] 246Q/399V/640S/720P/779H/782E/793Q/846Y/856F/876N,
[0273] 246Q/399V/640S/720P/779H/782E/793Q/846V/856F/876N,
[0274] 246Q/399V/561V/640S/720P/779H/782E/793Q/856F/876N,
[0275] 246Q/372E/399V/640S/720P/779H/782E/793Q/856F/876N,
[0276] 246Q/399V/640S/690E/720P/779H/782E/793Q/856F/876N,
[0277] 246Q/399V/640S/720P/730L/779H/782E/793Q/856F/876N,
[0278] 246Q/399V/455K/640S/720P/779H/782E/793Q/856F/876N,
[0279] 246Q/399V/537V/640S/720P/779H/782E/793Q/856F/876N,
[0280] 246Q/399V/583K/640S/720P/779H/782E/793Q/856F/876N,
[0281] 246Q/399V/517R/640S/720R/779H/782E/793Q/856F/876N,
[0282] 246Q/369M/399V/640S/720P/779H/782E/793Q/856F/876N,
[0283] 246Q/399V/640S/720P/779H/782E/793Q/876N,
[0284] 246Q/399V/437S/640S/720P/779H/782E/793Q/856F/876N,
[0285] 246Q/340L/640S/720P/779H/782E/793Q/856F/876N,
[0286] 246Q/399V/623L/640S/720P/779H/782E/793Q/856F/876N,
[0287] 246Q/378K/399V/640S/720P/779H/782E/793Q/856F/876N,
[0288] 246Q/399V/464Y/640S/720P/779H/782E/793Q/856F/876N,
[0289] 246Q/382T/399V/640S/720P/779H/782E/793Q/856F/876N,
[0290] 246Q/399V/517R/640S/720P/779H/782E/793Q/856F/876N,
[0291] 246Q/399V/579G/640S/720P/779H/782E/793Q/856F/876N,
[0292] 246Q/399V/618L/640S/720P/779H/782E/793Q/856F/876N,
[0293] 246Q/399V/517G/640S/720P/779H/782E/793Q/856F/876N,
[0294] 246Q/399V/514L/640S/720P/779H/782E/793Q/856F/876N,
[0295] 246Q/399V/607E/640S/720P/779H/782E/793Q/856F/876N,
[0296] 340E/399V/640S/720P/779H/782E/793Q/856F/876N,
[0297] 246Q/399V/640S/676Q/720P/779H/782E/793Q/856F/876N,
[0298] 246Q/399V/640S/720P/751R/779H/782G/793Q/856F/876N,
[0299] 246Q/399V/640S/664R/720P/779H/782E/793Q/856F/876N,
[0300] 136E/399V/640S/720P/779H/782E/793Q/856F/876N,
[0301] 246Q/399V/517R/640S/720P/779H/782E/793Q/856F,
[0302] 246Q/399V/410E/640S/720P/779H/782E/793Q/856F/876N,
[0303] 246Q/313M/399V/640S/720P/779H/782E/793Q/856F/876N,
[0304] 246Q/364H/399V/640S/720P/779H/782E/793Q/856F/876N,
[0305] 135R/246Q/399V/640S/720P/779H/782E/793Q/856F/876N, or
[0306] 246Q/399V/608N/640S/720P/779H/782E/793Q/856F/876N, wherein the amino acid positions are relative to the reference sequence corresponding to residues 8 to 890 of SEQ ID NO: 1030, or relative to the reference sequence corresponding to SEQ ID NO: 1030.

[0307] In some embodiments, the amino acid sequence of the engineered RNA polymerase comprises at least a substitution set C132L/A246Q/M399V/P640S/E720P/R779H/V782E/L793Q/I856F/K876N, T134H/M399V/P640S/E720P/R779H/V782E/L793Q/I856F/K876N, C132I/A246Q/M399V/P640S/E720P/R779H/V782E/L793Q/I856F/K876N, T134H/A246Q/P640S/E720P/R779H/V782E/L793Q/I856F/K876N, A246Q/M399V/P640S/D655Q/E720P/R779H/V782E/L793Q/I856F/K876N, A246Q/E387A/M399V/P640S/E720P/R779H/V782E/L793Q/I856F/K876N, A246Q/R370K/M399V/P640S/E720P/R779H/V782E/L793Q/I856F/K876N, A246Q/A357R/M399V/P640S/E720P/R779H/V782E/L793Q/I856F/K876N, A246Q/M399V/G635S/P640S/E720P/R779H/V782E/L793Q/I856F/K876N, A246Q/V327I/M399V/P640S/E720P/R779H/V782E/L793Q/I856F/K876N, A246Q/A296N/M399V/P640S/E720P/R779H/V782E/L793Q/I856F/K876N, A246Q/M399V/P640S/E720R/R779H/V782E/L793Q/I856F/K876N, A246Q/L309K/M399V/P640S/E720P/R779H/V782E/L793Q/I856F/K876N, A246Q/M399V/P640S/E720P/D723G/R779H/V782E/L793Q/I856F/K876N, M399V/P640S/P664R/E720P/R779H/V782E/L793Q/I856F/K876N, A246Q/E378P/M399V/P640S/E720P/R779H/V782E/L793Q/I856F/K876N, A246Q/M399V/P640S/A691S/E720P/R779H/V782E/L793Q/I856F/K876N, L133Q/A246Q/I379S/M399V/P640S/E720P/R779H/V782E/L793Q/I856F/K876N, A246Q/A310K/M399V/P640S/E720P/R779H/V782E/L793Q/I856F/K876N, A246Q/M399V/D462E/P640S/E720P/R779H/V782E/L793Q/I856F/K876N, A246Q/M399V/A502S/P640S/E720P/R779H/V782E/L793Q/I856F/K876N, A246Q/M399V/E629A/P640S/E720P/R779H/V782E/L793Q/I856F/K876N, A246Q/M399V/C499S/P640S/E720P/R779H/V782E/L793Q/I856F/K876N, A246Q/M399V/S582A/P640S/E720P/R779H/V782E/L793Q/I856F/K876N, M399V/P640S/E720P/R779H/V782E/L793Q/I856F/K876N, A246Q/M399V/Y418H/P640S/E720P/R779H/V782E/L793Q/I856F/K876N, A246Q/M399V/V489I/P640S/E720P/R779H/V782E/L793Q/I856F/K876N, A246Q/S389A/M399V/P640S/E720P/R779H/V782E/L793Q/I856F/K876N, A246Q/M399V/T494E/P640S/E720P/R779H/V782E/L793Q/I856F/K876N, A246Q/K394R/M399V/P640S/E720P/R779H/V782E/L793Q/I856F/K876N, M399V/P640S/E720P/Q751R/R779H/V782E/L793Q/I856F/K876N, A246Q/M399V/E498A/P640S/E720P/R779H/V782E/L793Q/I856F/K876N, A246Q/M399V/T616V/P640S/E720P/R779H/V782E/L793Q/I856F/K876N, A246Q/M399V/L403I/P640S/E720P/R779H/V782E/L793Q/I856F/K876N, A246Q/M399V/T613S/P640S/E720P/R779H/V782E/L793Q/I856F/K876N, A246Q/Q352K/M399V/P640S/E720P/R779H/V782E/L793Q/I856F/K876N, A246Q/M399V/I529Q/P640S/E720P/R779H/V782E/L793Q/I856F/K876N, C223A/A246Q/M399V/P640S/E720P/R779H/V782E/L793Q/I856F/K876N, A246Q/I379E/M399V/P640S/E720P/R779H/V782E/L793Q/I856F/K876N, A246Q/M399V/E573T/P640S/E720P/R779H/V782E/L793Q/I856F/K876N, A246Q/R336K/M399V/P640S/E720P/R779H/V782E/L793Q/I856F/K876N, A246Q/M399V/Q484E/P640S/E720P/R779H/V782E/L793Q/I856F/K876N, A246Q/M399V/P640S/D672L/E720P/R779H/V782E/L793Q/I856F/K876N, A246Q/K386R/M399V/P640S/E720P/R779H/V782E/L793Q/I856F/K876N, A246Q/I379S/M399V/P640S/E720P/R779H/V782E/L793Q/I856F/K876N, A246Q/M399V/P640S/E720P/V725I/R779H/V782E/L793Q/I856F/K876N, M399V/A416V/P640S/E720P/R779H/V782E/L793Q/I856F/K876N, A246Q/M399V/S598D/P640S/E720P/R779H/V782E/L793Q/I856F/K876N, A246Q/M399V/N530H/P640S/E720P/R779H/V782E/L793Q/I856F/K876N, A246Q/M399V/D491E/P640S/E720P/R779H/V782E/L793Q/I856F/K876N, A246Q/G365E/M399V/P640S/E720P/R779H/V782E/L793Q/I856F/K876N, A246Q/M399V/P640S/E720P/T724E/R779H/V782E/L793Q/I856F/K876N, A246Q/M399V/E461K/P640S/E720P/R779H/V782E/L793Q/I856F/K876N, A246Q/M399V/R615K/P640S/E720P/R779H/V782E/L793Q/I856F/K876N, A246Q/M362I/M399V/P640S/E720P/R779H/V782E/L793Q/I856F/K876N, A246Q/V359I/M399V/P640S/E720P/R779H/V782E/L793Q/I856F/K876N, A246Q/M399V/N633T/P640S/E720P/R779H/V782E/L793Q/I856F/K876N, A246Q/Q302A/M399V/P640S/E720P/R779H/V782E/L793Q/I856F/K876N, A246Q/I324Y/M399V/P640S/E720P/R779H/V782E/L793Q/I856F/K876N, L133Q/A246Q/M399V/P640S/E720P/R779H/V782E/L793Q/I856F/K876N, A246Q/K299R/M399V/P640S/E720P/R779H/V782E/L793Q/I856F/K876N, A246Q/M399V/P640S/L675T/E720P/R779H/V782E/L793Q/I856F/K876N, A246Q/M399V/A416V/P640S/E720P/R779H/V782E/L793Q/I856F/K876N, A246Q/M399V/M405L/P640S/E720P/R779H/V782E/L793Q/I856F/K876N, A246Q/M399V/L593A/P640S/E720P/R779H/V782E/L793Q/I856F/K876N, A246Q/P640S/E720P/R779H/V782E/L793Q/I856F/K876N, A246Q/M399V/K564R/P640S/E720P/R779H/V782E/L793Q/I856F/K876N, A246Q/M399V/K590Q/P640S/E720P/R779H/V782E/L793Q/I856F/K876N, A246Q/M399V/C517Q/P640S/E720P/R779H/V782E/L793Q/I856F/K876N, A246Q/M399V/V622A/P640S/E720P/R779H/V782E/L793Q/I856F/K876N, R364H/M399V/P640S/E720P/R779H/V782E/L793Q/I856F/K876N, A246Q/M399V/W626Q/P640S/E720P/R779H/V782E/L793Q/I856F/K876N, A246Q/T376M/M399V/P640S/E720P/R779H/V782E/L793Q/I856F/K876N, A246Q/M399V/Q625G/P640S/E720P/R779H/V782E/L793Q/I856F/K876N, A246Q/I379S/M399V/A416V/P640S/E720P/R779H/V782E/L793Q/I856F/K876N, A246Q/Q350K/M399V/P640S/E720P/R779H/V782E/L793Q/I856F/K876N, A246Q/M399V/T599N/P640S/E720P/R779H/V782E/L793Q/I856F/K876N, A246Q/M399V/T600E/P640S/E720P/R779H/V782E/L793Q/I856F/K876N, A246Q/M399V/P640S/S659E/E720P/R779H/V782E/L793Q/I856F/K876N, A246Q/M399V/Q425Y/P640S/E720P/R779H/V782E/L793Q/I856F/K876N, A246Q/M399V/P640S/N668Y/E720P/R779H/V782E/L793Q/I856F/K876N, A246Q/M399V/P640S/E720P/C730Q/R779H/V782E/L793Q/I856F/K876N, A246Q/M399V/Q591A/P640S/E720P/R779H/V782E/L793Q/I856F/K876N, A246Q/D343A/M399V/P640S/E720P/R779H/V782E/L793Q/I856F/K876N, A246Q/M399V/P640S/N668W/E720P/R779H/V782E/L793Q/I856F/K876N, A246Q/M367L/M399V/P640S/E720P/R779H/V782E/L793Q/I856F/K876N, A246Q/M399V/P640S/E720P/R779H/V782E/L793Q/C846Y/I856F/K876N, A246Q/M399V/P640S/E720P/R779H/V782E/L793Q/C846V/I856F/K876N, A246Q/M399V/I561V/P640S/E720P/R779H/V782E/L793Q/I856F/K876N, A246Q/L372E/M399V/P640S/E720P/R779H/V782E/L793Q/I856F/K876N, A246Q/M399V/P640S/N690E/E720P/R779H/V782E/L793Q/I856F/K876N, A246Q/M399V/P640S/E720P/C730L/R779H/V782E/L793Q/I856F/K876N, A246Q/M399V/Q455K/P640S/E720P/R779H/V782E/L793Q/I856F/K876N, A246Q/M399V/C537V/P640S/E720P/R779H/V782E/L793Q/I856F/K876N, A246Q/M399V/D583K/P640S/E720P/R779H/V782E/L793Q/I856F/K876N, A246Q/M399V/C517R/P640S/E720R/R779H/V782E/L793Q/I856F/K876N, A246Q/A369M/M399V/P640S/E720P/R779H/V782E/L793Q/I856F/K876N, A246Q/M399V/P640S/E720P/R779H/V782E/L793Q/K876N, A246Q/M399V/P437S/P640S/E720P/R779H/V782E/L793Q/I856F/K876N, A246Q/K340L/P640S/E720P/R779H/V782E/L793Q/I856F/K876N, A246Q/M399V/M623L/P640S/E720P/R779H/V782E/L793Q/I856F/K876N, A246Q/E378K/M399V/P640S/E720P/R779H/V782E/L793Q/I856F/K876N, A246Q/M399V/F464Y/P640S/E720P/R779H/V782E/L793Q/I856F/K876N, A246Q/K382T/M399V/P640S/E720P/R779H/V782E/L793Q/I856F/K876N, A246Q/M399V/C517R/P640S/E720P/R779H/V782E/L793Q/I856F/K876N, A246Q/M399V/R579G/P640S/E720P/R779H/V782E/L793Q/I856F/K876N, A246Q/M399V/Y618L/P640S/E720P/R779H/V782E/L793Q/I856F/K876N, A246Q/M399V/C517G/P640S/E720P/R779H/V782E/L793Q/I856F/K876N, A246Q/M399V/S514L/P640S/E720P/R779H/V782E/L793Q/I856F/K876N, A246Q/M399V/K607E/P640S/E720P/R779H/V782E/L793Q/I856F/K876N, K340E/M399V/P640S/E720P/R779H/V782E/L793Q/I856F/K876N, A246Q/M399V/P640S/N676Q/E720P/R779H/V782E/L793Q/I856F/K876N, A246Q/M399V/P640S/E720P/Q751R/R779H/V782G/L793Q/I856F/K876N, A246Q/M399V/P640S/P664R/E720P/R779H/V782E/L793Q/I856F/K876N, A136E/M399V/P640S/E720P/R779H/V782E/L793Q/I856F/K876N, A246Q/M399V/C517R/P640S/E720P/R779H/V782E/L793Q/I856F, A246Q/M399V/S410E/P640S/E720P/R779H/V782E/L793Q/I856F/K876N, A246Q/R313M/M399V/P640S/E720P/R779H/V782E/L793Q/I856F/K876N, A246Q/R364H/M399V/P640S/E720P/R779H/V782E/L793Q/I856F/K876N, S135R/A246Q/M399V/P640S/E720P/R779H/V782E/L793Q/I856F/K876N, or A246Q/M399V/K608N/P640S/E720P/R779H/V782E/L793Q/I856F/K876N, wherein the amino acid positions are relative to the reference sequence corresponding to residues 8 to 890 of SEQ ID NO: 1030, or relative to the reference sequence corresponding to SEQ ID NO: 1030.

[0308] In some embodiments, the amino acid sequence of the engineered RNA polymerase comprises at least a substitution or substitution set at amino acid positions(s) 664, 352/357/359/378/633/672, 352/633, 357/370/387/394/625/725, 352/387/629, 357, 310/357/359/387/389/489/561/625, 310/357, 310/352/357/359/725, 352/357/362/561/725, 357/359/370, 352/378/403/561, 378/579/625/633/636, 357/359/378/394/403/725, 387/389/489/579/625, 352/378, 357/378/394, 357/625, 352/362/387/561, 310/357/359/387/672/725, 658, 310/352/359/561/579/625/691/725, 310/357/403, 310/352/403/579/629, 310/352/378/489/579/629/633, 625, 310/352/378/394/403/691/725, 310/357/359/403, 310/352/359/403/579/625, 310/352/370/579/625, 312, 310/352/625, 310/352/625/725, 310/357/394, 310/352, 725, 352/359, 308, 310/387/672, 310/359/370/625, 378/561, 370, 359/725, 237, 378, 352, 310, 370/691/770, 310/357/359/489/672, 357/359/579/691, 310/352/579, 352/370/625, 625/672, 310/357/359/394/489/561/625/725, 625/725, 310/625, 657, 352/359/394/579/672, 311, 359/370/579, 649, 489, 561, 370/378/489/691/725, 394/489/579/625, 98,132,310/561/579/672, 309, 403/629, 315, 662, 650, 108, 359/625, 665, 310/394/489/579/633/691, 362/394/561/625, 310/378/691, 653, 307, 310/352/370/394/625/725, 663, 310/370/625, 352/394, 352/362/672, 101, 561/579/629/672/725, 352/625, 135, 668, 145, or 126, wherein the amino acid positions are relative to the reference sequence corresponding to residues 8 to 890 of SEQ ID NO: 1030, or relative to the reference sequence corresponding to SEQ ID NO: 1030.

[0309] In some embodiments, the amino acid sequence of the engineered RNA polymerase comprises at least a substitution or substitution set, or amino acid residue(s) 664R, 352K/357R/359I/378P/633T/672L, 352K/633T, 357R/370K/387A/394R/625G/725I, 352K/387A/629A, 357R, 310K/357R/359I/387A/389A/489I/561V/625G, 310K/357R, 310K/352K/357R/359I/725I, 352K/357R/362I/561V/725I, 357R/359I/370K, 352K/378P/403I/561V, 378P/579G/625G/633T/636A, 357R/359I/378P/394R/403I/725I, 387A/389A/489I/579G/625G, 352K/378P, 357R/378P/394R, 357R/625G, 352K/362I/387A/561V, 310K/357R/359I/387A/672L/725I, 658V, 310K/352K/359I/561V/579G/625G/691S/725I, 310K/357R/403I, 310K/352K/403I/579G/629A, 310K/352K/378P/489I/579G/629A/633T, 625G, 310K/352K/378P/394R/403I/691S/725I, 310K/357R/359I/403I, 310K/352K/359I/403I/579G/625G, 310K/352K/370K/579G/625G, 312T, 310K/352K/625G, 310K/352K/625G/725I, 310K/357R/394R, 310K/352K, 7251, 352K/3591, 658K, 312P, 308G, 310K/387A/672L, 310K/359I/370K/625G, 378P/561V, 370K, 3591/7251, 312V, 237R, 378P, 352K, 310H, 370K/691S/770I, 310K/357R/359I/489I/672L, 357R/359I/579G/691S, 308P, 310K/352K/579G, 352K/370K/625G, 312G, 625G/672L, 310K/357R/359I/394R/489I/561V/625G/725I, 625G/725I, 310K/625G, 657L, 352K/359I/394R/579G/672L, 311M, 359I/370K/579G, 649L, 489I, 561V, 370K/378P/489I/691S/725I, 394R/489I/579G/625G, 98G, 132W, 310K/561V/579G/672L, 312Q, 237S, 312R, 309S, 403I/629A, 315T, 662V, 650A, 108R, 359I/625G, 310F, 665G, 310K/394R/489I/579G/633T/691S, 362I/394R/561V/625G, 312S, 310K/378P/691S, 653W, 307G, 310K/352K/370K/394R/625G/725I, 309K, 663L, 310K/370K/625G, 352K/394R, 308V, 352K/362I/672L, 101R, 308W, 561V/579G/629A/672L/7251, 311F, 352K/625G, 658R, 135G, 668R, 311G, 108K, 145G, 309R, 126M, 98A, 237L, or 310L, wherein the amino acid positions are relative to the reference sequence corresponding to residues 8 to 890 of SEQ ID NO: 1030, or relative to the reference sequence corresponding to SEQ ID NO: 1030.

[0310] In some embodiments, the amino acid sequence of the engineered RNA polymerase comprises at least a substitution or substitution set P664R, Q352K/A357R/V359I/E378P/N633T/D672L, Q352K/N633T, A357R/R370K/E387A/K394R/Q625G/V725I, Q352K/E387A/E629A, A357R, A310K/A357R/V359I/E387A/S389A/V489I/I561V/Q625G, A310K/A357R, A310K/Q352K/A357R/V359I/V725I, Q352K/A357R/M362I/I561V/V725I, A357R/V359I/R370K, Q352K/E378P/L403I/I561V, E378P/R579G/Q625G/N633T/V636A, A357R/V359I/E378P/K394R/L403I/V725I, E387A/S389A/V489I/R579G/Q625G, Q352K/E378P, A357R/E378P/K394R, A357R/Q625G, Q352K/M362I/E387A/I561V, A310K/A357R/V359I/E387A/D672L/V725I, L658V, A310K/Q352K/V359I/I561V/R579G/Q625G/A691S/V725I, A310K/A357R/L403I, A310K/Q352K/L403I/R579G/E629A, A310K/Q352K/E378P/V489I/R579G/E629A/N633T, Q625G, A310K/Q352K/E378P/K394R/L403I/A691S/V725I, A310K/A357R/V359I/L403I, A310K/Q352K/V359I/L403I/R579G/Q625G, A310K/Q352K/R370K/R579G/Q625G, L312T, A310K/Q352K/Q625G, A310K/Q352K/Q625G/V725I, A310K/A357R/K394R, A310K/Q352K, V725I, Q352K/V359I, L658K, L312P, S308G, A310K/E387A/D672L, A310K/V359I/R370K/Q625G, E378P/I561V, R370K, V359I/V725I, L312V, H237R, E378P, Q352K, A310H, R370K/A691S/T770I, A310K/A357R/V359I/V489I/D672L, A357R/V359I/R579G/A691S, S308P, A310K/Q352K/R579G, Q352K/R370K/Q625G, L312G, Q625G/D672L, A310K/A357R/V359I/K394R/V489I/I561V/Q625G/V725I, Q625G/V725I, A310K/Q625G, V657L, Q352K/V359I/K394R/R579G/D672L, A311M, V359I/R370K/R579G, K649L, V4891, 1561V, R370K/E378P/V489I/A691S/V725I, K394R/V489I/R579G/Q625G, E98G, C132W, A310K/I561V/R579G/D672L, L312Q, H237S, L312R, L309S, L403I/E629A, Y315T, I662V, E650A, T108R, V359I/Q625G, A310F, A665G, A310K/K394R/V489I/R579G/N633T/A691S, M362I/K394R/I561V/Q625G, L312S, A310K/E378P/A691S, F653W, R307G, A310K/Q352K/R370K/K394R/Q625G/V725I, L309K, Q663L, A310K/R370K/Q625G, Q352K/K394R, S308V, Q352K/M362I/D672L, A101R, S308W, I561V/R579G/E629A/D672L/V725I, A311 F, Q352K/Q625G, L658R, S135G, N668R, A311G, T108K, A145G, L309R, I126M, E98A, H237L, or A310L, wherein the amino acid positions are relative to the reference sequence corresponding to residues 8 to 890 of SEQ ID NO: 1030, or relative to the reference sequence corresponding to SEQ ID NO: 1030.

[0311] In some embodiments, the engineered RNA polymerase comprises an amino acid sequence having at least 70%, 75%, 80%, 81%, 82%, 83%, 84%, 85%, 86%, 87%, 88%, 89%, 90%, 91%, 92%, 93%, 94%, 95%, 96%, 97%, 98%, 99%, or more sequence identity to the reference sequence corresponding to residues 8 to 890 of SEQ ID NO: 1036, or to the reference sequence corresponding to SEQ ID NO: 1036, wherein the amino acid sequence comprises one or more substitutions relative to the reference sequence corresponding to residues 8 to 890 of SEQ ID NO: 1036, or relative to the reference sequence corresponding to SEQ ID NO: 1036.

[0312] In some embodiments, the engineered RNA polymerase comprises an amino acid sequence having at least 70%, 75%, 80%, 81%, 82%, 83%, 84%, 85%, 86%, 87%, 88%, 89%, 90%, 91%, 92%, 93%, 94%, 95%, 96%, 97%, 98%, 99%, or more sequence identity to the reference sequence corresponding to residues 8 to 890 of an even-numbered SEQ ID NO. of SEQ ID NOs: 1730-1800, or to the reference sequence corresponding to an even-numbered SEQ ID NO. of SEQ ID NOs: 1730-1800, wherein the amino acid sequence comprises one or more substitutions relative to the reference sequence corresponding to residues 8 to 890 of SEQ ID NO: 1036, or relative to the reference sequence corresponding to SEQ ID NO: 1036.

[0313] In some embodiments, the amino acid sequence of the engineered RNA polymerase comprises at least a substitution or substitution set at amino acid positions(s) 139/309/310/357/387, 135/139/357/359/387/655/658, 139/633, 145/237/250/378/648/649, 139/310/387/633/655/658, 144/237/648/649, 250/352/359/648/649, 237/378/648/649, 145/648/649, 135/139/352/655/658, 135/139/151, 310/655/658, 135/139/310, 126/237/648/649, 135/310/655/658, 144/145/359/633/648/649, 151/310/655/658, 237/250/308/378/633/648/649/663, 250/310/633, 308/310/633/655/725, 237/250, 357/633/648/649, 310/352/633/648, 308/655/658, 237/633, 139/308/310, 139/308/655/658/725, 145/250/308/310, 139/357/655/658, 633/655/658/725, 250/310, 237/250/650, 139/151/308/310/352/359/633, 310/357/359/633/658, 237/309/310, or 237/308/310/633, wherein the amino acid positions are relative to the reference sequence corresponding to residues 8 to 890 of SEQ ID NO: 1036, or relative to the reference sequence corresponding to SEQ ID NO: 1036.

[0314] In some embodiments, the amino acid sequence of the engineered RNA polymerase comprises at least a substitution or substitution set, or amino acid residue(s) 139R/309R/310K/357R/387A, 135G/139R/357R/359I/387A/655E/658R, 139R/633T, 145S/237R/250R/378P/648A/649L, 139R/310K/387A/633T/655E/658K, 144I/237R/648A/649L, 250R/352K/359I/648A/649L, 237R/378P/648A/649L, 145S/648A/649L, 135G/139R/352K/655E/658R, 135G/139R/151R, 310K/655E/658K, 135G/139R/310F, 126M/237R/648A/649L, 135G/310F/655E/658K, 144I/145S/359I/633T/648A/649L, 151R/310F/655E/658R, 237R/250R/308G/378P/633T/648A/649L/663L, 250R/310F/633T, 308G/310E/633T/655E/725I, 237R/250R, 357R/633T/648A/649L, 310F/352K/633T/648A, 308G/655E/658R, 237R/633T, 139R/308G/310K, 139R/308G/655E/658K/725I, 145S/250R/308G/310K, 139R/357R/655E/658R, 633T/655E/658K/725I, 250R/310H, 237R/250R/650P, 139R/151R/308G/310E/352K/359I/633T, 310F/357R/359I/633T/658K, 237R/309R/310F, or 237R/308G/310H/633T, wherein the amino acid positions are relative to the reference sequence corresponding to residues 8 to 890 of SEQ ID NO: 1036, or relative to the reference sequence corresponding to SEQ ID NO: 1036.

[0315] In some embodiments, the amino acid sequence of the engineered RNA polymerase comprises at least a substitution or substitution set T139R/L309R/A310K/A357R/E387A, S135G/T139R/A357R/V359I/E387A/D655E/L658R, T139R/N633T, A145S/H237R/T250R/E378P/S648A/K649L, T139R/A310K/E387A/N633T/D655E/L658K, V144I/H237R/S648A/K649L, T250R/Q352K/V359I/S648A/K649L, H237R/E378P/S648A/K649L, A145S/S648A/K649L, S135G/T139R/Q352K/D655E/L658R, S135G/T139R/A151R, A310K/D655E/L658K, S135G/T139R/A310F, I126M/H237R/S648A/K649L, S135G/A310F/D655E/L658K, V144I/A145S/V359I/N633T/S648A/K649L, A151R/A310F/D655E/L658R, H237R/T250R/S308G/E378P/N633T/S648A/K649L/Q663L, T250R/A310F/N633T, S308G/A310E/N633T/D655E/V725I, H237R/T250R, A357R/N633T/S648A/K649L, A310F/Q352K/N633T/S648A, S308G/D655E/L658R, H237R/N633T, T139R/S308G/A310K, T139R/S308G/D655E/L658K/V725I, A145S/T250R/S308G/A310K, T139R/A357R/D655E/L658R, N633T/D655E/L658K/V725I, T250R/A310H, H237R/T250R/E650P, T139R/A151R/S308G/A310E/Q352K/V359I/N633T, A310F/A357R/V359I/N633T/L658K, H237R/L309R/A310F, or H237R/S308G/A310H/N633T, wherein the amino acid positions are relative to the reference sequence corresponding to residues 8 to 890 of SEQ ID NO: 1036, or relative to the reference sequence corresponding to SEQ ID NO: 1036.

[0316] In some embodiments, the engineered RNA polymerase comprises an amino acid sequence having at least 70%, 75%, 80%, 81%, 82%, 83%, 84%, 85%, 86%, 87%, 88%, 89%, 90%, 91%, 92%, 93%, 94%, 95%, 96%, 97%, 98%, 99%, or more sequence identity to the reference sequence corresponding to residues 8 to 890 of SEQ ID NO: 1742, or to the reference sequence corresponding to SEQ ID NO: 1742, wherein the amino acid sequence comprises one or more substitutions relative to the reference sequence corresponding to residues 8 to 890 of SEQ ID NO: 1742, or relative to the reference sequence corresponding to SEQ ID NO: 1742.

[0317] In some embodiments, the engineered RNA polymerase comprises an amino acid sequence having at least 70%, 75%, 80%, 81%, 82%, 83%, 84%, 85%, 86%, 87%, 88%, 89%, 90%, 91%, 92%, 93%, 94%, 95%, 96%, 97%, 98%, 99%, or more sequence identity to the reference sequence corresponding to residues 8 to 890 of an even-numbered SEQ ID NO. of SEQ ID NOs: 1802-1912, or to the reference sequence corresponding to an even-numbered SEQ ID NO. of SEQ ID NOs: 1802-1912, wherein the amino acid sequence comprises one or more substitutions relative to the reference sequence corresponding to residues 8 to 890 of SEQ ID NO: 1742, or relative to the reference sequence corresponding to SEQ ID NO: 1742.

[0318] In some embodiments, the amino acid sequence of the engineered RNA polymerase comprises at least a substitution or substitution set at amino acid positions(s)
[0319] 139/140/633/659/662/663/743/782/784/793, 129/132/150/206/207/209/357/425/541/778,
[0320] 101/129/132/150/206/209/357/425/778, 132/150/206/207/311/357/778, 140/206/210/633/659/782,
[0321] 140/206/659/663/782/784/855, 139/140/144/206/210/633/662/782/784/795,
[0322] 139/206/210/633/659/662/663/784, 139/633/659/663/782/784, 140/206/210/663,
[0323] 206/207/209/357/425/778, 139/140/144/662/782, 129/132/150/206/207/209/425/543,
[0324] 139/140/206/210/633/659/782, 101/132/150/206/209/357/425/541, 139/206/210/662,
[0325] 207/209/357/425/778, 132/425/541/778, 150/206/207/425, 132/206/207/778, 139/659/662/782/784,
[0326] 140/662/782, 206/210/633/659, 139/210/633/662/782, 139/206/210/659/663, 129/132/150/204/207/357,
[0327] 139/144/659/662/782, 129/132/150/206/207/209/235/357/778, 206/210/633/795, 778, 662/663/782,
[0328] 132/206/207/209/357/425/541/778, 129/132/207/235/425/778, 132/150/206, 140/206/210/662/663,
[0329] 425/541/778, 139/206/659/663/782/795, 101/132/150/425/541/778, 139/144/659/782, 140, 659,
[0330] 150/206/209/235/357/543/778, 101/132/206/209/543/778, 132/204/206/357/778,
[0331] 129/132/150/206/207/209/543, 139/144/659/662/663/782/793, 357/778, 139/140/206/210/633/659/663,
[0332] 129/132/235/357/541, 129/132/311/357/541, 101/129/132/206/209/778, 101/132/206/209, 140/659/663,
[0333] 206/210/633/662/663, 140/144/659/663/743, or 139/140/633/659/662, wherein the amino acid positions are relative to the reference sequence corresponding to residues 8 to 890 of SEQ ID NO: 1742, or relative to the reference sequence corresponding to SEQ ID NO: 1742.

[0334] In some embodiments, the amino acid sequence of the engineered RNA polymerase comprises at least a substitution or substitution set, or amino acid residue(s)
[0335] 139R/140S/633T/659K/662V/663G/743H/782M/784A/793F,
[0336] 129V/132L/150K/206V/207V/209P/357R/425W/541M/778V,
[0337] 101R/129V/132L/150K/206V/209E/357R/425W/778V, 132V/150K/206V/207V/311V/357R/778V,
[0338] 140R/206G/210M/633T/659K/782A, 140R/206G/659K/663G/782M/784A/855R,
[0339] 139R/140R/144L/206G/210M/633T/662V/782M/784A/795A,
[0340] 139A/206G/210M/633T/659K/662V/663G/784A, 139R/633T/659K/663G/782A/784A,
[0341] 140R/206G/210G/663G, 206V/207V/209P/357R/425W/778V, 139R/140R/144L/662V/782M,
[0342] 129V/132L/150K/206V/207V/209E/425W/543W, 139A/140S/206G/210M/633T/659K/782M,
[0343] 101R/132L/150K/206G/209E/357R/425W/541M, 139A/206G/210M/662V,
[0344] 207V/209P/357R/425W/778V, 132V/425W/541M/778V, 150K/206V/207V/425W,
[0345] 132L/206V/207V/778V, 139R/659K/662V/782M/784A, 140R/662V/782M, 206G/210M/633T/659G,
[0346] 139R/210R/633T/662V/782M, 139A/206G/210M/659K/663G, 129V/132I/150K/204E/207V/357R,
[0347] 139R/144L/659G/662V/782M, 129V/132S/150K/206V/207V/209P/235L/357R/778V,
[0348] 206G/210R/633T/795A, 778V, 662V/663G/782M, 132V/206V/207V/209E/357R/425W/541M/778V,
[0349] 129V/132I/207V/235L/425W/778V, 132I/150K/206G, 140S/206G/210M/662V/663G,
[0350] 425W/541M/778V, 139R/206G/659K/663G/782M/795A, 101R/132L/150K/425W/541M/778V,
[0351] 139R/144L/659G/782M, 140R, 659G, 150K/206V/209P/235L/357R/543W/778V,
[0352] 101R/132I/206G/209E/543W/778V, 132I/204E/206V/357R/778V,
[0353] 129V/132L/150K/206G/207V/209E/543W, 139L/144L/659K/662V/663G/782A/793F, 357R/778V,
[0354] 139L/140S/206G/210M/633T/659K/663G, 129V/132S/235T/357R/541M,
[0355] 129V/132V/311V/357R/541M, 101R/129V/132L/206V/209E/778V, 101R/132L/206V/209E,
[0356] 140S/659K/663G, 206G/210R/633T/662V/663G, 140R/144L/659K/663G/743H, 04
[0357] 139R/140R/633T/659K/662V, wherein the amino acid positions are relative to the reference sequence corresponding to residues 8 to 890 of SEQ ID NO: 1742, or relative to the reference sequence corresponding to SEQ ID NO: 1742.

[0358] In some embodiments, the amino acid sequence of the engineered RNA polymerase comprises at least a substitution or substitution set
[0359] T139R/T140S/N633T/S659K/I662V/Q663G/W743H/V782M/G784A/L793F,
[0360] T129V/C132L/R150K/E206V/A207V/S209P/A357R/Q425W/L541M/A778V,
[0361] A101R/T129V/C132L/R150K/E206V/S209E/A357R/Q425W/A778V,
[0362] C132V/R150K/E206V/A207V/A311V/A357R/A778V, T140R/E206G/S210M/N633T/S659K/V782A,
[0363] T140R/E206G/S659K/Q663G/V782M/G784A/Q855R,
[0364] T139R/T140R/V144L/E206G/S210M/N633T/I662V/V782M/G784A/G795A,
[0365] T139A/E206G/S210M/N633T/S659K/I662V/Q663G/G784A,
[0366] T139R/N633T/S659K/Q663G/V782A/G784A, T140R/E206G/S210G/Q663G,
[0367] E206V/A207V/S209P/A357R/Q425W/A778V, T139R/T140R/V144L/I662V/V782M,
[0368] T129V/C132L/R150K/E206V/A207V/S209E/Q425W/F543W,
[0369] T139A/T140S/E206G/S210M/N633T/S659K/V782M,
[0370] A101R/C132L/R150K/E206G/S209E/A357R/Q425W/L541M, T139A/E206G/S210M/I662V,
[0371] A207V/S209P/A357R/Q425W/A778V, C132V/Q425W/L541M/A778V,
[0372] R150K/E206V/A207V/Q425W, C132L/E206V/A207V/A778V, T139R/S659K/I662V/V782M/G784A,
[0373] T140R/I662V/V782M, E206G/S210M/N633T/S659G, T139R/S210R/N633T/I662V/V782M,
[0374] T139A/E206G/S210M/S659K/Q663G, T129V/C132I/R150K/G204E/A207V/A357R,
[0375] T139R/V144L/S659G/I662V/V782M,
[0376] T129V/C132S/R150K/E206V/A207V/S209P/S235L/A357R/A778V, E206G/S210R/N633T/G795A,
[0377] A778V, I662V/Q663G/V782M, C132V/E206V/A207V/S209E/A357R/Q425W/L541M/A778V,
[0378] T129V/C132I/A207V/S235L/Q425W/A778V, C132I/R150K/E206G,
[0379] T140S/E206G/S210M/I662V/Q663G, Q425W/L541M/A778V,
[0380] T139R/E206G/S659K/Q663G/V782M/G795A, A101R/C132L/R150K/Q425W/L541M/A778V,
[0381] T139R/V144L/S659G/V782M, T140R, S659G, R150K/E206V/S209P/S235L/A357R/F543W/A778V,
[0382] A101R/C132I/E206G/S209E/F543W/A778V, C1321/G204E/E206V/A357R/A778V,
[0383] T129V/C132L/R150K/E206G/A207V/S209E/F543W,
[0384] T139L/V144L/S659K/I662V/Q663G/V782A/L793F, A357R/A778V,
[0385] T139L/T140S/E206G/S210M/N633T/S659K/Q663G, T129V/C132S/S235T/A357R/L541M,
[0386] T129V/C132V/A311V/A357R/L541M, A101R/T129V/C132L/E206V/S209E/A778V,
[0387] A101R/C132L/E206V/S209E, T140S/S659K/Q663G, E206G/S210R/N633T/I662V/Q663G,
[0388] T140R/V144L/S659K/Q663G/W743H, or T139R/T140R/N633T/S659K/I662V, wherein the amino acid positions are relative to the reference sequence corresponding to residues 8 to 890 of SEQ ID NO: 1742, or relative to the reference sequence corresponding to SEQ ID NO: 1742.

[0389] In some embodiments, the engineered RNA polymerase comprises an amino acid sequence having at least 70%, 75%, 80%, 81%, 82%, 83%, 84%, 85%, 86%, 87%, 88%, 89%, 90%, 91%, 92%, 93%, 94%, 95%, 96%, 97%, 98%, 99%, or more sequence identity to the reference sequence corresponding to residues 8 to 890 of SEQ ID NO: 1838, or to the reference sequence corresponding to SEQ ID NO: 1838, wherein the amino acid sequence comprises one or more substitutions relative to the reference sequence corresponding to residues 8 to 890 of SEQ ID NO: 1838, or relative to the reference sequence corresponding to SEQ ID NO: 1838.

[0390] In some embodiments, the engineered RNA polymerase comprises an amino acid sequence having at least 70%, 75%, 80%, 81%, 82%, 83%, 84%, 85%, 86%, 87%, 88%, 89%, 90%, 91%, 92%, 93%, 94%, 95%, 96%, 97%, 98%, 99%, or more sequence identity to the reference sequence corresponding to residues 8 to 890 of an even-numbered SEQ ID NO. of SEQ ID NOs: 1914-2018, or to the reference sequence corresponding to an even-numbered SEQ ID NO. of SEQ ID NOs: 1914-2018, wherein the amino acid sequence comprises one or more substitutions relative to the reference sequence corresponding to residues 8 to 890 of SEQ ID NO: 1838, or relative to the reference sequence corresponding to SEQ ID NO: 1838.

[0391] In some embodiments, the amino acid sequence of the engineered RNA polymerase comprises at least a substitution or substitution set at amino acid positions(s) 473, 696, 450, 397/771, 397, 402, 378, 396, 841, 289, 388, 514, 474, 406, 357, 170/474, 761, 855, 367, 708, 407, 324, 345, 478, 513, 404, 390, 398, 715, 709, 399, 327, 438, 410, 76,389,517, 274, 693, 553, 401, or 470, wherein the amino acid positions are relative to the reference sequence corresponding to residues 8 to 890 of SEQ ID NO: 1838, or relative to the reference sequence corresponding to SEQ ID NO: 1838.

[0392] In some embodiments, the amino acid sequence of the engineered RNA polymerase comprises at least a substitution or substitution set, or amino acid residue(s) 473K, 696C, 450T, 397G/771D, 397E, 402L, 378D, 396R, 396M, 841N, 289L, 388M, 514R, 474L, 406S, 357R, 170N/474M, 3971, 473R, 761K, 855A, 841S, 289F, 367E, 708K, 407W, 324L, 345S, 478C, 513S, 404R, 514C, 390E, 398D, 715S, 709V, 399I, 327I, 438F, 410G, 396S, 76T, 389E, 517N, 274A, 693K, 410K, 553L, 389C, 401L, 289V, 470G, or 450V, wherein the amino acid positions are relative to the reference sequence corresponding to residues 8 to 890 of SEQ ID NO: 1838, or relative to the reference sequence corresponding to SEQ ID NO: 1838.

[0393] In some embodiments, the amino acid sequence of the engineered RNA polymerase comprises at least a substitution or substitution set N473K, V696C, L450T, A397G/N771D, A397E, R402L, E378D, K396R, K396M, D841N, T289L, A388M, S514R, T474L, E406S, A357R, K170N/T474M, A397I, N473R, Q761K, Q855A, D841S, T289F, M367E, S708K, F407W, I324L, A345S, D478C, D513S, S404R, S514C, A390E, R398D, A715S, A709V, V399I, V327I, M438F, S410G, K396S, A76T, S389E, C517N, M274A, S693K, S410K, F553L, S389C, R401L, T289V, H470G, or L450V, wherein the amino acid positions are relative to the reference sequence corresponding to residues 8 to 890 of SEQ ID NO: 1838, or relative to the reference sequence corresponding to SEQ ID NO: 1838.

[0394] In some embodiments, the amino acid sequence of the engineered RNA polymerase comprises at least a substitution at an amino acid position set forth in Tables 8.1, 9.1, 10.1, 10.2, 11.1, 12.1, 13.1, 14.1, 15.1, 16.1, 17.1, and 18.1, wherein the amino acid positions are relative to the reference sequence corresponding to residues 8 to 890 of SEQ ID NO: 2, 4, 26, 424,548, 896, 1030, 1036, 1742, or 1838, or relative to the reference sequence corresponding to SEQ ID NO: 2, 4, 26, 424,548, 896, 1030, 1036, 1742, or 1838.

[0395] In some embodiments, the amino acid sequence of the engineered RNA polymerase comprises at least a substitution set forth in Tables 8.1, 9.1, 10.1, 10.2, 11.1, 12.1, 13.1, 14.1, 15.1, 16.1, 17.1, and 18.1, wherein the amino acid positions are relative to the reference sequence corresponding to residues 8 to 890 of SEQ ID NO: 2, 4, 26, 424,548, 896, 1030, 1036, 1742, or 1838, or relative to the reference sequence corresponding to SEQ ID NO: 2, 4, 26, 424,548, 896, 1030, 1036, 1742, or 1838.

[0396] In some embodiments, the amino acid sequence of the engineered RNA polymerase comprises a substitution or substitution set at amino acid position(s) set forth in Tables 8.1, 9.1, 10.1, 10.2, 11.1, 12.1, 13.1, 14.1, 15.1, 16.1, 17.1, and 18.1, wherein the amino acid positions are relative to the reference sequence corresponding to residues 8 to 890 of SEQ ID NO: 2, 4, 26, 424,548, 896, 1030, 1036, 1742, or 1838, or relative to the reference sequence corresponding to SEQ ID NO: 2, 4, 26, 424,548, 896, 1030, 1036, 1742, or 1838.

[0397] In some embodiments, the amino acid sequence of the engineered RNA polymerase comprises at least a substitution or substitution set of an engineered RNA polymerase set forth in Tables 8.1, 9.1, 10.1, 10.2, 11.1, 12.1, 13.1, 14.1, 15.1, 16.1, 17.1, and 18.1, wherein the amino acid positions are relative to the reference sequence corresponding to residues 8 to 890 of SEQ ID NO: 2, 4, 26, 424,548, 896, 1030, 1036, 1742, or 1838, or relative to the reference sequence corresponding to SEQ ID NO: 2, 4, 26, 424, 548, 896, 1030, 1036, 1742, or 1838.

[0398] In some embodiments, the engineered RNA polymerase comprises an amino acid sequence having at least 70%, 75%, 80%, 81%, 82%, 83%, 84%, 85%, 86%, 87%, 88%, 89%, 90%, 91%, 92%, 93%, 94%, 95%, 96%, 97%, 98%, 99% or more sequence identity to a reference sequence having a substitution or substitution set as set forth in Tables 8.1, 9.1, 10.1, 10.2, 11.1, 12.1, 13.1, 14.1, 15.1, 16.1, 17.1, and 18.1, wherein the amino acid positions are relative to the reference sequence corresponding to residues 8 to 890 of SEQ ID NO: 2, 4, 26, 424,548, 896, 1030, 1036, 1742, or 1838, or relative to the reference sequence corresponding to SEQ ID NO: 2, 4, 26, 424,548, 896, 1030, 1036, 1742, or 1838.

[0399] In some embodiments, the amino acid sequence of the engineered RNA polymerase comprises residues 8 to 890 of an amino acid sequence set forth in Tables 8.1, 9.1, 10.1, 10.2, 11.1, 12.1, 13.1, 14.1, 15.1, 16.1, 17.1, and 18.1, or comprises an amino acid sequence set forth in Tables 8.1, 9.1, 10.1, 10.2, 11.1, 12.1, 13.1, 14.1, 15.1, 16.1, 17.1, and 18.1.

[0400] In some embodiments, the engineered RNA polymerase comprises an amino acid sequence having at least 70%, 75%, 80%, 81%, 82%, 83%, 84%, 85%, 86%, 87%, 88%, 89%, 90%, 91%, 92%, 93%, 94%, 95%, 96%, 97%, 98%, 99% or more sequence identity to the sequence corresponding to residues 8 to 890 of SEQ ID NO: 2, 4, 6, 8, 10, 12, 14, 16, 18, 20, 22, 24, 26, 28, 30, 32, 34, 36, 38, 40, 42, 44, 46, 48, 50, 52, 54, 56, 58, 60, 62, 64, 66, 68, 70, 72, 74, 76, 78, 80, 82, 84, 86, 88, 90, 92, 94, 96, 98,100,102, 104, 106, 108, 110, 112, 114, 116, 118, 120, 122, 124, 126, 128, 130, 132, 134, 136, 138, 140, 142, 144, 146, 148, 150, 152, 154, 156, 158, 160, 162, 164, 166, 168, 170, 172, 174, 176, 178, 180, 182, 184, 186, 188, 190, 192, 194, 196, 198, 200, 202, 204, 206, 208, 210, 212, 214, 216, 218, 220, 222, 224, 226, 228, 230, 232, 234, 236, 238, 240, 242, 244, 246, 248, 250, 252, 254, 256, 258, 260, 262, 264, 266, 268, 270, 272, 274, 276, 278, 280, 282, 284, 286, 288, 290, 292, 294, 296, 298, 300, 302, 304, 306, 308, 310, 312, 314, 316, 318, 320, 322, 324, 326, 328, 330, 332, 334, 336, 338, 340, 342, 344, 346, 348, 350, 352, 354, 356, 358, 360, 362, 364, 366, 368, 370, 372, 374, 376, 378, 380, 382, 384, 386, 388, 390, 392, 394, 396, 398, 400, 402, 404, 406, 408, 410, 412, 414, 416, 418, 420, 422, 424, 426, 428, 430, 432, 434, 436, 438, 440, 442, 444, 446, 448, 450, 452, 454, 456, 458, 460, 462, 464, 466, 468, 470, 472, 474, 476, 478, 480, 482, 484, 486, 488, 490, 492, 494, 496, 498, 400, 402, 404, 406, 408, 410, 412, 414, 416, 418, 420, 422, 424, 426, 428, 430, 432, 434, 436, 438, 440, 442, 444, 446, 448, 450, 452, 454, 456, 458, 460, 462, 464, 466, 468, 470, 472, 474, 476, 478, 480, 482, 484, 486, 488, 490, 492, 494, 496, 498, 500, 502, 504, 506, 508, 510, 512, 514, 516, 518, 520, 522, 524, 526, 528, 530, 532, 534, 536, 538, 540, 542, 544, 546, 548, 550, 552, 554, 556, 558, 560, 562, 564, 566, 568, 570, 572, 574, 576, 578, 580, 582, 584, 586, 588, 590, 592, 594, 596, 598, 600, 602, 604, 606, 608, 610, 612, 614, 616, 618, 620, 622, 624, 626, 628, 630, 632, 634, 636, 638, 640, 642, 644, 646, 648, 650, 652, 654, 656, 658, 660, 662, 664, 666, 668, 670, 672, 674, 676, 678, 680, 682, 684, 686, 688, 690, 692, 694, 696, 698, 700, 702, 704, 706, 708, 710, 712, 714, 716, 718, 720, 722, 724, 276, 728, 730, 732, 734, 736, 738, 740, 742, 744, 746, 748, 750, 752, 754, 756, 758, 760, 762, 764, 766, 768, 770, 772, 774, 776, 778, 780, 782, 784, 786, 788, 790, 792, 794, 796, 798, 800, 802, 804, 806, 808, 810, 812, 814, 816, 818, 820, 822, 824, 826, 828, 830, 832, 834, 836, 838, 840, 842, 844, 846, 848, 850, 852, 854, 856, 858, 860, 862, 864, 866, 868, 870, 872, 874, 876, 878, 880, 882, 884, 886, 888, 890, 892, 894, 896, 898, 900, 902, 904, 906, 908, 910, 912, 914, 916, 918, 920, 922, 924, 926, 928, 930, 932, 934, 936, 938, 940, 942, 944, 946, 948, 950, 952, 954, 956, 958, 960, 962, 964, 966, 968, 970, 972, 974, 976, 978, 980, 982, 984, 986, 988, 990, 992, 994, 996, 998, 1000, 1002, 1004, 1006, 1008, 1010, 1012, 1014, 1016, 1018, 1020, 1022, 1024, 1026, 1028, 1030, 1032, 1034, 1036, 1038, 1040, 1042, 1044, 1046, 1048, 1050, 1052, 1054, 1056, 1058, 1060, 1062, 1064, 1066, 1068, 1070, 1072, 1074, 1076, 1078, 1080, 1082, 1084, 1086, 1088, 1090, 1092, 1094, 1096, 1098, 1100, 1102, 1104, 1106, 1108, 1110, 1112, 1114, 1116, 1118, 1120, 1122, 1124, 1126, 1128, 1130, 1132, 1134, 1136, 1138, 1140, 1142, 1144, 1146, 1148, 1150, 1152,1154, 1156, 1158, 1160, 1162, 1164, 1166, 1168, 1170, 1172, 1174, 1176, 1178, 1180, 1182, 1184, 1186, 1188, 1190, 1192, 1194, 1196, 1198, 1200, 1202, 1204, 1206, 1208, 1210, 1212, 1214, 1216, 1218, 1220, 1222, 1224, 1226, 1228, 1230, 1232, 1234, 1236, 1238, 1240, 1242, 1244, 1246, 1248, 1250, 1252, 1254, 1256, 1258, 1260, 1262, 1264, 1266, 1268, 1270, 1272, 1274, 1276, 1278, 1280, 1282, 1284, 1286, 1288, 1290, 1292, 1294, 1296, 1298, 1300, 1302, 1304, 1306, 1308, 1310, 1312, 1314, 1316, 1318, 1320, 1322, 1324, 1326, 1328, 1330, 1332, 1334, 1336, 1338, 1340, 1342, 1344, 1346, 1348, 1350, 1352, 1354, 1356, 1358, 1360, 1362, 1364, 1366, 1368, 1370, 1372, 1374, 1376, 1378, 1380, 1382, 1384, 1386, 1388, 1390, 1392, 1394, 1396, 1398, 1400, 1402, 1404, 1406, 1408, 1410, 1412, 1414, 1416, 1418, 1420, 1422, 1424, 1426, 1428, 1430, 1432, 1434, 1436, 1438, 1440, 1442, 1444, 1446, 1448, 1450, 1452, 1454, 1456, 1458, 1460, 1462, 1464, 1466, 1468, 1470, 1472, 1474, 1476, 1478, 1480, 1482, 1484, 1486, 1488, 1490, 1492, 1494, 1496, 1498, 1500, 1502, 1504, 1506, 1508, 1510, 1512, 1514, 1516, 1518, 1520, 1522, 1524, 1576, 1528, 1530, 1532, 1534, 1536, 1538, 1540, 1542, 1544, 1546, 1548, 1550, 1552, 1554, 1556, 1558, 1560, 1562, 1564, 1566, 1568, 1570, 1572, 1574, 1576, 1578, 1580, 1582, 1584, 1586, 1588, 1590, 1592, 1594, 1596, 1598, 1600, 1602, 1604, 1606, 1608, 1610, 1612, 1614, 1616, 1618, 1620, 1622, 1624, 1626, 1628, 1630, 1632, 1634, 1636, 1638, 1640, 1642, 1644, 1646, 1648, 1650, 1652, 1654, 1656, 1658, 1660, 1662, 1664, 1666, 1668, 1670, 1672, 1674, 1676, 1678, 1680, 1682, 1684, 1686, 1688, 1690, 1692, 1694, 1696, 1698, 1700, 1702, 1704, 1706, 1708, 1710, 1712, 1714, 1716, 1718, 1720, 1722, 1724, 1726, 1728, 1730, 1732, 1734, 1736, 1738, 1740, 1742, 1744, 1746, 1748, 1750, 1752, 1754, 1756, 1758, 1760, 1762, 1764, 1766, 1768, 1770, 1772, 1774, 1776, 1778, 1780, 1782, 1784, 1786, 1788, 1790, 1792, 1794, 1796, 1798, 1800, 1802, 1804, 1806, 1808, 1810, 1812, 1814, 1816, 1818, 1820, 1822, 1824, 1826, 1828, 1830, 1832, 1834, 1836, 1838, 1840, 1842, 1844, 1846, 1848, 1850, 1852, 1854, 1856, 1858, 1860, 1862, 1864, 1866, 1868, 1870, 1872, 1874, 1876, 1878, 1880, 1882, 1884, 1886, 1888, 1890, 1892, 1894, 1896, 1898, 1900, 1902, 1904, 1906, 1908, 1910, 1912, 1914, 1916, 1918, 1920, 1922, 1924, 1926, 1928, 1930, 1932, 1934, 1936, 1938, 1940, 1942, 1944, 1946, 1948, 1950, 1952, 1954, 1956, 1958, 1960, 1962, 1964, 1966, 1968, 1970, 1972, 1974, 1976, 1978, 1980, 1982, 1984, 1986, 1988, 1990, 1992, 1994, 1996, 1998, 2000, 2002, 2004, 2006, 2008, 2010, 2012, 2014, 2016, or 2018.

[0401] In some embodiments, the engineered RNA polymerase comprises an amino acid sequence having at least 70%, 75%, 80%, 81%, 82%, 83%, 84%, 85%, 86%, 87%, 88%, 89%, 90%, 91%, 92%, 93%, 94%, 95%, 96%, 97%, 98%, 99% or more sequence identity to the sequence corresponding to SEQ ID NO: 2, 4, 6, 8, 10, 12, 14, 16, 18, 20, 22, 24, 26, 28, 30, 32, 34, 36, 38, 40, 42, 44, 46, 48, 50, 52, 54, 56, 58, 60, 62, 64, 66, 68, 70, 72, 74, 76, 78, 80, 82, 84, 86, 88, 90, 92, 94, 96, 98,100,102, 104, 106, 108, 110, 112, 114, 116, 118, 120, 122, 124, 126, 128, 130, 132, 134, 136, 138, 140, 142, 144, 146, 148, 150, 152, 154, 156, 158, 160, 162, 164, 166, 168, 170, 172, 174, 176, 178, 180, 182, 184, 186, 188, 190, 192, 194, 196, 198, 200, 202, 204, 206, 208, 210, 212, 214, 216, 218, 220, 222, 224, 226, 228, 230, 232, 234, 236, 238, 240, 242, 244, 246, 248, 250, 252, 254, 256, 258, 260, 262, 264, 266, 268, 270, 272, 274, 276, 278, 280, 282, 284, 286, 288, 290, 292, 294, 296, 298, 300, 302, 304, 306, 308, 310, 312, 314, 316, 318, 320, 322, 324, 326, 328, 330, 332, 334, 336, 338, 340, 342, 344, 346, 348, 350, 352, 354, 356, 358, 360, 362, 364, 366, 368, 370, 372, 374, 376, 378, 380, 382, 384, 386, 388, 390, 392, 394, 396, 398, 400, 402, 404, 406, 408, 410, 412, 414, 416, 418, 420, 422, 424, 426, 428, 430, 432, 434, 436, 438, 440, 442, 444, 446, 448, 450, 452, 454, 456, 458, 460, 462, 464, 466, 468, 470, 472, 474, 476, 478, 480, 482, 484, 486, 488, 490, 492, 494, 496, 498, 400, 402, 404, 406, 408, 410, 412, 414, 416, 418, 420, 422, 424, 426, 428, 430, 432, 434, 436, 438, 440, 442, 444, 446, 448, 450, 452, 454, 456, 458, 460, 462, 464, 466, 468, 470, 472, 474, 476, 478, 480, 482, 484, 486, 488, 490, 492, 494, 496, 498, 500, 502, 504, 506, 508, 510, 512, 514, 516, 518, 520, 522, 524, 526, 528, 530, 532, 534, 536, 538, 540, 542, 544, 546, 548, 550, 552, 554, 556, 558, 560, 562, 564, 566, 568, 570, 572, 574, 576, 578, 580, 582, 584, 586, 588, 590, 592, 594, 596, 598, 600, 602, 604, 606, 608, 610, 612, 614, 616, 618, 620, 622, 624, 626, 628, 630, 632, 634, 636, 638, 640, 642, 644, 646, 648, 650, 652, 654, 656, 658, 660, 662, 664, 666, 668, 670, 672, 674, 676, 678, 680, 682, 684, 686, 688, 690, 692, 694, 696, 698, 700, 702, 704, 706, 708, 710, 712, 714, 716, 718, 720, 722, 724, 276, 728, 730, 732, 734, 736, 738, 740, 742, 744, 746, 748, 750, 752, 754, 756, 758, 760, 762, 764, 766, 768, 770, 772, 774, 776, 778, 780, 782, 784, 786, 788, 790, 792, 794, 796, 798, 800, 802, 804, 806, 808, 810, 812, 814, 816, 818, 820, 822, 824, 826, 828, 830, 832, 834, 836, 838, 840, 842, 844, 846, 848, 850, 852, 854, 856, 858, 860, 862, 864, 866, 868, 870, 872, 874, 876, 878, 880, 882, 884, 886, 888, 890, 892, 894, 896, 898, 900, 902, 904, 906, 908, 910, 912, 914, 916, 918, 920, 922, 924, 926, 928, 930, 932, 934, 936, 938, 940, 942, 944, 946, 948, 950, 952, 954, 956, 958, 960, 962, 964, 966, 968, 970, 972, 974, 976, 978, 980, 982, 984, 986, 988, 990, 992, 994, 996, 998, 1000, 1002, 1004, 1006, 1008, 1010, 1012, 1014, 1016, 1018, 1020, 1022, 1024, 1026, 1028, 1030, 1032, 1034, 1036, 1038, 1040, 1042, 1044, 1046, 1048, 1050, 1052, 1054, 1056, 1058, 1060, 1062, 1064, 1066, 1068, 1070, 1072, 1074, 1076, 1078, 1080, 1082, 1084, 1086, 1088, 1090, 1092, 1094, 1096, 1098, 1100, 1102, 1104, 1106, 1108, 1110, 1112, 1114, 1116, 1118, 1120, 1122, 1124, 1126, 1128, 1130, 1132, 1134, 1136, 1138, 1140, 1142, 1144, 1146, 1148, 1150, 1152,1154, 1156, 1158, 1160, 1162, 1164, 1166, 1168, 1170, 1172, 1174, 1176, 1178, 1180, 1182, 1184, 1186, 1188, 1190, 1192, 1194, 1196, 1198, 1200, 1202, 1204, 1206, 1208, 1210, 1212, 1214, 1216, 1218, 1220, 1222, 1224, 1226, 1228, 1230, 1232, 1234, 1236, 1238, 1240, 1242, 1244, 1246, 1248, 1250, 1252, 1254, 1256, 1258, 1260, 1262, 1264, 1266, 1268, 1270, 1272, 1274, 1276, 1278, 1280, 1282, 1284, 1286, 1288, 1290, 1292, 1294, 1296, 1298, 1300, 1302, 1304, 1306, 1308, 1310, 1312, 1314, 1316, 1318, 1320, 1322, 1324, 1326, 1328, 1330, 1332, 1334, 1336, 1338, 1340, 1342, 1344, 1346, 1348, 1350, 1352, 1354, 1356, 1358, 1360, 1362, 1364, 1366, 1368, 1370, 1372, 1374, 1376, 1378, 1380, 1382, 1384, 1386, 1388, 1390, 1392, 1394, 1396, 1398, 1400, 1402, 1404, 1406, 1408, 1410, 1412, 1414, 1416, 1418, 1420, 1422, 1424, 1426, 1428, 1430, 1432, 1434, 1436, 1438, 1440, 1442, 1444, 1446, 1448, 1450, 1452, 1454, 1456, 1458, 1460, 1462, 1464, 1466, 1468, 1470, 1472, 1474, 1476, 1478, 1480, 1482, 1484, 1486, 1488, 1490, 1492, 1494, 1496, 1498, 1500, 1502, 1504, 1506, 1508, 1510, 1512, 1514, 1516, 1518, 1520, 1522, 1524, 1576, 1528, 1530, 1532, 1534, 1536, 1538, 1540, 1542, 1544, 1546, 1548, 1550, 1552, 1554, 1556, 1558, 1560, 1562, 1564, 1566, 1568, 1570, 1572, 1574, 1576, 1578, 1580, 1582, 1584, 1586, 1588, 1590, 1592, 1594, 1596, 1598, 1600, 1602, 1604, 1606, 1608, 1610, 1612, 1614, 1616, 1618, 1620, 1622, 1624, 1626, 1628, 1630, 1632, 1634, 1636, 1638, 1640, 1642, 1644, 1646, 1648, 1650, 1652, 1654, 1656, 1658, 1660, 1662, 1664, 1666, 1668, 1670, 1672, 1674, 1676, 1678, 1680, 1682, 1684, 1686, 1688, 1690, 1692, 1694, 1696, 1698, 1700, 1702, 1704, 1706, 1708, 1710, 1712, 1714, 1716, 1718, 1720, 1722, 1724, 1726, 1728, 1730, 1732, 1734, 1736, 1738, 1740, 1742, 1744, 1746, 1748, 1750, 1752, 1754, 1756, 1758, 1760, 1762, 1764, 1766, 1768, 1770, 1772, 1774, 1776, 1778, 1780, 1782, 1784, 1786, 1788, 1790, 1792, 1794, 1796, 1798, 1800, 1802, 1804, 1806, 1808, 1810, 1812, 1814, 1816, 1818, 1820, 1822, 1824, 1826, 1828, 1830, 1832, 1834, 1836, 1838, 1840, 1842, 1844, 1846, 1848, 1850, 1852, 1854, 1856, 1858, 1860, 1862, 1864, 1866, 1868, 1870, 1872, 1874, 1876, 1878, 1880, 1882, 1884, 1886, 1888, 1890, 1892, 1894, 1896, 1898, 1900, 1902, 1904, 1906, 1908, 1910, 1912, 1914, 1916, 1918, 1920, 1922, 1924, 1926, 1928, 1930, 1932, 1934, 1936, 1938, 1940, 1942, 1944, 1946, 1948, 1950, 1952, 1954, 1956, 1958, 1960, 1962, 1964, 1966, 1968, 1970, 1972, 1974, 1976, 1978, 1980, 1982, 1984, 1986, 1988, 1990, 1992, 1994, 1996, 1998, 2000, 2002, 2004, 2006, 2008, 2010, 2012, 2014, 2016, or 2018.

[0402] In some embodiments, the amino acid sequence of the engineered RNA polymerase comprises residues 8 to 890 of an even numbered SEQ ID NO. of SEQ ID NOs: 2-2018, or comprises an even numbered SEQ ID NO. of SEQ ID NOs: 2-2018. In some embodiments, the amino acid sequence optionally has 1, 2, 3, 4, 5, 6, 7, 8, 9, or up to 10 amino acid insertions, deletions, or substitutions. In some embodiments, the amino acid sequence optionally has 1, 2, 3, 4, 5, 6, 7, 8, 9, or up to 10 amino acid substitutions. In some embodiments, the amino acid sequence optionally has 1, 2, 3, 4, up to 5 amino acid insertions, deletions, or substitutions. In some embodiments, the amino acid sequence optionally has 1, 2, 3, 4, up to 5 amino acid substitutions. In some embodiments, the amino acid substitutions comprises non-conservative or conservative substitutions. In some embodiments, the amino acid substitutions comprise conservative substitutions.

[0403] In some embodiments, the engineered RNA polymerase comprises an amino acid sequence comprising residues 8 to 890 of SEQ ID NO: 2, 4, 6, 8, 10, 12, 14, 16, 18, 20, 22, 24, 26, 28, 30, 32, 34, 36, 38, 40, 42, 44, 46, 48, 50, 52, 54, 56, 58, 60, 62, 64, 66, 68, 70, 72, 74, 76, 78, 80, 82, 84, 86, 88, 90, 92, 94, 96, 98, 100,102, 104, 106, 108, 110, 112, 114, 116, 118, 120, 122, 124, 126, 128, 130, 132, 134, 136, 138, 140, 142, 144, 146, 148, 150, 152, 154, 156, 158, 160, 162, 164, 166, 168, 170, 172, 174, 176, 178, 180, 182, 184, 186, 188, 190, 192, 194, 196, 198, 200, 202, 204, 206, 208, 210, 212, 214, 216, 218, 220, 222, 224, 226, 228, 230, 232, 234, 236, 238, 240, 242, 244, 246, 248, 250, 252, 254, 256, 258, 260, 262, 264, 266, 268, 270, 272, 274, 276, 278, 280, 282, 284, 286, 288, 290, 292, 294, 296, 298, 300, 302, 304, 306, 308, 310, 312, 314, 316, 318, 320, 322, 324, 326, 328, 330, 332, 334, 336, 338, 340, 342, 344, 346, 348, 350, 352, 354, 356, 358, 360, 362, 364, 366, 368, 370, 372, 374, 376, 378, 380, 382, 384, 386, 388, 390, 392, 394, 396, 398, 400, 402, 404, 406, 408, 410, 412, 414, 416, 418, 420, 422, 424, 426, 428, 430, 432, 434, 436, 438, 440, 442, 444, 446, 448, 450, 452, 454, 456, 458, 460, 462, 464, 466, 468, 470, 472, 474, 476, 478, 480, 482, 484, 486, 488, 490, 492, 494, 496, 498, 400, 402, 404, 406, 408, 410, 412, 414, 416, 418, 420, 422, 424, 426, 428, 430, 432, 434, 436, 438, 440, 442, 444, 446, 448, 450, 452, 454, 456, 458, 460, 462, 464, 466, 468, 470, 472, 474, 476, 478, 480, 482, 484, 486, 488, 490, 492, 494, 496, 498, 500, 502, 504, 506, 508, 510, 512, 514, 516, 518, 520, 522, 524, 526, 528, 530, 532, 534, 536, 538, 540, 542, 544, 546, 548, 550, 552, 554, 556, 558, 560, 562, 564, 566, 568, 570, 572, 574, 576, 578, 580, 582, 584, 586, 588, 590, 592, 594, 596, 598, 600, 602, 604, 606, 608, 610, 612, 614, 616, 618, 620, 622, 624, 626, 628, 630, 632, 634, 636, 638, 640, 642, 644, 646, 648, 650, 652, 654, 656, 658, 660, 662, 664, 666, 668, 670, 672, 674, 676, 678, 680, 682, 684, 686, 688, 690, 692, 694, 696, 698, 700, 702, 704, 706, 708, 710, 712, 714, 716, 718, 720, 722, 724, 276, 728, 730, 732, 734, 736, 738, 740, 742, 744, 746, 748, 750, 752, 754, 756, 758, 760, 762, 764, 766, 768, 770, 772, 774, 776, 778, 780, 782, 784, 786, 788, 790, 792, 794, 796, 798, 800, 802, 804, 806, 808, 810, 812, 814, 816, 818, 820, 822, 824, 826, 828, 830, 832, 834, 836, 838, 840, 842, 844, 846, 848, 850, 852, 854, 856, 858, 860, 862, 864, 866, 868, 870, 872, 874, 876, 878, 880, 882, 884, 886, 888, 890, 892, 894, 896, 898, 900, 902, 904, 906, 908, 910, 912, 914, 916, 918, 920, 922, 924, 926, 928, 930, 932, 934, 936, 938, 940, 942, 944, 946, 948, 950, 952, 954, 956, 958, 960, 962, 964, 966, 968, 970, 972, 974, 976, 978, 980, 982, 984, 986, 988, 990, 992, 994, 996, 998, 1000, 1002, 1004, 1006, 1008, 1010, 1012, 1014, 1016, 1018, 1020, 1022, 1024, 1026, 1028, 1030, 1032, 1034, 1036, 1038, 1040, 1042, 1044, 1046, 1048, 1050, 1052, 1054, 1056, 1058, 1060, 1062, 1064, 1066, 1068, 1070, 1072, 1074, 1076, 1078, 1080, 1082, 1084, 1086, 1088, 1090, 1092, 1094, 1096, 1098, 1100, 1102, 1104, 1106, 1108, 1110, 1112, 1114, 1116, 1118, 1120, 1122, 1124, 1126, 1128, 1130, 1132, 1134, 1136, 1138, 1140, 1142, 1144, 1146, 1148, 1150, 1152,1154, 1156, 1158, 1160, 1162, 1164, 1166, 1168, 1170, 1172, 1174, 1176, 1178, 1180, 1182, 1184, 1186, 1188, 1190, 1192, 1194, 1196, 1198, 1200, 1202, 1204, 1206, 1208, 1210, 1212, 1214, 1216, 1218, 1220, 1222, 1224, 1226, 1228, 1230, 1232, 1234, 1236, 1238, 1240, 1242, 1244, 1246, 1248, 1250, 1252, 1254, 1256, 1258, 1260, 1262, 1264, 1266, 1268, 1270, 1272, 1274, 1276, 1278, 1280, 1282, 1284, 1286, 1288, 1290, 1292, 1294, 1296, 1298, 1300, 1302, 1304, 1306, 1308, 1310, 1312, 1314, 1316, 1318, 1320, 1322, 1324, 1326, 1328, 1330, 1332, 1334, 1336, 1338, 1340, 1342, 1344, 1346, 1348, 1350, 1352, 1354, 1356, 1358, 1360, 1362, 1364, 1366, 1368, 1370, 1372, 1374, 1376, 1378, 1380, 1382, 1384, 1386, 1388, 1390, 1392, 1394, 1396, 1398, 1400, 1402, 1404, 1406, 1408, 1410, 1412, 1414, 1416, 1418, 1420, 1422, 1424, 1426, 1428, 1430, 1432, 1434, 1436, 1438, 1440, 1442, 1444, 1446, 1448, 1450, 1452, 1454, 1456, 1458, 1460, 1462, 1464, 1466, 1468, 1470, 1472, 1474, 1476, 1478, 1480, 1482, 1484, 1486, 1488, 1490, 1492, 1494, 1496, 1498, 1500, 1502, 1504, 1506, 1508, 1510, 1512, 1514, 1516, 1518, 1520, 1522, 1524, 1576, 1528, 1530, 1532, 1534, 1536, 1538, 1540, 1542, 1544, 1546, 1548, 1550, 1552, 1554, 1556, 1558, 1560, 1562, 1564, 1566, 1568, 1570, 1572, 1574, 1576, 1578, 1580, 1582, 1584, 1586, 1588, 1590, 1592, 1594, 1596, 1598, 1600, 1602, 1604, 1606, 1608, 1610, 1612, 1614, 1616, 1618, 1620, 1622, 1624, 1626, 1628, 1630, 1632, 1634, 1636, 1638, 1640, 1642, 1644, 1646, 1648, 1650, 1652, 1654, 1656, 1658, 1660, 1662, 1664, 1666, 1668, 1670, 1672, 1674, 1676, 1678, 1680, 1682, 1684, 1686, 1688, 1690, 1692, 1694, 1696, 1698, 1700, 1702, 1704, 1706, 1708, 1710, 1712, 1714, 1716, 1718, 1720, 1722, 1724, 1726, 1728, 1730, 1732, 1734, 1736, 1738, 1740, 1742, 1744, 1746, 1748, 1750, 1752, 1754, 1756, 1758, 1760, 1762, 1764, 1766, 1768, 1770, 1772, 1774, 1776, 1778, 1780, 1782, 1784, 1786, 1788, 1790, 1792, 1794, 1796, 1798, 1800, 1802, 1804, 1806, 1808, 1810, 1812, 1814, 1816, 1818, 1820, 1822, 1824, 1826, 1828, 1830, 1832, 1834, 1836, 1838, 1840, 1842, 1844, 1846, 1848, 1850, 1852, 1854, 1856, 1858, 1860, 1862, 1864, 1866, 1868, 1870, 1872, 1874, 1876, 1878, 1880, 1882, 1884, 1886, 1888, 1890, 1892, 1894, 1896, 1898, 1900, 1902, 1904, 1906, 1908, 1910, 1912, 1914, 1916, 1918, 1920, 1922, 1924, 1926, 1928, 1930, 1932, 1934, 1936, 1938, 1940, 1942, 1944, 1946, 1948, 1950, 1952, 1954, 1956, 1958, 1960, 1962, 1964, 1966, 1968, 1970, 1972, 1974, 1976, 1978, 1980, 1982, 1984, 1986, 1988, 1990, 1992, 1994, 1996, 1998, 2000, 2002, 2004, 2006, 2008, 2010, 2012, 2014, 2016, or 2018. In some embodiments, the amino acid sequence optionally has 1, 2, 3, 4, 5, 6, 7, 8, 9, or up to 10 amino acid insertions, deletions, or substitutions. In some embodiments, the amino acid sequence optionally has 1, 2, 3, 4, 5, 6, 7, 8, 9, or up to 10 amino acid substitutions. In some embodiments, the amino acid sequence optionally has 1, 2, 3, 4, up to 5 amino acid insertions, deletions, or substitutions. In some embodiments, the amino acid sequence optionally has 1, 2, 3, 4, up to 5 amino acid substitutions. In some embodiments, the amino acid substitutions comprises non-conservative or conservative substitutions. In some embodiments, the amino acid substitutions comprise conservative substitutions.

[0404] In some embodiments, the engineered RNA polymerase comprises an amino acid sequence comprising SEQ ID NO: 2, 4, 6, 8, 10, 12, 14, 16, 18, 20, 22, 24, 26, 28, 30, 32, 34, 36, 38, 40, 42, 44, 46, 48, 50, 52, 54, 56, 58, 60, 62, 64, 66, 68, 70, 72, 74, 76, 78, 80, 82, 84, 86, 88, 90, 92, 94, 96, 98, 100, 102, 104, 106, 108, 110, 112, 114, 116, 118, 120, 122, 124, 126, 128, 130, 132, 134, 136, 138, 140, 142, 144, 146, 148, 150, 152, 154, 156, 158, 160, 162, 164, 166, 168, 170, 172, 174, 176, 178, 180, 182, 184, 186, 188, 190, 192, 194, 196, 198, 200, 202, 204, 206, 208, 210, 212, 214, 216, 218, 220, 222, 224, 226, 228, 230, 232, 234, 236, 238, 240, 242, 244, 246, 248, 250, 252, 254, 256, 258, 260, 262, 264, 266, 268, 270, 272, 274, 276, 278, 280, 282, 284, 286, 288, 290, 292, 294, 296, 298, 300, 302, 304, 306, 308, 310, 312, 314, 316, 318, 320, 322, 324, 326, 328, 330, 332, 334, 336, 338, 340, 342, 344, 346, 348, 350, 352, 354, 356, 358, 360, 362, 364, 366, 368, 370, 372, 374, 376, 378, 380, 382, 384, 386, 388, 390, 392, 394, 396, 398, 400, 402, 404, 406, 408, 410, 412, 414, 416, 418, 420, 422, 424, 426, 428, 430, 432, 434, 436, 438, 440, 442, 444, 446, 448, 450, 452, 454, 456, 458, 460, 462, 464, 466, 468, 470, 472, 474, 476, 478, 480, 482, 484, 486, 488, 490, 492, 494, 496, 498, 400, 402, 404, 406, 408, 410, 412, 414, 416, 418, 420, 422, 424, 426, 428, 430, 432, 434, 436, 438, 440, 442, 444, 446, 448, 450, 452, 454, 456, 458, 460, 462, 464, 466, 468, 470, 472, 474, 476, 478, 480, 482, 484, 486, 488, 490, 492, 494, 496, 498, 500, 502, 504, 506, 508, 510, 512, 514, 516, 518, 520, 522, 524, 526, 528, 530, 532, 534, 536, 538, 540, 542, 544, 546, 548, 550, 552, 554, 556, 558, 560, 562, 564, 566, 568, 570, 572, 574, 576, 578, 580, 582, 584, 586, 588, 590, 592, 594, 596, 598, 600, 602, 604, 606, 608, 610, 612, 614, 616, 618, 620, 622, 624, 626, 628, 630, 632, 634, 636, 638, 640, 642, 644, 646, 648, 650, 652, 654, 656, 658, 660, 662, 664, 666, 668, 670, 672, 674, 676, 678, 680, 682, 684, 686, 688, 690, 692, 694, 696, 698, 700, 702, 704, 706, 708, 710, 712, 714, 716, 718, 720, 722, 724, 276, 728, 730, 732, 734, 736, 738, 740, 742, 744, 746, 748, 750, 752, 754, 756, 758, 760, 762, 764, 766, 768, 770, 772, 774, 776, 778, 780, 782, 784, 786, 788, 790, 792, 794, 796, 798, 800, 802, 804, 806, 808, 810, 812, 814, 816, 818, 820, 822, 824, 826, 828, 830, 832, 834, 836, 838, 840, 842, 844, 846, 848, 850, 852, 854, 856, 858, 860, 862, 864, 866, 868, 870, 872, 874, 876, 878, 880, 882, 884, 886, 888, 890, 892, 894, 896, 898, 900, 902, 904, 906, 908, 910, 912, 914, 916, 918, 920, 922, 924, 926, 928, 930, 932, 934, 936, 938, 940, 942, 944, 946, 948, 950, 952, 954, 956, 958, 960, 962, 964, 966, 968, 970, 972, 974, 976, 978, 980, 982, 984, 986, 988, 990, 992, 994, 996, 998, 1000, 1002, 1004, 1006, 1008, 1010, 1012, 1014, 1016, 1018, 1020, 1022, 1024, 1026, 1028, 1030, 1032, 1034, 1036, 1038, 1040, 1042, 1044, 1046, 1048, 1050, 1052, 1054, 1056, 1058, 1060, 1062, 1064, 1066, 1068, 1070, 1072, 1074, 1076, 1078, 1080, 1082, 1084, 1086, 1088, 1090, 1092, 1094, 1096, 1098, 1100, 1102, 1104, 1106, 1108, 1110, 1112, 1114, 1116, 1118, 1120, 1122, 1124, 1126, 1128, 1130, 1132, 1134, 1136, 1138, 1140, 1142, 1144, 1146, 1148, 1150, 1152,1154, 1156, 1158, 1160, 1162, 1164, 1166, 1168, 1170, 1172, 1174, 1176, 1178, 1180, 1182, 1184, 1186, 1188, 1190, 1192, 1194, 1196, 1198, 1200, 1202, 1204, 1206, 1208, 1210, 1212, 1214, 1216, 1218, 1220, 1222, 1224, 1226, 1228, 1230, 1232, 1234, 1236, 1238, 1240, 1242, 1244, 1246, 1248, 1250, 1252, 1254, 1256, 1258, 1260, 1262, 1264, 1266, 1268, 1270, 1272, 1274, 1276, 1278, 1280, 1282, 1284, 1286, 1288, 1290, 1292, 1294, 1296, 1298, 1300, 1302, 1304, 1306, 1308, 1310, 1312, 1314, 1316, 1318, 1320, 1322, 1324, 1326, 1328, 1330, 1332, 1334, 1336, 1338, 1340, 1342, 1344, 1346, 1348, 1350, 1352, 1354, 1356, 1358, 1360, 1362, 1364, 1366, 1368, 1370, 1372, 1374, 1376, 1378, 1380, 1382, 1384, 1386, 1388, 1390, 1392, 1394, 1396, 1398, 1400, 1402, 1404, 1406, 1408, 1410, 1412, 1414, 1416, 1418, 1420, 1422, 1424, 1426, 1428, 1430, 1432, 1434, 1436, 1438, 1440, 1442, 1444, 1446, 1448, 1450, 1452, 1454, 1456, 1458, 1460, 1462, 1464, 1466, 1468, 1470, 1472, 1474, 1476, 1478, 1480, 1482, 1484, 1486, 1488, 1490, 1492, 1494, 1496, 1498, 1500, 1502, 1504, 1506, 1508, 1510, 1512, 1514, 1516, 1518, 1520, 1522, 1524, 1576, 1528, 1530, 1532, 1534, 1536, 1538, 1540, 1542, 1544, 1546, 1548, 1550, 1552, 1554, 1556, 1558, 1560, 1562, 1564, 1566, 1568, 1570, 1572, 1574, 1576, 1578, 1580, 1582, 1584, 1586, 1588, 1590, 1592, 1594, 1596, 1598, 1600, 1602, 1604, 1606, 1608, 1610, 1612, 1614, 1616, 1618, 1620, 1622, 1624, 1626, 1628, 1630, 1632, 1634, 1636, 1638, 1640, 1642, 1644, 1646, 1648, 1650, 1652, 1654, 1656, 1658, 1660, 1662, 1664, 1666, 1668, 1670, 1672, 1674, 1676, 1678, 1680, 1682, 1684, 1686, 1688, 1690, 1692, 1694, 1696, 1698, 1700, 1702, 1704, 1706, 1708, 1710, 1712, 1714, 1716, 1718, 1720, 1722, 1724, 1726, 1728, 1730, 1732, 1734, 1736, 1738, 1740, 1742, 1744, 1746, 1748, 1750, 1752, 1754, 1756, 1758, 1760, 1762, 1764, 1766, 1768, 1770, 1772, 1774, 1776, 1778, 1780, 1782, 1784, 1786, 1788, 1790, 1792, 1794, 1796, 1798, 1800, 1802, 1804, 1806, 1808, 1810, 1812, 1814, 1816, 1818, 1820, 1822, 1824, 1826, 1828, 1830, 1832, 1834, 1836, 1838, 1840, 1842, 1844, 1846, 1848, 1850, 1852, 1854, 1856, 1858, 1860, 1862, 1864, 1866, 1868, 1870, 1872, 1874, 1876, 1878, 1880, 1882, 1884, 1886, 1888, 1890, 1892, 1894, 1896, 1898, 1900, 1902, 1904, 1906, 1908, 1910, 1912, 1914, 1916, 1918, 1920, 1922, 1924, 1926, 1928, 1930, 1932, 1934, 1936, 1938, 1940, 1942, 1944, 1946, 1948, 1950, 1952, 1954, 1956, 1958, 1960, 1962, 1964, 1966, 1968, 1970, 1972, 1974, 1976, 1978, 1980, 1982, 1984, 1986, 1988, 1990, 1992, 1994, 1996, 1998, 2000, 2002, 2004, 2006, 2008, 2010, 2012, 2014, 2016, or 2018. In some embodiments, the amino acid sequence optionally has 1, 2, 3, 4, 5, 6, 7, 8, 9, or up to 10 amino acid insertions, deletions, or substitutions. In some embodiments, the amino acid sequence optionally has 1, 2, 3, 4, 5, 6, 7, 8, 9, or up to 10 amino acid substitutions. In some embodiments, the amino acid sequence optionally has 1, 2, 3, 4, up to 5 amino acid insertions, deletions, or substitutions. In some embodiments, the amino acid sequence optionally has 1, 2, 3, 4, up to 5 amino acid substitutions. In some embodiments, the amino acid substitutions comprises non-conservative or conservative substitutions. In some embodiments, the amino acid substitutions comprise conservative substitutions.

[0405] In some embodiments, the engineered RNA polymerase of the present disclosure has RNA polymerase activity. In some embodiments, the engineered RNA polymerase has RNA polymerase activity and at least one improved or enhanced properties as compared to a reference RNA polymerase.

[0406] In some embodiments, the engineered RNA polymerase has increased RNA polymerase activity compared to the reference RNA polymerase. In some embodiments, the engineered RNA polymerase 1.1, 1.2, 1,3, 1.4, 1.5, 2, 2.5, 3, 4, 5, 6, 7, 8, 9, 10, 15, 20, or more fold, or more increased activity as compared to the reference RNA polymerase.

[0407] In some embodiments, the engineered RNA polymerase has increased thermostability as compared to the reference RNA polymerase. In some embodiments, the engineered RNA polymerase has increased thermostability at temperatures 35° C. or greater, 40° C. or greater, 45° C. or greater, or 50° C. or greater, as compared to the reference RNA polymerase. In some embodiments, the engineered RNA polymerase has increased thermostability at a temperature range of 35° C. to 50° C. as compared to the reference RNA polymerase.

[0408] In some embodiments, the engineered RNA polymerase has increased capping activity as compared to the reference RNA polymerase. In some embodiments, the increased capping activity has at least 1.1, 1.2, 1.3, 1.4, 1.5, 2, 2.5, 3, 3.5, or 4 fold increase in capping activity as compared to the reference RNA polymerase.

[0409] In some embodiments, the reference RNA polymerase has the sequence corresponding to residues 8 to 890 of SEQ ID NO: 2, 4, 26, 424,548, 896, 1030, 1036, 1742, or 1838, or the sequence corresponding to SEQ ID NO: 2, 4, 26, 424,548, 896, 1030, 1036, 1742, or 1838. In some embodiments, the reference RNA polymerase has the sequence corresponding to residues 8 to 890 of SEQ ID NO: 2, or the sequence corresponding to SEQ ID NO: 2.

[0410] In some embodiments, the engineered RNA polymerase has an improved property selected from i) increased activity, ii) increased thermostability, iii) increased capping activity, or iv) increased RNA product yield, or any combination of i), ii), iii) and iv), as compared to a reference RNA polymerase, wherein the reference RNA polymerase has the sequence corresponding to residues 8 to 890 of SEQ ID NO: 2, 4, 26, 424,548, 896, 1030, 1036, 1742, or 1838, or the sequence corresponding to SEQ ID NO: 2, 4, 26, 424,548, 896, 1030, 1036, 1742, or 1838. In some embodiments, the reference RNA polymerase has the sequence corresponding to residues 8 to 890 of SEQ ID NO: 2, or the sequence corresponding to SEQ ID NO: 2.

[0411] In some embodiments, the engineered RNA polymerase is expressed as a fusion protein. In some embodiments, the engineered RNA polymerase described herein can be fused to a variety of polypeptide sequences, such as, by way of example and not limitation, polypeptide tags that can be used for detection and/or purification. In some embodiments, the fusion protein of the engineered RNA polymerase comprises a glycine-histidine or histidine-tag (His-tag). In some embodiments, the engineered RNA polymerase comprises a polylysine, e.g., 2-12 lysine units, such as for conjugation to a support medium. In some embodiments, the fusion protein of the engineered RNA polymerase comprises an epitope tag, such as c-my, FLAG, V5, or hemagglutinin (HA). In some embodiments, the fusion protein of the engineered RNA polymerase comprises a GST, SUMO, Strep, MBP, or GFP tag. In some embodiments, the fusion is to the amino (N-) terminus of engineered RNA polymerase polypeptide.

[0412] In some embodiments, the fusion is to the carboxy (C-) terminus of the engineered RNA polymerase polypeptide.

[0413] In some embodiments, the engineered RNA polymerase polypeptide described herein is an isolated composition. In some embodiments, the engineered RNA polymerase polypeptide is purified, as further discussed herein.

[0414] In some embodiments, the present disclosure further provides functional fragments or biologically active fragments of engineered RNA polymerase polypeptides described herein. Thus, for each and every embodiment herein of an engineered RNA polymerase, a functional fragment or biologically active fragment of the engineered RNA polymerase is provided herewith (e.g., an engineered RNA polymerase provided in Tables 8.1, 9.1, 10.1, 10.2, 11.1, 12.1, 13.1, 14.1, 15.1, 16.1, 17.1, and 18.1). In some embodiments, a functional fragment or biologically active fragments of an engineered RNA polymerase comprises at least 90%, at least 91%, at least 92%, at least 93%, at least 94%, at least 95%, at least 96%, at least 97%, at least 98%, or at least 99% of the activity of the RNA polymerase polypeptide from which it was derived (i.e., the parent RNA polymerase). In some embodiments, functional fragments or biologically active fragments comprise at least 70%, 75%, 80%, 81%, 82%, 83%, 84%, 85%, 90%, 91%, 92%, 93%, 94%, 95%, 96%, 97%, 98%, or 99% of the parent sequence of the RNA polymerase. In some embodiments, the functional fragment will be truncated by less than 5, less than 10, less than 15, less than 10, less than 25, less than 30, less than 35, less than 40, less than 45, less than 50 amino acids, less than 55 amino acids, less than 60 amino acids, less than 65 amino acids, or less than 70 amino acids.

[0415] In some embodiments, the functional fragments or biologically active fragments of the engineered RNA polymerase polypeptide described herein include at least a mutation or mutation set in the amino acid sequence of the engineered RNA polymerase described herein. Accordingly, in some embodiments, the functional fragments or biologically active fragments of the engineered RNA polymerase displays the enhanced or improved property associated with the mutation or mutation set in the parent RNA polymerase.

### Polynucleotides Encoding Engineered Polypeptides, Expression Vectors and Host Cells

[0416] In another aspect, the present disclosure provides recombinant polynucleotides encoding the engineered RNA polymerase described herein. In some embodiments, the recombinant polynucleotides are operably linked to one or more heterologous regulatory sequences that control gene expression to create a recombinant polynucleotide construct capable of expressing the engineered RNA polymerase. In some embodiments, an expression construct containing at least one heterologous polynucleotide encoding the engineered RNA polymerase polypeptide(s) is introduced into appropriate host cells to express the corresponding RNA polymerase polypeptide(s).

[0417] As will be apparent to the skilled artisan, availability of a protein sequence and the knowledge of the codons corresponding to the various amino acids provide a description of all the polynucleotides capable of encoding the subject polypeptides. The degeneracy of the genetic code, where the same amino acids are encoded by alternative or synonymous codons, allows an extremely large number of nucleic acids to be made, all of which encode an engineered RNA polymerase of the present disclosure. Thus, the present disclosure provides methods and compositions for the production of each and every possible variation of polynucleotides that could be made that encode the engineered RNA polymerase polypeptides described herein by selecting combinations based on the possible codon choices, and all such polynucleotide variants are to be considered specifically disclosed for any polypeptide described herein, including the amino acid sequences presented in the Examples (e.g., Tables 8.1, 9.1, 10.1, 10.2, 11.1, 12.1, 13.1, 14.1, 15.1, 16.1, 17.1, and 18.1,) and in the Sequence Listing.

[0418] In some embodiments, the codons are preferably optimized for utilization by the chosen host cell for protein production. In some embodiments, preferred codons in bacteria are used for expression in bacteria. In some embodiments, preferred codons in fungal cells are used for expression in fungal cells. In some embodiments, preferred codons in insect cells are used for expression in insect cells. In some embodiments, preferred codons in mammalian cells are used for expression in mammalian cells. In some embodiments, codon optimized polynucleotides encoding an engineered RNA polymerase polypeptide described herein contain preferred codons at about 40%, 50%, 60%, 70%, 80%, 90%, or greater than 90% of the codon positions in the full-length coding region.

[0419] Accordingly, in some embodiments, a recombinant polynucleotide of the present disclosure comprises a polynucleotide sequence encoding an engineered RNA polymerase polypeptide described herein. In some embodiments, the polynucleotide sequence of the recombinant polynucleotide is codon optimized. In some embodiments, the polynucleotide sequence of the recombinant polynucleotide is codon optimized for expression in eukaryotic or prokaryotic cells, as further discussed below.

[0420] In some embodiments, the recombinant polynucleotide comprises a polynucleotide sequence encoding an engineered RNA polymerase comprising an amino acid sequence comprising residues 8 to 890 of SEQ ID NO: 2 or comprising SEQ ID NO: 2, or an amino acid sequence having at least 70%, 75%, 80%, 81%, 82%, 83%, 84%, 85%, 86%, 87%, 88%, 89%, 90%, 91%, 92%, 93%, 94%, 95%, 96%, 97%, 98%, 99%, or more sequence identity to a reference sequence corresponding to residues 8 to 890 of SEQ ID NO: 2, 4, 26, 424,548, 896, 1030, 1036, 1742, or 1838, or to a reference sequence corresponding to SEQ ID NO: 2, 4, 26, 424,548, 896, 1030, 1036, 1742, or 1838, wherein the amino acid sequence comprises one or more substitutions relative to the reference sequence corresponding to residues 8 to 890 of SEQ ID NO: 2, 4, 26, 424,548, 896, 1030, 1036, 1742, or 1838, or relative to the reference sequence corresponding to SEQ ID NO: 2, 4, 26, 424,548, 896, 1030, 1036, 1742, or 1838.

[0421] In some embodiments, the recombinant polynucleotide comprises a polynucleotide sequence encoding an engineered RNA polymerase comprising an amino acid sequence having at least 70%, 75%, 80%, 81%, 82%, 83%, 84%, 85%, 86%, 87%, 88%, 89%, 90%, 91%, 92%, 93%, 94%, 95%, 96%, 97%, 98%, 99%, or more sequence identity to the reference sequence corresponding to residues 8 to 890 of SEQ ID NO: 2, or to the reference sequence corresponding to SEQ ID NO: 2, wherein the amino acid sequence comprises one or more substitutions relative to the reference sequence corresponding to residues 8 to 890 of SEQ ID NO: 2, or relative to the reference sequence corresponding to SEQ ID NO: 2.

[0422] In some embodiments, the recombinant polynucleotide comprises a polynucleotide sequence encoding an engineered RNA polymerase comprising an amino acid sequence having at least 70%, 75%, 80%, 81%, 82%, 83%, 84%, 85%, 86%, 87%, 88%, 89%, 90%, 91%, 92%, 93%, 94%, 95%, 96%, 97%, 98%, 99%, or more sequence identity to the reference sequence corresponding to residues 8 to 890 of SEQ ID NO: 4, 26, 424,548, 896, 1030, 1036, 1742, or 1838, or relative to the reference sequence corresponding to SEQ ID NO: 4, 26, 424,548, 896, 1030, 1036, 1742, or 1838, wherein the amino acid sequence comprises one or more substitutions relative to the reference sequence corresponding to residues 8 to 890 of SEQ ID NO: 2, or relative to the reference sequence corresponding to SEQ ID NO: 2.

[0423] In some embodiments, the recombinant polynucleotide comprises a polynucleotide sequence encoding an engineered RNA polymerase comprising an amino acid sequence having at least 70%, 75%, 80%, 81%, 82%, 83%, 84%, 85%, 86%, 87%, 88%, 89%, 90%, 91%, 92%, 93%, 94%, 95%, 96%, 97%, 98%, 99% or more sequence identity to the reference sequence corresponding to residues 8 to 890 of an even numbered SEQ ID NO. of SEQ ID NOs: 4-2018, or to the reference sequence corresponding to an even numbered SEQ ID NO. of SEQ ID NOs: 4-2018, wherein the amino acid sequence comprises one or more substitutions relative to the reference sequence corresponding to residues 8 to 890 of SEQ ID NO: 2, or relative to the reference sequence corresponding to SEQ ID NO: 2.

[0424] In some embodiments, the recombinant polynucleotide comprises a polynucleotide sequence encoding the engineered RNA polymerase comprising an amino acid sequence comprising at least a substitution at amino acid position 7, 11, 12, 13, 15, 18, 21, 23, 25, 26, 30, 34, 41, 45, 54, 56, 57, 59, 60, 61, 64, 66, 67, 71, 74, 75, 76, 77, 78, 82, 84, 98, 101,104, 108, 122, 126, 129, 132, 133, 134, 135, 136, 139, 140, 144, 145, 150, 151, 160, 161, 164, 167, 168, 169, 170, 171, 172, 177, 178, 179, 180, 181, 182, 183, 184, 185, 186, 187, 188, 189, 190, 191, 192, 193, 194, 195, 197, 198, 200, 202, 204, 206, 207, 209, 210, 223, 235, 237, 246, 250, 254, 256, 260, 269, 274, 278, 286, 289, 296, 299, 302, 307, 308, 309, 310, 311, 312, 313, 315, 319, 324, 327, 336, 337, 340, 343, 345, 347, 350, 352, 357, 359, 362, 364, 365, 367, 369, 370, 372, 375, 376, 378, 379, 382, 386, 387, 388, 389, 390, 394, 396, 397, 397, 398, 399, 401, 402, 403, 404, 405, 406, 407, 410, 413, 416, 418, 419, 420, 425, 437, 438, 450, 455, 456, 461, 462, 464, 468, 470, 473, 474, 477, 478, 483, 484, 489, 491, 494, 495, 496, 498, 499, 502, 505, 511, 513, 514, 517, 526, 527, 528, 529, 530, 531, 534, 535, 537, 541, 543, 550, 553, 561, 563, 564, 573, 574, 579, 582, 583, 588, 590, 591, 593, 598, 599, 600, 601, 605, 607, 608, 612, 613, 614, 615, 616, 618, 622, 623, 625, 626, 629, 633, 635, 636, 640, 645, 648, 649, 650, 653, 655, 657, 658, 659, 662, 663, 664, 665, 668, 670, 672, 675, 676, 686, 690, 691, 693, 694, 696, 701, 704, 708, 709, 715, 720, 723, 724, 725, 730, 743, 747, 751, 756, 761, 770, 771, 778, 779, 782, 784, 793, 794, 795, 796, 800, 808, 810, 831, 832, 839, 841, 845, 846, 852, 855, 856, 857, 858, 865, 876, 884, or 887, or combinations thereof, wherein the amino acid positions are relative to the reference sequence corresponding to residues 8 to 890 of SEQ ID NO: 2, or relative to the reference sequence corresponding to SEQ ID NO: 2.

[0425] In some embodiments, the recombinant polynucleotide comprises a polynucleotide sequence encoding the engineered RNA polymerase comprising an amino acid sequence comprising at least a substitution at amino acid position 136, 150, 195, 206, 207, 246, 250, 337, 340, 347, 352, 359, 399, 419, 425, 456, 531, 550, 574, 588, 601, 614, 616, 640, 645, 648, 649, 694, 720, 779, 782, 793, 796, 800, 839, 841, 841, 856, 865, 876, or 884, or combinations thereof, wherein the amino acid positions are relative to the reference sequence corresponding to residues 8 to 890 of SEQ ID NO: 2, or relative to the reference sequence corresponding to SEQ ID NO: 2.

[0426] In some embodiments, the recombinant polynucleotide comprises a polynucleotide sequence encoding the engineered RNA polymerase comprising an amino acid sequence comprising at least a substitution set at amino acid positions 796/800/841/884, 394/846, 394/808/846, 404/846, or 394/796/845/846, wherein the amino acid positions are relative to the reference sequence corresponding to residues 8 to 890 of SEQ ID NO: 2, or relative to the reference sequence corresponding to SEQ ID NO: 2.

[0427] In some embodiments, the recombinant polynucleotide comprises a polynucleotide sequence encoding an RNA polymerase comprising an amino acid sequence comprising at least a substitution at an amino acid position set forth in Tables 8.1, 9.1, 10.1, 10.2, 11.1, 12.1, 13.1, 14.1, 15.1, 16.1, 17.1, and 18.1, wherein the amino acid positions are relative to the reference sequence corresponding to residues 8 to 890 of SEQ ID NO: 2, or relative to the reference sequence corresponding to SEQ ID NO: 2.

[0428] In some embodiments, the recombinant polynucleotide comprises a polynucleotide sequence encoding an RNA polymerase comprising an amino acid sequence comprising at least a substitution as set forth in Tables 8.1, 9.1, 10.1, 10.2, 11.1, 12.1, 13.1, 14.1, 15.1, 16.1, 17.1, and 18.1, wherein the amino acid positions are relative to the reference sequence corresponding to residues 8 to 890 of SEQ ID NO: 2, or relative to the reference sequence corresponding to SEQ ID NO: 2.

[0429] In some embodiments, the recombinant polynucleotide comprises a polynucleotide sequence encoding an RNA polymerase comprising an amino acid sequence comprising at least a substitution or substitution set at amino acid position(s) set forth in Tables 8.1, 9.1, 10.1, 10.2, 11.1, 12.1, 13.1, 14.1, 15.1, 16.1, 17.1, and 18.1, wherein the amino acid positions are relative to the reference sequence corresponding to residues 8 to 890 of SEQ ID NO: 2, or relative to the reference sequence corresponding to SEQ ID NO: 2.

[0430] In some embodiments, the recombinant polynucleotide comprises a polynucleotide sequence encoding an RNA polymerase comprising an amino acid sequence comprising at least a substitution or substitution set of an engineered RNA polymerase set forth in Tables 8.1, 9.1, 10.1, 10.2, 11.1, 12.1, 13.1, 14.1, 15.1, 16.1, 17.1, and 18.1, wherein the amino acid positions are relative to the reference sequence corresponding to residues 8 to 890 of SEQ ID NO: 2, or relative to the reference sequence corresponding to SEQ ID NO: 2.

[0431] In some embodiments, the recombinant polynucleotide comprises a polynucleotide sequence encoding an RNA polymerase comprising an amino acid sequence having at least 70%, 75%, 80%, 81%, 82%, 83%, 84%, 85%, 86%, 87%, 88%, 89%, 90%, 91%, 92%, 93%, 94%, 95%, 96%, 97%, 98%, 99%, or more sequence identity to a reference sequence comprising a substitution or substitution set as set forth in Tables 8.1, 9.1, 10.1, 10.2, 11.1, 12.1, 13.1, 14.1, 15.1, 16.1, 17.1, and 18.1, wherein the amino acid positions are relative to the reference sequence corresponding to residues 8 to 890 of SEQ ID NO: 2, or relative to the reference sequence corresponding to SEQ ID NO: 2.

[0432] In some embodiments, the recombinant polynucleotide comprises a polynucleotide sequence encoding an engineered RNA polymerase comprising an amino acid sequence having at least 70%, 75%, 80%, 81%, 82%, 83%, 84%, 85%, 86%, 87%, 88%, 89%, 90%, 91%, 92%, 93%, 94%, 95%, 96%, 97%, 98%, 99%, or more sequence identity to the reference sequence corresponding to residues 8 to 890 of SEQ ID NO: 2, 4, 26, 424,548, 896, 1030, 1036, 1742, or 1838, or to the reference sequence corresponding to SEQ ID NO: 2, 4, 26, 424,548, 896, 1030, 1036, 1742, or 1838.

[0433] In some embodiments, the recombinant polynucleotide comprising a polynucleotide sequence encoding an engineered RNA polymerase comprising an amino acid sequence having at least 70%, 75%, 80%, 81%, 82%, 83%, 84%, 85%, 86%, 87%, 88%, 89%, 90%, 91%, 92%, 93%, 94%, 95%, 96%, 97%, 98%, 99% or more sequence identity to the reference sequence corresponding to residues 8 to 890 of an even numbered SEQ ID NO. of SEQ ID NOs: 2-2018, or to the reference sequence corresponding to an even numbered SEQ ID NO. of SEQ ID NOs: 2-2018.

[0434] In some embodiments, the recombinant polynucleotide comprises a polynucleotide sequence encoding an engineered RNA polymerase comprising an amino acid sequence having at least 70%, 75%, 80%, 81%, 82%, 83%, 84%, 85%, 86%, 87%, 88%, 89%, 90%, 91%, 92%, 93%, 94%, 95%, 96%, 97%, 98%, 99%, or more sequence identity to the reference sequence corresponding to residues 8 to 890 of SEQ ID NO: 4, 26, 424,548, 896, 1030, 1036, 1742, or 1838, or to the reference sequence corresponding to SEQ ID NO: 4, 26, 424,548, 896, 1030, 1036, 1742, or 1838, wherein the amino acid sequence comprises one or more substitutions relative to the reference sequence corresponding to residues 8 to 890 of SEQ ID NO: 4, 26, 424,548, 896, 1030, 1036, 1742, or 1838, or relative to the reference sequence corresponding to SEQ ID NO: 4, 26, 424,548, 896, 1030, 1036, 1742, or 1838.

[0435] In some embodiments, the recombinant polynucleotide comprises a polynucleotide sequence encoding the engineered RNA polymerase comprising an amino acid sequence having at least 70%, 75%, 80%, 81%, 82%, 83%, 84%, 85%, 86%, 87%, 88%, 89%, 90%, 91%, 92%, 93%, 94%, 95%, 96%, 97%, 98%, 99%, or more sequence identity to the reference sequence corresponding to residues 8 to 890 of SEQ ID NO: 4-2018, or to the reference sequence corresponding to SEQ ID NO: 4-2018, wherein the amino acid sequence comprises one or more substitutions relative to the reference sequence corresponding to residues 8 to 890 of SEQ ID NO: 4, 26, 424,548, 896, 1030, 1036, 1742, or 1838, or relative to the reference sequence corresponding to SEQ ID NO: 4, 26, 424,548, 896, 1030, 1036, 1742, or 1838.

[0436] In some embodiments, the recombinant polynucleotide comprises a polynucleotide sequence encoding the engineered RNA polymerase comprising an amino acid sequence comprising at least a substitution at amino acid position 7, 11, 12, 13, 15, 18, 21, 23, 25, 26, 30, 34, 41, 45, 54, 56, 57, 59, 60, 61, 64, 66, 67, 71, 74, 75, 76, 77, 78, 82, 84, 98, 101,104, 108, 122, 126, 129, 132, 133, 134, 135, 136, 139, 140, 144, 145, 150, 151, 160, 161, 164, 167, 168, 169, 170, 171, 172, 177, 178, 179, 180, 181, 182, 183, 184, 185, 186, 187, 188, 189, 190, 191, 192, 193, 194, 195, 197, 198, 200, 202, 204, 206, 207, 209, 210, 223, 235, 237, 246, 250, 254, 256, 260, 269, 274, 278, 286, 289, 296, 299, 302, 307, 308, 309, 310, 311, 312, 313, 315, 319, 324, 327, 336, 337, 340, 343, 345, 347, 350, 352, 357, 359, 362, 364, 365, 367, 369, 370, 372, 375, 376, 378, 379, 382, 386, 387, 388, 389, 390, 394, 396, 397, 397, 398, 399, 401, 402, 403, 404, 405, 406, 407, 410, 413, 416, 418, 419, 420, 425, 437, 438, 450, 455, 456, 461, 462, 464, 468, 470, 473, 474, 477, 478, 483, 484, 489, 491, 494, 495, 496, 498, 499, 502, 505, 511, 513, 514, 517, 526, 527, 528, 529, 530, 531, 534, 535, 537, 541, 543, 550, 553, 561, 563, 564, 573, 574, 579, 582, 583, 588, 590, 591, 593, 598, 599, 600, 601, 605, 607, 608, 612, 613, 614, 615, 616, 618, 622, 623, 625, 626, 629, 633, 635, 636, 640, 645, 648, 649, 650, 653, 655, 657, 658, 659, 662, 663, 664, 665, 668, 670, 672, 675, 676, 686, 690, 691, 693, 694, 696, 701, 704, 708, 709, 715, 720, 723, 724, 725, 730, 743, 747, 751, 756, 761, 770, 771, 778, 779, 782, 784, 793, 794, 795, 796, 800, 808, 810, 831, 832, 839, 841, 845, 846, 852, 855, 856, 857, 858, 865, 876, 884, or 887, or combinations thereof, wherein the amino acid positions are relative to the reference sequence corresponding to residues 8 to 890 of SEQ ID NO: 4, 26, 424,548, 896, 1030, 1036, 1742, or 1838, or relative to the reference sequence corresponding to SEQ ID NO: 4, 26,424,548, 896, 1030, 1036, 1742, or 1838.

[0437] In some embodiments, the recombinant polynucleotide comprises a polynucleotide sequence encoding an engineered RNA polymerase comprising an amino acid sequence comprising at least a substitution at amino acid position 136, 150, 195, 206, 207, 246, 250, 337, 340, 347, 352, 359, 399, 419, 425, 456, 531, 550, 574, 588, 601, 614, 616, 640, 645, 648, 649, 694, 720, 779, 782, 793, 796, 800, 839, 841, 841, 856, 865, 876, or 884, or combinations thereof, wherein the amino acid positions are relative to the reference sequence corresponding to residues 8 to 890 of SEQ ID NO: 4, 26, 424,548, 896, 1030, 1036, 1742, or 1838, or relative to the reference sequence corresponding to SEQ ID NO: 4, 26, 424,548, 896, 1030, 1036, 1742, or 1838.

[0438] In some embodiments, the recombinant polynucleotide comprises a polynucleotide sequence encoding an engineered RNA polymerase comprising an amino acid sequence having at least 70%, 75%, 80%, 81%, 82%, 83%, 84%, 85%, 86%, 87%, 88%, 89%, 90%, 91%, 92%, 93%, 94%, 95%, 96%, 97%, 98%, 99%, or more sequence identity to the reference sequence corresponding to residues 8 to 890 of SEQ ID NO: 4, or to the reference sequence corresponding to SEQ ID NO: 4, wherein the amino acid sequence comprises one or more substitutions relative to the reference sequence corresponding to residues 8 to 890 of SEQ ID NO: 4, or relative to the reference sequence corresponding to SEQ ID NO: 4.

[0439] In some embodiments, the recombinant polynucleotide comprises a polynucleotide sequence encoding an engineered RNA polymerase comprising an amino acid sequence having at least 70%, 75%, 80%, 81%, 82%, 83%, 84%, 85%, 86%, 87%, 88%, 89%, 90%, 91%, 92%, 93%, 94%, 95%, 96%, 97%, 98%, 99%, or more sequence identity to a reference sequence corresponding to residues 8 to 890 of an even-numbered SEQ ID NO. of SEQ ID NOs: 14-250, or to a reference sequence corresponding to an even-numbered SEQ ID NO. of SEQ ID NOs: 14-250, wherein the amino acid sequence comprises one or more substitutions relative to the reference sequence corresponding to residues 8 to 890 of SEQ ID NO: 4, or relative to the reference sequence corresponding to SEQ ID NO: 4.

[0440] In some embodiments, the recombinant polynucleotide comprises a polynucleotide sequence encoding an engineered RNA polymerase comprising an amino acid sequence comprising at least a substitution or substitution set at amino acid positions(s) 839/841, 884/887, 694, 588, 541, 852, 645, 582, 657, 574, 456, 563, 865, 720, 528, 601, 690, 614, 550, 187, 57, 168,531, 347, 18, 527,197, 76/537, 171, 418, 579, 696, 77, 337, 11, 200,186, 64/296, 724, 198, 13, 529,419, 593, 164, 535, 464, 607, 59, 23, 747, 169, 71, 160,195, 78, 612,537, 74, 167,192, 64, 648,193, 12, 254,182, 189, 511, 278, 45, 67, 25, 41, 183,202, 858, 76, 82, 82/178, 340, 179, 61, 505,784, 686, 477, 327, 184, 319, or 668, wherein the amino acid positions are relative to the reference sequence corresponding to residues 8 to 890 of SEQ ID NO: 4, or relative to the reference sequence corresponding to SEQ ID NO: 4.

[0441] In some embodiments, the recombinant polynucleotide comprises a polynucleotide sequence encoding an engineered RNA polymerase comprising an amino acid sequence having at least 70%, 75%, 80%, 81%, 82%, 83%, 84%, 85%, 86%, 87%, 88%, 89%, 90%, 91%, 92%, 93%, 94%, 95%, 96%, 97%, 98%, 99%, or more sequence identity to the reference sequence corresponding to residues 8 to 890 of SEQ ID NO: 26, or to the reference sequence corresponding to SEQ ID NO: 26, wherein the amino acid sequence comprises one or more substitutions relative to the reference sequence corresponding to residues 8 to 890 of SEQ ID NO: 26, or relative to the reference sequence corresponding to SEQ ID NO: 26.

[0442] In some embodiments, the recombinant polynucleotide comprises a polynucleotide sequence encoding an engineered RNA polymerase comprising an amino acid sequence having at least 70%, 75%, 80%, 81%, 82%, 83%, 84%, 85%, 86%, 87%, 88%, 89%, 90%, 91%, 92%, 93%, 94%, 95%, 96%, 97%, 98%, 99%, or more sequence identity to a reference sequence corresponding to residues 8 to 890 of an even-numbered SEQ ID NO. of SEQ ID NOs: 252-540, or to a reference sequence corresponding to an even-numbered SEQ ID NO. of SEQ ID NOs: 252-540, wherein the amino acid sequence comprises one or more substitutions relative to the reference sequence corresponding to residues 8 to 890 of SEQ ID NO: 26, or relative to the reference sequence corresponding to SEQ ID NO: 26.

[0443] In some embodiments, the recombinant polynucleotide comprises a polynucleotide sequence encoding the engineered RNA polymerase comprising an amino acid sequence comprising at least a substitution or substitution set at amino acid positions(s) 622, 831, 598, 419, 198, 588, 21, 579/704, 190, 197, 57, 189,187, 195, 181, 191, 188, 164, 169, 184, 171, 186, 527, 177, 66, 78/565, 172, 161, 193, 593, 668, 18, 67, 170,286, 61, 60, 183,456, 179, 194, 468, 720, 534, 601, 56, 122, 84, 418, 34/526, 701, 530, 59, 260, 82, 413,605, 54, or 256, wherein the amino acid positions are relative to the reference sequence corresponding to residues 8 to 890 of SEQ ID NO: 26, or relative to the reference sequence corresponding to SEQ ID NO: 26.

[0444] In some embodiments, the recombinant polynucleotide comprises a polynucleotide sequence encoding the engineered RNA polymerase comprising an amino acid sequence comprising at least a substitution or substitution set at amino acid positions(s) 337/456/574/601/614/694/720, 197/200/418/550/574/614/690/694, 197/200/337/347/456/550/563/720, 456/563/574/694/720, 171/197/200/456/574/694, 197/347/418/456/574/690, 200/418/456/531/574/614, 418/574, 11/77/200/574, 11/200/347/456/694/720, 11/200/456/574, 171/200/531/582/601/614/720, 456/531/574/690, 13/337/456/550, 11/200/337/456, 77/171/347/456, 13/337/527/550/563/574/601, 197/200/531/550/694, 77/197/200/456/550, 77/197/456/531/574/614/690, 77/200/347/574, 13/200/347/456/720, 13/77/531/574/720, 601/614/694, 13/418/456/694/720, 15/77/200/337/456/550/574/601/614/690/720, 13/550/690, 77/456/550, 77/337/347/550/574, 200/347/456/694, 197/337/347/456/531/574, 13/456/528, 200/337/456/690, 197/337/527/574/601, 197/456/579/614, 13/720, 197/200/418/574/694, 197/200/601, 197/347/418/574, 347/601/694, 550/690, 200/418/550, 200/347, 77/171/197, 77/531/574, 77/171/720, 197/527, 200, 197/200/418/601, 11/531/582, 13/197/200/418/694, 13/77/200/418/456, 77/456/582, 11/690, 11/200, 11/456/531/616, 77/574, 200/531/690, or 337/418/531/574/690, wherein the amino acid positions are relative to the reference sequence corresponding to residues 8 to 890 of SEQ ID NO: 26, or relative to the reference sequence corresponding to SEQ ID NO: 26.

[0445] In some embodiments, the recombinant polynucleotide comprises a polynucleotide sequence encoding an engineered RNA polymerase comprising an amino acid sequence having at least 70%, 75%, 80%, 81%, 82%, 83%, 84%, 85%, 86%, 87%, 88%, 89%, 90%, 91%, 92%, 93%, 94%, 95%, 96%, 97%, 98%, 99%, or more sequence identity to the reference sequence corresponding to residues 8 to 890 of SEQ ID NO: 424, or to the reference sequence corresponding to SEQ ID NO: 424, wherein the amino acid sequence comprises one or more substitutions relative to the reference sequence corresponding to residues 8 to 890 of SEQ ID NO: 424, or relative to the reference sequence corresponding to SEQ ID NO: 424.

[0446] In some embodiments, the recombinant polynucleotide comprises a polynucleotide sequence encoding an engineered RNA polymerase comprising an amino acid sequence having at least 70%, 75%, 80%, 81%, 82%, 83%, 84%, 85%, 86%, 87%, 88%, 89%, 90%, 91%, 92%, 93%, 94%, 95%, 96%, 97%, 98%, 99%, or more sequence identity to the reference sequence corresponding to residues 8 to 890 of an even-numbered SEQ ID NO. of SEQ ID NOs: 542-862, or to the reference sequence corresponding to an even-numbered SEQ ID NO. of SEQ ID NOs: 542-862, wherein the amino acid sequence comprises one or more substitutions relative to the reference sequence corresponding to residues 8 to 890 of SEQ ID NO: 424, or relative to the reference sequence corresponding to SEQ ID NO: 424.

[0447] In some embodiments, the recombinant polynucleotide comprises a polynucleotide sequence encoding an engineered RNA polymerase comprising an amino acid sequence comprising at least a substitution or substitution set at amino acid positions(s) 541/622/723, 541/588/865, 839, 195/347/531/550/588, 419/723, 172/184/550/588, 184/195/347/418/550/588, 171/184/347/531/550, 171/184/347/418/531/550/588, 169/541/588/865, 841, 839/841, 171/347/418/550, 171/184/347/418/588, 195/563/588, 187/195/531/550/588, 347/550/588, 541/865, 347/531/563/588, 419/541/865, 187/347/418/531/550, 169/419, 187/347/531/588, 186/347/550/588, 563/588, 184/418/550/588, 723, 172/418/550/588, 171/186/418/550/588, 347/550/563, 622, 541/723, 419/541/839/841, 171/418/531/550, 171/531/588, 186/347/588, 531/550/563, 171/186/531/550, 187/550, 171/418/531/563/588, 195/550, 347/418/550/588, 171/187/588, 187/347/531/550, 184/531/550, 171/184/418/563/588, 195/588, 169/622/723, 187/588, 184/550/588, 169/189/622, 187/418/550, 588, 531/563/588, 418/563/588, 531/588, 172/184/531/550, 191/531/588, 347/418/550, 563, 172/197/347/588, 172/184/347/418/531/563, 171/195/347/418/588, 171/588, 171/187/550, 171/184/347/418/563, 347/531/588, 172/186/187/531/563/588, 550, 531/550, 172/588, 195/418/550, 195/347/418/531/563, 171/195/550, 181/418/563, 184/347/563/579, 200/347/418, 172/195/550, 197/347/418/563, 171/563, 531/563, 191/418/531/550, 172/195/531/588, 347/531/563, 169/181/198/723/865, 171/418/588, 184/418/588, 541, 418/550, 172/347/531/588, 172/187/550, 169/181/190/419, 723/841, 347/418/563, 186/197/200/550, 347/550, 172/200/588, 186/563, 172/186/347/531/588, 172/184/418/588, 171/347/418/563, 184/200, 172/347/418/588, 198/419/541, 171/187/418/563, 171/184/588, 184/347/588, 172/531/563, 184/195, 186/347, 418/531/550, 169/419/541, 184/197/418/531, 169/541, 169/197/198, 169/419, 184/418, 171/187/531, 171/184/347/531, 184, 197/347/531, 419, 197, 195/418, 171/347/531, 171/186/347/418/563, 184/347/418, 171/186/347/418, 186/347/418/531, 172/184/347/418, 184/195/347/418, 171/418/531, 419/622, 347/418/588, 171/531, 172/197/200/531, 347, 172/186/200/347/418/563, 184/200/418, 171/195/531, 184/197/347, 200/347, 171, 172, 171/347/418, 198/419, 347/531, 200, 531, 171/184, 169, or 189/418/419/541, wherein the amino acid positions are relative to the reference sequence corresponding to residues 8 to 890 of SEQ ID NO: 424, or relative to the reference sequence corresponding to SEQ ID NO: 424.

[0448] In some embodiments, the recombinant polynucleotide comprises a polynucleotide sequence encoding an engineered RNA polymerase comprising an amino acid sequence having at least 70%, 75%, 80%, 81%, 82%, 83%, 84%, 85%, 86%, 87%, 88%, 89%, 90%, 91%, 92%, 93%, 94%, 95%, 96%, 97%, 98%, 99%, or more sequence identity to the reference sequence corresponding to residues 8 to 890 of SEQ ID NO: 548, or to the reference sequence corresponding to SEQ ID NO: 548, wherein the amino acid sequence comprises one or more substitutions relative to the reference sequence corresponding to residues 8 to 890 of SEQ ID NO: 548, or relative to the reference sequence corresponding to SEQ ID NO: 548.

[0449] In some embodiments, the recombinant polynucleotide comprises a polynucleotide sequence encoding an engineered RNA polymerase comprising an amino acid sequence having at least 70%, 75%, 80%, 81%, 82%, 83%, 84%, 85%, 86%, 87%, 88%, 89%, 90%, 91%, 92%, 93%, 94%, 95%, 96%, 97%, 98%, 99%, or more sequence identity to the reference sequence corresponding to residues 8 to 890 of an even-numbered SEQ ID NO. of SEQ ID NOs: 864-1004, or to the reference sequence corresponding to an even-numbered SEQ ID NO. of SEQ ID NOs: 864-1004, wherein the amino acid sequence comprises one or more substitutions relative to the reference sequence corresponding to residues 8 to 890 of SEQ ID NO: 548, or relative to the reference sequence corresponding to SEQ ID NO: 548.

[0450] In some embodiments, the recombinant polynucleotide comprises a polynucleotide sequence encoding an engineered RNA polymerase comprising an amino acid sequence comprising at least a substitution or substitution set at amino acid positions(s) 184/418/419/622/723/865, 419/723/839/841/865, 419/839, 477, 832, 418/419/839/841, 418/419/723/839, 184/419/723/839, 184/418/419/839, 418/839, 419/865, 622/723, 419/723, 418/419/723, 419/839/841/865, 622/839, 839, 171/839/841, 171/419/839/841, 419/839/865, 184/418/622/839/865, 419/622/839/841, 184/418/419/622/839/865, 184/419/622/723, 418/419/622, 180, 185, 184/419/622, 496, 184/622/865, 171/184/418/419/839/841, 171/184/418/419/622/839, 60, 419/622/839, 171/184/419/622/839/841, 418/723/841, 839/841, 483, 865, 418/723/841/865, 419, 307, 419/841/865, 169/418/419/839, 419/841, 420, 495, 416, 857, 499, 41, 30, 75, 26, 670, or 269, wherein the amino acid positions are relative to the reference sequence corresponding to residues 8 to 890 of SEQ ID NO: 548, or relative to the reference sequence corresponding to SEQ ID NO: 548.

[0451] In some embodiments, the recombinant polynucleotide comprises a polynucleotide sequence encoding an engineered RNA polymerase comprising an amino acid sequence having at least 70%, 75%, 80%, 81%, 82%, 83%, 84%, 85%, 86%, 87%, 88%, 89%, 90%, 91%, 92%, 93%, 94%, 95%, 96%, 97%, 98%, 99%, or more sequence identity to the reference sequence corresponding to residues 8 to 890 of SEQ ID NO: 896, or to the reference sequence corresponding to SEQ ID NO: 896, wherein the amino acid sequence comprises one or more substitutions relative to the reference sequence corresponding to residues 8 to 890 of SEQ ID NO: 896, or relative to the reference sequence corresponding to SEQ ID NO: 896.

[0452] In some embodiments, the recombinant polynucleotide comprises a polynucleotide sequence encoding an engineered RNA polymerase comprising an amino acid sequence having at least 70%, 75%, 80%, 81%, 82%, 83%, 84%, 85%, 86%, 87%, 88%, 89%, 90%, 91%, 92%, 93%, 94%, 95%, 96%, 97%, 98%, 99%, or more sequence identity to the reference sequence corresponding to residues 8 to 890 of an even-numbered SEQ ID NO. of SEQ ID NOs: 1006-1156, or to the reference sequence corresponding to an even-numbered SEQ ID NO. of SEQ ID NOs: 1006-1156, wherein the amino acid sequence comprises one or more substitutions relative to the reference sequence corresponding to residues 8 to 890 of SEQ ID NO: 896, or relative to the reference sequence corresponding to SEQ ID NO: 896.

[0453] In some embodiments, the recombinant polynucleotide comprises a polynucleotide sequence encoding an engineered RNA polymerase comprising an amino acid sequence comprising at least a substitution or substitution set at amino acid positions(s) 246/399/517/607/782/856/876, 517/640/670/720/779/782, 246/751/779/782, 404/607/856/876, 246/517/664/751/779, 640/664/779/782, 399/517/664/856/876, 246/379/399/517/751, 404/517/640/664/751/793/876, 517/640/670/720/751/779/782, 517/876, 135/340, 246/399/640/720/779/782/793/856/876, 340, 246/340, 664/720/779/782/793/856, 399/404/517/670/779/782/876, 379/517/640, 136/246/340, 404/751/779/782, 404/517/640/664/720/793, 379/517/640/779/782/793/856/876, 399/404/664/670/720/751/779/782, 640/793, 136/340/379, 15/246/535/607/664, 517/664/720, 517/607/856, 517/664/720/779, 135/416, 517/664/720/779/782/856, 135/136, 856, 135/136/340/375/379, 340/399, 399/664/720/751/793/810/856, 246/404/645/664/720/782/856/876, 379, 246/517/607, 246/664, 517, 7/135/136/340/379/416, 246/517/751/856, 517/670/720/751/779/782/856, 135/136/340, 640/664/751/856/876, 399/404/517/779/782, 640/779/782/856, 136/246, 399/404/517, 246/340/416, 517/664/751/856, 404/640/664, 246/517/751/779/782/856, 399/517/664/856, 404/517/664/720/782, 135/364, 517/607/640/664/720/779/782/856, 136/364/399/404, 136/340, 399/404/517/720/876, 404/416/517/640/645/720/751/779/782, 246/416, 136, 136/340/399, 416, 135/195/246/340/379, 246/340/364, 340/379/399, 399/404/416/517/607, 404/517/664/720, 517/640/751/756, or 517/607/640/645/664/720/751/779, wherein the amino acid positions are relative to the reference sequence corresponding to residues 8 to 890 of SEQ ID NO: 896, or relative to the reference sequence corresponding to SEQ ID NO: 896.

[0454] In some embodiments, the recombinant polynucleotide comprises a polynucleotide sequence encoding an engineered RNA polymerase comprising an amino acid sequence having at least 70%, 75%, 80%, 81%, 82%, 83%, 84%, 85%, 86%, 87%, 88%, 89%, 90%, 91%, 92%, 93%, 94%, 95%, 96%, 97%, 98%, 99%, or more sequence identity to the reference sequence corresponding to residues 8 to 890 of SEQ ID NO: 1030, or to the reference sequence corresponding to SEQ ID NO: 1030, wherein the amino acid sequence comprises one or more substitutions relative to the reference sequence corresponding to residues 8 to 890 of SEQ ID NO: 1030, or relative to the reference sequence corresponding to SEQ ID NO: 1030.

[0455] In some embodiments, the recombinant polynucleotide comprises a polynucleotide sequence encoding an engineered RNA polymerase comprising an amino acid sequence having at least 70%, 75%, 80%, 81%, 82%, 83%, 84%, 85%, 86%, 87%, 88%, 89%, 90%, 91%, 92%, 93%, 94%, 95%, 96%, 97%, 98%, 99%, or more sequence identity to the reference sequence corresponding to residues 8 to 890 of an even-numbered SEQ ID NO. of SEQ ID NOs: 1158-1728, or to the reference sequence corresponding to an even-numbered SEQ ID NO. of SEQ ID NOs: 1158-1728, wherein the amino acid sequence comprises one or more substitutions relative to the reference sequence corresponding to residues 8 to 890 of SEQ ID NO: 1030, or relative to the reference sequence corresponding to SEQ ID NO: 1030.

[0456] In some embodiments, the recombinant polynucleotide comprises a polynucleotide sequence encoding an engineered RNA polymerase comprising an amino acid sequence comprising at least a substitution set at amino acid positions 60/135/185/420/483/499/832/857, 41/60/135/180/185/420/499/832, 135/136/185/416/420, 135/136/185/307/420/832/857, 135/136/180/185/307/477/832, 60/135/180/185/420/832, 60/135/136/180/185/832, 41/180/185/832/857, 185/307/416/832/857, 41/104/180/185/307/857, 41/135/136/180/185/420/477/832/857, 41/135/185/420/477/832, 41/135/180/185/416/477/832, 794, 41/60/136/185/416/420/477, 41/135/136/185/477/857, 185/477/832, 60/135/136/180/416/420/477/709/832, 135/136/180/185/416/420/832, 135/136/185/416/420/832, 41/135/136/185/307/420/483, 41/136/180/185/307/416/420/483/832/857, 41/185/420/483/832, 41/185/420/794, 185/416/420/832, 135/180/185/420/477/495/794/832, 135/136/185/416/420/794, 41/60/185/416, 41/136/180/307/416/420/832/857, 180/185/416/420/832, 41/180/185/420/477/496/857, 41/60/135/180/185/420/483/496, 41/180/185/307/416/420/832/857, 41/136/185/416/420/477/857, 135/136/180/185/416/832, 41/60/135/136/180/185/416/420/496/832/857, 41/135/136/185/477, 41/135/180/477, 41/180/185/416/420/832, 60/185/477/857, 41/832, 41/180/185/477/483/794/857, 41/136/416/420/483/832, 41/185/416/420/832, 41/136/180/185/420/477/857, 307/794, 60/135/136/185/420/857, 60/135/136/185/416, 180/307/420/832, 136/180/185/416, 41/60/180/185, 41/180/185/477/794, 41/185/794/857, 41/136, 41/60/185/857, 60/135/180/185/794, or 135/136/180/416/857, wherein the amino acid positions are relative to the reference sequence corresponding to residues 8 to 890 of SEQ ID NO: 1030, or relative to the reference sequence corresponding to SEQ ID NO: 1030.

[0457] In some embodiments, the recombinant polynucleotide comprises a polynucleotide sequence encoding an engineered RNA polymerase comprising an amino acid sequence comprising at least a substitution set at amino acid positions 132/246/399/640/720/779/782/793/856/876, 134/399/640/720/779/782/793/856/876, 134/246/640/720/779/782/793/856/876, 246/399/640/655/720/779/782/793/856/876, 246/387/399/640/720/779/782/793/856/876, 246/370/399/640/720/779/782/793/856/876, 246/357/399/640/720/779/782/793/856/876, 246/399/635/640/720/779/782/793/856/876, 246/327/399/640/720/779/782/793/856/876, 246/296/399/640/720/779/782/793/856/876, 246/399/640/720/779/782/793/856/876, 246/309/399/640/720/779/782/793/856/876, 246/399/640/720/723/779/782/793/856/876, 399/640/664/720/779/782/793/856/876, 246/378/399/640/720/779/782/793/856/876, 246/399/640/691/720/779/782/793/856/876, 133/246/379/399/640/720/779/782/793/856/876, 246/310/399/640/720/779/782/793/856/876, 246/399/462/640/720/779/782/793/856/876, 246/399/502/640/720/779/782/793/856/876, 246/399/629/640/720/779/782/793/856/876, 246/399/499/640/720/779/782/793/856/876, 246/399/582/640/720/779/782/793/856/876, 399/640/720/779/782/793/856/876, 246/399/418/640/720/779/782/793/856/876, 246/399/489/640/720/779/782/793/856/876, 246/389/399/640/720/779/782/793/856/876, 246/399/494/640/720/779/782/793/856/876, 246/394/399/640/720/779/782/793/856/876, 399/640/720/751/779/782/793/856/876, 246/399/498/640/720/779/782/793/856/876, 246/399/616/640/720/779/782/793/856/876, 246/399/403/640/720/779/782/793/856/876, 246/399/613/640/720/779/782/793/856/876, 246/352/399/640/720/779/782/793/856/876, 246/399/529/640/720/779/782/793/856/876, 223/246/399/640/720/779/782/793/856/876, 246/379/399/640/720/779/782/793/856/876, 246/399/573/640/720/779/782/793/856/876, 246/336/399/640/720/779/782/793/856/876, 246/399/484/640/720/779/782/793/856/876, 246/399/640/672/720/779/782/793/856/876, 246/386/399/640/720/779/782/793/856/876, 246/399/640/720/725/779/782/793/856/876, 399/416/640/720/779/782/793/856/876, 246/399/598/640/720/779/782/793/856/876, 246/399/530/640/720/779/782/793/856/876, 246/399/491/640/720/779/782/793/856/876, 246/365/399/640/720/779/782/793/856/876, 246/399/640/720/724/779/782/793/856/876, 246/399/461/640/720/779/782/793/856/876, 246/399/615/640/720/779/782/793/856/876, 246/362/399/640/720/779/782/793/856/876, 246/359/399/640/720/779/782/793/856/876, 246/399/633/640/720/779/782/793/856/876, 246/302/399/640/720/779/782/793/856/876, 246/324/399/640/720/779/782/793/856/876, 133/246/399/640/720/779/782/793/856/876, 246/299/399/640/720/779/782/793/856/876, 246/399/640/675/720/779/782/793/856/876, 246/399/416/640/720/779/782/793/856/876, 246/399/405/640/720/779/782/793/856/876, 246/399/593/640/720/779/782/793/856/876, 246/640/720/779/782/793/856/876, 246/399/564/640/720/779/782/793/856/876, 246/399/590/640/720/779/782/793/856/876, 246/399/517/640/720/779/782/793/856/876, 246/399/622/640/720/779/782/793/856/876, 364/399/640/720/779/782/793/856/876, 246/399/626/640/720/779/782/793/856/876, 246/376/399/640/720/779/782/793/856/876, 246/399/625/640/720/779/782/793/856/876, 246/379/399/416/640/720/779/782/793/856/876, 246/350/399/640/720/779/782/793/856/876, 246/399/599/640/720/779/782/793/856/876, 246/399/600/640/720/779/782/793/856/876, 246/399/640/659/720/779/782/793/856/876, 246/399/425/640/720/779/782/793/856/876, 246/399/640/668/720/779/782/793/856/876, 246/399/640/720/730/779/782/793/856/876, 246/399/591/640/720/779/782/793/856/876, 246/343/399/640/720/779/782/793/856/876, 246/367/399/640/720/779/782/793/856/876, 246/399/640/720/779/782/793/846/856/876, 246/399/561/640/720/779/782/793/856/876, 246/372/399/640/720/779/782/793/856/876, 246/399/640/690/720/779/782/793/856/876, 246/399/455/640/720/779/782/793/856/876, 246/399/537/640/720/779/782/793/856/876, 246/399/583/640/720/779/782/793/856/876, 246/369/399/640/720/779/782/793/856/876, 246/399/640/720/779/782/793/876, 246/399/437/640/720/779/782/793/856/876, 246/340/640/720/779/782/793/856/876, 246/399/623/640/720/779/782/793/856/876, 246/399/464/640/720/779/782/793/856/876, 246/382/399/640/720/779/782/793/856/876, 246/399/579/640/720/779/782/793/856/876, 246/399/618/640/720/779/782/793/856/876, 246/399/514/640/720/779/782/793/856/876, 246/399/607/640/720/779/782/793/856/876, 340/399/640/720/779/782/793/856/876, 246/399/640/676/720/779/782/793/856/876, 246/399/640/720/751/779/782/793/856/876, 246/399/640/664/720/779/782/793/856/876, 136/399/640/720/779/782/793/856/876, 246/399/517/640/720/779/782/793/856, 246/399/410/640/720/779/782/793/856/876, 246/313/399/640/720/779/782/793/856/876, 246/364/399/640/720/779/782/793/856/876, 135/246/399/640/720/779/782/793/856/876, or 246/399/608/640/720/779/782/793/856/876, wherein the amino acid positions are relative to the reference sequence corresponding to residues 8 to 890 of SEQ ID NO: 1030, or relative to the reference sequence corresponding to SEQ ID NO: 1030.

[0458] In some embodiments, the recombinant polynucleotide comprises a polynucleotide sequence encoding an engineered RNA polymerase comprising an amino acid sequence comprising at least a substitution or substitution set at amino acid positions(s) 664, 352/357/359/378/633/672, 352/633, 357/370/387/394/625/725, 352/387/629, 357, 310/357/359/387/389/489/561/625, 310/357, 310/352/357/359/725, 352/357/362/561/725, 357/359/370, 352/378/403/561, 378/579/625/633/636, 357/359/378/394/403/725, 387/389/489/579/625, 352/378, 357/378/394, 357/625, 352/362/387/561, 310/357/359/387/672/725, 658, 310/352/359/561/579/625/691/725, 310/357/403, 310/352/403/579/629, 310/352/378/489/579/629/633, 625, 310/352/378/394/403/691/725, 310/357/359/403, 310/352/359/403/579/625, 310/352/370/579/625, 312, 310/352/625, 310/352/625/725, 310/357/394, 310/352, 725, 352/359, 308, 310/387/672, 310/359/370/625, 378/561, 370, 359/725, 237, 378, 352, 310, 370/691/770, 310/357/359/489/672, 357/359/579/691, 310/352/579, 352/370/625, 625/672, 310/357/359/394/489/561/625/725, 625/725, 310/625, 657, 352/359/394/579/672, 311, 359/370/579, 649, 489, 561, 370/378/489/691/725, 394/489/579/625, 98, 132,310/561/579/672, 309, 403/629, 315, 662, 650, 108, 359/625, 665, 310/394/489/579/633/691, 362/394/561/625, 310/378/691, 653, 307, 310/352/370/394/625/725, 663, 310/370/625, 352/394, 352/362/672, 101, 561/579/629/672/725, 352/625, 135, 668, 145, or 126, wherein the amino acid positions are relative to the reference sequence corresponding to residues 8 to 890 of SEQ ID NO: 1030, or relative to the reference sequence corresponding to SEQ ID NO: 1030.

[0459] In some embodiments, the recombinant polynucleotide comprises a polynucleotide sequence encoding an engineered RNA polymerase comprising an amino acid sequence having at least 70%, 75%, 80%, 81%, 82%, 83%, 84%, 85%, 86%, 87%, 88%, 89%, 90%, 91%, 92%, 93%, 94%, 95%, 96%, 97%, 98%, 99%, or more sequence identity to the reference sequence corresponding to residues 8 to 890 of SEQ ID NO: 1036, or to the reference sequence corresponding to SEQ ID NO: 1036, wherein the amino acid sequence comprises one or more substitutions relative to the reference sequence corresponding to residues 8 to 890 of SEQ ID NO: 1036, or relative to the reference sequence corresponding to SEQ ID NO: 1036.

[0460] In some embodiments, the recombinant polynucleotide comprises a polynucleotide sequence encoding an engineered RNA polymerase comprising an amino acid sequence having at least 70%, 75%, 80%, 81%, 82%, 83%, 84%, 85%, 86%, 87%, 88%, 89%, 90%, 91%, 92%, 93%, 94%, 95%, 96%, 97%, 98%, 99%, or more sequence identity to the reference sequence corresponding to residues 8 to 890 of SEQ ID NO: 1036, or to the reference sequence corresponding to SEQ ID NO: 1036, wherein the amino acid sequence comprises one or more substitutions relative to the reference sequence corresponding to residues 8 to 890 of SEQ ID NO: 1036, or relative to the reference sequence corresponding to SEQ ID NO: 1036.

[0461] In some embodiments, the recombinant polynucleotide comprises a polynucleotide sequence encoding an engineered RNA polymerase comprising an amino acid sequence comprising at least a substitution or substitution set at amino acid positions(s) 139/309/310/357/387, 135/139/357/359/387/655/658, 139/633, 145/237/250/378/648/649, 139/310/387/633/655/658, 144/237/648/649, 250/352/359/648/649, 237/378/648/649, 145/648/649, 135/139/352/655/658, 135/139/151, 310/655/658, 135/139/310, 126/237/648/649, 135/310/655/658, 144/145/359/633/648/649, 151/310/655/658, 237/250/308/378/633/648/649/663, 250/310/633, 308/310/633/655/725, 237/250, 357/633/648/649, 310/352/633/648, 308/655/658, 237/633, 139/308/310, 139/308/655/658/725, 145/250/308/310, 139/357/655/658, 633/655/658/725, 250/310, 237/250/650, 139/151/308/310/352/359/633, 310/357/359/633/658, 237/309/310, or 237/308/310/633, wherein the amino acid positions are relative to the reference sequence corresponding to residues 8 to 890 of SEQ ID NO: 1036, or relative to the reference sequence corresponding to SEQ ID NO: 1036.

[0462] In some embodiments, the recombinant polynucleotide comprises a polynucleotide sequence encoding an engineered RNA polymerase comprising an amino acid sequence having at least 70%, 75%, 80%, 81%, 82%, 83%, 84%, 85%, 86%, 87%, 88%, 89%, 90%, 91%, 92%, 93%, 94%, 95%, 96%, 97%, 98%, 99%, or more sequence identity to the reference sequence corresponding to residues 8 to 890 of SEQ ID NO: 1742, or to the reference sequence corresponding to SEQ ID NO: 1742, wherein the amino acid sequence comprises one or more substitutions relative to the reference sequence corresponding to residues 8 to 890 of SEQ ID NO: 1742, or relative to the reference sequence corresponding to SEQ ID NO: 1742.

[0463] In some embodiments, the recombinant polynucleotide comprises a polynucleotide sequence encoding an engineered RNA polymerase comprising an amino acid sequence having at least 70%, 75%, 80%, 81%, 82%, 83%, 84%, 85%, 86%, 87%, 88%, 89%, 90%, 91%, 92%, 93%, 94%, 95%, 96%, 97%, 98%, 99%, or more sequence identity to the reference sequence corresponding to residues 8 to 890 of an even-numbered SEQ ID NO. of SEQ ID NOs: 1802-1912, or to the reference sequence corresponding to an even-numbered SEQ ID NO. of SEQ ID NOs: 1802-1912, wherein the amino acid sequence comprises one or more substitutions relative to the reference sequence corresponding to residues 8 to 890 of SEQ ID NO: 1742, or relative to the reference sequence corresponding to SEQ ID NO: 1742.

[0464] In some embodiments, the recombinant polynucleotide comprises a polynucleotide sequence encoding an engineered RNA polymerase comprising an amino acid sequence comprising at least a substitution or substitution set at amino acid positions(s) 139/140/633/659/662/663/743/782/784/793, 129/132/150/206/207/209/357/425/541/778, 101/129/132/150/206/209/357/425/778, 132/150/206/207/311/357/778, 140/206/210/633/659/782, 140/206/659/663/782/784/855, 139/140/144/206/210/633/662/782/784/795, 139/206/210/633/659/662/663/784, 139/633/659/663/782/784, 140/206/210/663, 206/207/209/357/425/778, 139/140/144/662/782, 129/132/150/206/207/209/425/543, 139/140/206/210/633/659/782, 101/132/150/206/209/357/425/541, 139/206/210/662, 207/209/357/425/778, 132/425/541/778, 150/206/207/425, 132/206/207/778, 139/659/662/782/784, 140/662/782, 206/210/633/659, 139/210/633/662/782, 139/206/210/659/663, 129/132/150/204/207/357, 139/144/659/662/782, 129/132/150/206/207/209/235/357/778, 206/210/633/795, 778, 662/663/782, 132/206/207/209/357/425/541/778, 129/132/207/235/425/778, 132/150/206, 140/206/210/662/663, 425/541/778, 139/206/659/663/782/795, 101/132/150/425/541/778, 139/144/659/782, 140, 659, 150/206/209/235/357/543/778, 101/132/206/209/543/778, 132/204/206/357/778, 129/132/150/206/207/209/543, 139/144/659/662/663/782/793, 357/778, 139/140/206/210/633/659/663, 129/132/235/357/541, 129/132/311/357/541, 101/129/132/206/209/778, 101/132/206/209, 140/659/663, 206/210/633/662/663, 140/144/659/663/743, or 139/140/633/659/662, wherein the amino acid positions are relative to the reference sequence corresponding to residues 8 to 890 of SEQ ID NO: 1742, or relative to the reference sequence corresponding to SEQ ID NO: 1742.

[0465] In some embodiments, the recombinant polynucleotide comprises a polynucleotide sequence encoding an engineered RNA polymerase comprising an amino acid sequence having at least 70%, 75%, 80%, 81%, 82%, 83%, 84%, 85%, 86%, 87%, 88%, 89%, 90%, 91%, 92%, 93%, 94%, 95%, 96%, 97%, 98%, 99%, or more sequence identity to the reference sequence corresponding to residues 8 to 890 of SEQ ID NO: 1838, or to the reference sequence corresponding to SEQ ID NO: 1838, wherein the amino acid sequence comprises one or more substitutions relative to the reference sequence corresponding to residues 8 to 890 of SEQ ID NO: 1838, or relative to the reference sequence corresponding to SEQ ID NO: 1838.

[0466] In some embodiments, the recombinant polynucleotide comprises a polynucleotide sequence encoding an engineered RNA polymerase comprising an amino acid sequence having at least 70%, 75%, 80%, 81%, 82%, 83%, 84%, 85%, 86%, 87%, 88%, 89%, 90%, 91%, 92%, 93%, 94%, 95%, 96%, 97%, 98%, 99%, or more sequence identity to the reference sequence corresponding to residues 8 to 890 of an even-numbered SEQ ID NO. of SEQ ID NOs: 1914-2018, or to the reference sequence corresponding to an even-numbered SEQ ID NO. of SEQ ID NOs: 1914-2018, wherein the amino acid sequence comprises one or more substitutions relative to the reference sequence corresponding to residues 8 to 890 of SEQ ID NO: 1838, or relative to the reference sequence corresponding to SEQ ID NO: 1838.

[0467] In some embodiments, the recombinant polynucleotide comprises a polynucleotide sequence encoding the engineered RNA polymerase comprising an amino acid sequence comprising at least a substitution or substitution set at amino acid positions(s) 473, 696, 450, 397/771, 397, 402, 378, 396, 841, 289, 388, 514, 474, 406, 357, 170/474, 761, 855, 367, 708, 407, 324, 345, 478, 513, 404, 390, 398, 715, 709, 399, 327, 438, 410, 76, 389,517, 274, 693, 553, 401, or 470, wherein the amino acid positions are relative to the reference sequence corresponding to residues 8 to 890 of SEQ ID NO: 1838, or relative to the reference sequence corresponding to SEQ ID NO: 1838.

[0468] In some embodiments, the recombinant polynucleotide comprises a polynucleotide sequence encoding an engineered RNA polymerase comprising an amino acid sequence comprising at least a substitution at an amino acid position set forth in Tables 8.1, 9.1, 10.1, 10.2, 11.1, 12.1, 13.1, 14.1, 15.1, 16.1, 17.1, and 18.1, wherein the amino acid positions are relative to the reference sequence corresponding to residues 8 to 890 of SEQ ID NO: 2, 4, 26, 424,548, 896, 1030, 1036, 1742, or 1838, or relative to the reference sequence corresponding to SEQ ID NO: 2, 4, 26, 424,548, 896, 1030, 1036, 1742, or 1838.

[0469] In some embodiments, the recombinant polynucleotide comprises a polynucleotide sequence encoding an engineered RNA polymerase comprising an amino acid sequence comprising at least one substitution set forth in Tables 8.1, 9.1, 10.1, 10.2, 11.1, 12.1, 13.1, 14.1, 15.1, 16.1, 17.1, and 18.1, wherein the amino acid positions are relative to the reference sequence corresponding to residues 8 to 890 of SEQ ID NO: 2, 4, 26, 424,548, 896, 1030, 1036, 1742, or 1838, or relative to the reference sequence corresponding to SEQ ID NO: 2, 4, 26, 424,548, 896, 1030, 1036, 1742, or 1838.

[0470] In some embodiments, the recombinant polynucleotide comprises a polynucleotide sequence encoding an engineered RNA polymerase comprising at least a substitution or substitution set at the amino acid position(s) set forth in Tables 8.1, 9.1, 10.1, 10.2, 11.1, 12.1, 13.1, 14.1, 15.1, 16.1, 17.1, and 18.1, wherein the amino acid positions are relative to the reference sequence corresponding to residues 8 to 890 of SEQ ID NO: 2, 4, 26, 424,548, 896, 1030, 1036, 1742, or 1838, or relative to the reference sequence corresponding to SEQ ID NO: 2, 4, 26, 424,548, 896, 1030, 1036, 1742, or 1838.

[0471] In some embodiments, the recombinant polynucleotide comprises a polynucleotide sequence encoding an engineered RNA polymerase comprising at least a substitution or substitution set of an engineered RNA polymerase set forth in Tables 8.1, 9.1, 10.1, 10.2, 11.1, 12.1, 13.1, 14.1, 15.1, 16.1, 17.1, and 18.1, wherein the amino acid positions are relative to the reference sequence corresponding to residues 8 to 890 of SEQ ID NO: 2, 4, 26, 424,548, 896, 1030, 1036, 1742, or 1838, or relative to the reference sequence corresponding to SEQ ID NO: 2, 4, 26, 424,548, 896, 1030, 1036, 1742, or 1838.

[0472] In some embodiments, the recombinant polynucleotide comprises a polynucleotide sequence encoding an engineered RNA polymerase comprising an amino acid sequence having at least 70%, 75%, 80%, 81%, 82%, 83%, 84%, 85%, 86%, 87%, 88%, 89%, 90%, 91%, 92%, 93%, 94%, 95%, 96%, 97%, 98%, 99% or more sequence identity to a reference sequence having a substitution or substitution set as set forth in Tables 8.1, 9.1, 10.1, 10.2, 11.1, 12.1, 13.1, 14.1, 15.1, 16.1, 17.1, and 18.1, wherein the amino acid positions are relative to the reference sequence corresponding to residues 8 to 890 of SEQ ID NO: 2, 4, 26, 424,548, 896, 1030, 1036, 1742, or 1838, or relative to the reference sequence corresponding to SEQ ID NO: 2, 4, 26, 424,548, 896, 1030, 1036, 1742, or 1838.

[0473] In some embodiments, the recombinant polynucleotide comprises a polynucleotide sequence encoding an engineered RNA polymerase comprising an amino acid sequence comprising residues 8 to 890 of an even numbered SEQ ID NO. of SEQ ID NOs: 2-2018, or comprising an even numbered SEQ ID NO. of SEQ ID NOs: 2-2018.

[0474] In some embodiments, the recombinant polynucleotide comprises a polynucleotide sequence encoding an engineered RNA polymerase comprising an amino acid sequence comprising residues 8 to 890 of SEQ ID NO: 2, 4, 6, 8, 10, 12, 14, 16, 18, 20, 22, 24, 26, 28, 30, 32, 34, 36, 38, 40, 42, 44, 46, 48, 50, 52, 54, 56, 58, 60, 62, 64, 66, 68, 70, 72, 74, 76, 78, 80, 82, 84, 86, 88, 90, 92, 94, 96, 98,100,102, 104, 106, 108, 110, 112, 114, 116, 118, 120, 122, 124, 126, 128, 130, 132, 134, 136, 138, 140, 142, 144, 146, 148, 150, 152, 154, 156, 158, 160, 162, 164, 166, 168, 170, 172, 174, 176, 178, 180, 182, 184, 186, 188, 190, 192, 194, 196, 198, 200, 202, 204, 206, 208, 210, 212, 214, 216, 218, 220, 222, 224, 226, 228, 230, 232, 234, 236, 238, 240, 242, 244, 246, 248, 250, 252, 254, 256, 258, 260, 262, 264, 266, 268, 270, 272, 274, 276, 278, 280, 282, 284, 286, 288, 290, 292, 294, 296, 298, 300, 302, 304, 306, 308, 310, 312, 314, 316, 318, 320, 322, 324, 326, 328, 330, 332, 334, 336, 338, 340, 342, 344, 346, 348, 350, 352, 354, 356, 358, 360, 362, 364, 366, 368, 370, 372, 374, 376, 378, 380, 382, 384, 386, 388, 390, 392, 394, 396, 398, 400, 402, 404, 406, 408, 410, 412, 414, 416, 418, 420, 422, 424, 426, 428, 430, 432, 434, 436, 438, 440, 442, 444, 446, 448, 450, 452, 454, 456, 458, 460, 462, 464, 466, 468, 470, 472, 474, 476, 478, 480, 482, 484, 486, 488, 490, 492, 494, 496, 498, 400, 402, 404, 406, 408, 410, 412, 414, 416, 418, 420, 422, 424, 426, 428, 430, 432, 434, 436, 438, 440, 442, 444, 446, 448, 450, 452, 454, 456, 458, 460, 462, 464, 466, 468, 470, 472, 474, 476, 478, 480, 482, 484, 486, 488, 490, 492, 494, 496, 498, 500, 502, 504, 506, 508, 510, 512, 514, 516, 518, 520, 522, 524, 526, 528, 530, 532, 534, 536, 538, 540, 542, 544, 546, 548, 550, 552, 554, 556, 558, 560, 562, 564, 566, 568, 570, 572, 574, 576, 578, 580, 582, 584, 586, 588, 590, 592, 594, 596, 598, 600, 602, 604, 606, 608, 610, 612, 614, 616, 618, 620, 622, 624, 626, 628, 630, 632, 634, 636, 638, 640, 642, 644, 646, 648, 650, 652, 654, 656, 658, 660, 662, 664, 666, 668, 670, 672, 674, 676, 678, 680, 682, 684, 686, 688, 690, 692, 694, 696, 698, 700, 702, 704, 706, 708, 710, 712, 714, 716, 718, 720, 722, 724, 276, 728, 730, 732, 734, 736, 738, 740, 742, 744, 746, 748, 750, 752, 754, 756, 758, 760, 762, 764, 766, 768, 770, 772, 774, 776, 778, 780, 782, 784, 786, 788, 790, 792, 794, 796, 798, 800, 802, 804, 806, 808, 810, 812, 814, 816, 818, 820, 822, 824, 826, 828, 830, 832, 834, 836, 838, 840, 842, 844, 846, 848, 850, 852, 854, 856, 858, 860, 862, 864, 866, 868, 870, 872, 874, 876, 878, 880, 882, 884, 886, 888, 890, 892, 894, 896, 898, 900, 902, 904, 906, 908, 910, 912, 914, 916, 918, 920, 922, 924, 926, 928, 930, 932, 934, 936, 938, 940, 942, 944, 946, 948, 950, 952, 954, 956, 958, 960, 962, 964, 966, 968, 970, 972, 974, 976, 978, 980, 982, 984, 986, 988, 990, 992, 994, 996, 998, 1000, 1002, 1004, 1006, 1008, 1010, 1012, 1014, 1016, 1018, 1020, 1022, 1024, 1026, 1028, 1030, 1032, 1034, 1036, 1038, 1040, 1042, 1044, 1046, 1048, 1050, 1052, 1054, 1056, 1058, 1060, 1062, 1064, 1066, 1068, 1070, 1072, 1074, 1076, 1078, 1080, 1082, 1084, 1086, 1088, 1090, 1092, 1094, 1096, 1098, 1100, 1102, 1104, 1106, 1108, 1110, 1112, 1114, 1116, 1118, 1120, 1122, 1124, 1126, 1128, 1130, 1132, 1134, 1136, 1138, 1140, 1142, 1144, 1146, 1148, 1150, 1152,1154, 1156, 1158, 1160, 1162, 1164, 1166, 1168, 1170, 1172, 1174, 1176, 1178, 1180, 1182, 1184, 1186, 1188, 1190, 1192, 1194, 1196, 1198, 1200, 1202, 1204, 1206, 1208, 1210, 1212, 1214, 1216, 1218, 1220, 1222, 1224, 1226, 1228, 1230, 1232, 1234, 1236, 1238, 1240, 1242, 1244, 1246, 1248, 1250, 1252, 1254, 1256, 1258, 1260, 1262, 1264, 1266, 1268, 1270, 1272, 1274, 1276, 1278, 1280, 1282, 1284, 1286, 1288, 1290, 1292, 1294, 1296, 1298, 1300, 1302, 1304, 1306, 1308, 1310, 1312, 1314, 1316, 1318, 1320, 1322, 1324, 1326, 1328, 1330, 1332, 1334, 1336, 1338, 1340, 1342, 1344, 1346, 1348, 1350, 1352, 1354, 1356, 1358, 1360, 1362, 1364, 1366, 1368, 1370, 1372, 1374, 1376, 1378, 1380, 1382, 1384, 1386, 1388, 1390, 1392, 1394, 1396, 1398, 1400, 1402, 1404, 1406, 1408, 1410, 1412, 1414, 1416, 1418, 1420, 1422, 1424, 1426, 1428, 1430, 1432, 1434, 1436, 1438, 1440, 1442, 1444, 1446, 1448, 1450, 1452, 1454, 1456, 1458, 1460, 1462, 1464, 1466, 1468, 1470, 1472, 1474, 1476, 1478, 1480, 1482, 1484, 1486, 1488, 1490, 1492, 1494, 1496, 1498, 1500, 1502, 1504, 1506, 1508, 1510, 1512, 1514, 1516, 1518, 1520, 1522, 1524, 1576, 1528, 1530, 1532, 1534, 1536, 1538, 1540, 1542, 1544, 1546, 1548, 1550, 1552, 1554, 1556, 1558, 1560, 1562, 1564, 1566, 1568, 1570, 1572, 1574, 1576, 1578, 1580, 1582, 1584, 1586, 1588, 1590, 1592, 1594, 1596, 1598, 1600, 1602, 1604, 1606, 1608, 1610, 1612, 1614, 1616, 1618, 1620, 1622, 1624, 1626, 1628, 1630, 1632, 1634, 1636, 1638, 1640, 1642, 1644, 1646, 1648, 1650, 1652, 1654, 1656, 1658, 1660, 1662, 1664, 1666, 1668, 1670, 1672, 1674, 1676, 1678, 1680, 1682, 1684, 1686, 1688, 1690, 1692, 1694, 1696, 1698, 1700, 1702, 1704, 1706, 1708, 1710, 1712, 1714, 1716, 1718, 1720, 1722, 1724, 1726, 1728, 1730, 1732, 1734, 1736, 1738, 1740, 1742, 1744, 1746, 1748, 1750, 1752, 1754, 1756, 1758, 1760, 1762, 1764, 1766, 1768, 1770, 1772, 1774, 1776, 1778, 1780, 1782, 1784, 1786, 1788, 1790, 1792, 1794, 1796, 1798, 1800, 1802, 1804, 1806, 1808, 1810, 1812, 1814, 1816, 1818, 1820, 1822, 1824, 1826, 1828, 1830, 1832, 1834, 1836, 1838, 1840, 1842, 1844, 1846, 1848, 1850, 1852, 1854, 1856, 1858, 1860, 1862, 1864, 1866, 1868, 1870, 1872, 1874, 1876, 1878, 1880, 1882, 1884, 1886, 1888, 1890, 1892, 1894, 1896, 1898, 1900, 1902, 1904, 1906, 1908, 1910, 1912, 1914, 1916, 1918, 1920, 1922, 1924, 1926, 1928, 1930, 1932, 1934, 1936, 1938, 1940, 1942, 1944, 1946, 1948, 1950, 1952, 1954, 1956, 1958, 1960, 1962, 1964, 1966, 1968, 1970, 1972, 1974, 1976, 1978, 1980, 1982, 1984, 1986, 1988, 1990, 1992, 1994, 1996, 1998, 2000, 2002, 2004, 2006, 2008, 2010, 2012, 2014, 2016, or 2018.

[0475] In some embodiments, the recombinant polynucleotide comprises a polynucleotide sequence encoding an engineered RNA polymerase comprising an amino acid sequence comprising SEQ ID NO: 2, 4, 6, 8, 10, 12, 14, 16, 18, 20, 22, 24, 26, 28, 30, 32, 34, 36, 38, 40, 42, 44, 46, 48, 50, 52, 54, 56, 58, 60, 62, 64, 66, 68, 70, 72, 74, 76, 78, 80, 82, 84, 86, 88, 90, 92, 94, 96, 98, 100,102, 104, 106, 108, 110, 112, 114, 116, 118, 120, 122, 124, 126, 128, 130, 132, 134, 136, 138, 140, 142, 144, 146, 148, 150, 152, 154, 156, 158, 160, 162, 164, 166, 168, 170, 172, 174, 176, 178, 180, 182, 184, 186, 188, 190, 192, 194, 196, 198, 200, 202, 204, 206, 208, 210, 212, 214, 216, 218, 220, 222, 224, 226, 228, 230, 232, 234, 236, 238, 240, 242, 244, 246, 248, 250, 252, 254, 256, 258, 260, 262, 264, 266, 268, 270, 272, 274, 276, 278, 280, 282, 284, 286, 288, 290, 292, 294, 296, 298, 300, 302, 304, 306, 308, 310, 312, 314, 316, 318, 320, 322, 324, 326, 328, 330, 332, 334, 336, 338, 340, 342, 344, 346, 348, 350, 352, 354, 356, 358, 360, 362, 364, 366, 368, 370, 372, 374, 376, 378, 380, 382, 384, 386, 388, 390, 392, 394, 396, 398, 400, 402, 404, 406, 408, 410, 412, 414, 416, 418, 420, 422, 424, 426, 428, 430, 432, 434, 436, 438, 440, 442, 444, 446, 448, 450, 452, 454, 456, 458, 460, 462, 464, 466, 468, 470, 472, 474, 476, 478, 480, 482, 484, 486, 488, 490, 492, 494, 496, 498, 400, 402, 404, 406, 408, 410, 412, 414, 416, 418, 420, 422, 424, 426, 428, 430, 432, 434, 436, 438, 440, 442, 444, 446, 448, 450, 452, 454, 456, 458, 460, 462, 464, 466, 468, 470, 472, 474, 476, 478, 480, 482, 484, 486, 488, 490, 492, 494, 496, 498, 500, 502, 504, 506, 508, 510, 512, 514, 516, 518, 520, 522, 524, 526, 528, 530, 532, 534, 536, 538, 540, 542, 544, 546, 548, 550, 552, 554, 556, 558, 560, 562, 564, 566, 568, 570, 572, 574, 576, 578, 580, 582, 584, 586, 588, 590, 592, 594, 596, 598, 600, 602, 604, 606, 608, 610, 612, 614, 616, 618, 620, 622, 624, 626, 628, 630, 632, 634, 636, 638, 640, 642, 644, 646, 648, 650, 652, 654, 656, 658, 660, 662, 664, 666, 668, 670, 672, 674, 676, 678, 680, 682, 684, 686, 688, 690, 692, 694, 696, 698, 700, 702, 704, 706, 708, 710, 712, 714, 716, 718, 720, 722, 724, 276, 728, 730, 732, 734, 736, 738, 740, 742, 744, 746, 748, 750, 752, 754, 756, 758, 760, 762, 764, 766, 768, 770, 772, 774, 776, 778, 780, 782, 784, 786, 788, 790, 792, 794, 796, 798, 800, 802, 804, 806, 808, 810, 812, 814, 816, 818, 820, 822, 824, 826, 828, 830, 832, 834, 836, 838, 840, 842, 844, 846, 848, 850, 852, 854, 856, 858, 860, 862, 864, 866, 868, 870, 872, 874, 876, 878, 880, 882, 884, 886, 888, 890, 892, 894, 896, 898, 900, 902, 904, 906, 908, 910, 912, 914, 916, 918, 920, 922, 924, 926, 928, 930, 932, 934, 936, 938, 940, 942, 944, 946, 948, 950, 952, 954, 956, 958, 960, 962, 964, 966, 968, 970, 972, 974, 976, 978, 980, 982, 984, 986, 988, 990, 992, 994, 996, 998, 1000, 1002, 1004, 1006, 1008, 1010, 1012, 1014, 1016, 1018, 1020, 1022, 1024, 1026, 1028, 1030, 1032, 1034, 1036, 1038, 1040, 1042, 1044, 1046, 1048, 1050, 1052, 1054, 1056, 1058, 1060, 1062, 1064, 1066, 1068, 1070, 1072, 1074, 1076, 1078, 1080, 1082, 1084, 1086, 1088, 1090, 1092, 1094, 1096, 1098, 1100, 1102, 1104, 1106, 1108, 1110, 1112, 1114, 1116, 1118, 1120, 1122, 1124, 1126, 1128, 1130, 1132, 1134, 1136, 1138, 1140, 1142, 1144, 1146, 1148, 1150, 1152,1154, 1156, 1158, 1160, 1162, 1164, 1166, 1168, 1170, 1172, 1174, 1176, 1178, 1180, 1182, 1184, 1186, 1188, 1190, 1192, 1194, 1196, 1198, 1200, 1202, 1204, 1206, 1208, 1210, 1212, 1214, 1216, 1218, 1220, 1222, 1224, 1226, 1228, 1230, 1232, 1234, 1236, 1238, 1240, 1242, 1244, 1246, 1248, 1250, 1252, 1254, 1256, 1258, 1260, 1262, 1264, 1266, 1268, 1270, 1272, 1274, 1276, 1278, 1280, 1282, 1284, 1286, 1288, 1290, 1292, 1294, 1296, 1298, 1300, 1302, 1304, 1306, 1308, 1310, 1312, 1314, 1316, 1318, 1320, 1322, 1324, 1326, 1328, 1330, 1332, 1334, 1336, 1338, 1340, 1342, 1344, 1346, 1348, 1350, 1352, 1354, 1356, 1358, 1360, 1362, 1364, 1366, 1368, 1370, 1372, 1374, 1376, 1378, 1380, 1382, 1384, 1386, 1388, 1390, 1392, 1394, 1396, 1398, 1400, 1402, 1404, 1406, 1408, 1410, 1412, 1414, 1416, 1418, 1420, 1422, 1424, 1426, 1428, 1430, 1432, 1434, 1436, 1438, 1440, 1442, 1444, 1446, 1448, 1450, 1452, 1454, 1456, 1458, 1460, 1462, 1464, 1466, 1468, 1470, 1472, 1474, 1476, 1478, 1480, 1482, 1484, 1486, 1488, 1490, 1492, 1494, 1496, 1498, 1500, 1502, 1504, 1506, 1508, 1510, 1512, 1514, 1516, 1518, 1520, 1522, 1524, 1576, 1528, 1530, 1532, 1534, 1536, 1538, 1540, 1542, 1544, 1546, 1548, 1550, 1552, 1554, 1556, 1558, 1560, 1562, 1564, 1566, 1568, 1570, 1572, 1574, 1576, 1578, 1580, 1582, 1584, 1586, 1588, 1590, 1592, 1594, 1596, 1598, 1600, 1602, 1604, 1606, 1608, 1610, 1612, 1614, 1616, 1618, 1620, 1622, 1624, 1626, 1628, 1630, 1632, 1634, 1636, 1638, 1640, 1642, 1644, 1646, 1648, 1650, 1652, 1654, 1656, 1658, 1660, 1662, 1664, 1666, 1668, 1670, 1672, 1674, 1676, 1678, 1680, 1682, 1684, 1686, 1688, 1690, 1692, 1694, 1696, 1698, 1700, 1702, 1704, 1706, 1708, 1710, 1712, 1714, 1716, 1718, 1720, 1722, 1724, 1726, 1728, 1730, 1732, 1734, 1736, 1738, 1740, 1742, 1744, 1746, 1748, 1750, 1752, 1754, 1756, 1758, 1760, 1762, 1764, 1766, 1768, 1770, 1772, 1774, 1776, 1778, 1780, 1782, 1784, 1786, 1788, 1790, 1792, 1794, 1796, 1798, 1800, 1802, 1804, 1806, 1808, 1810, 1812, 1814, 1816, 1818, 1820, 1822, 1824, 1826, 1828, 1830, 1832, 1834, 1836, 1838, 1840, 1842, 1844, 1846, 1848, 1850, 1852, 1854, 1856, 1858, 1860, 1862, 1864, 1866, 1868, 1870, 1872, 1874, 1876, 1878, 1880, 1882, 1884, 1886, 1888, 1890, 1892, 1894, 1896, 1898, 1900, 1902, 1904, 1906, 1908, 1910, 1912, 1914, 1916, 1918, 1920, 1922, 1924, 1926, 1928, 1930, 1932, 1934, 1936, 1938, 1940, 1942, 1944, 1946, 1948, 1950, 1952, 1954, 1956, 1958, 1960, 1962, 1964, 1966, 1968, 1970, 1972, 1974, 1976, 1978, 1980, 1982, 1984, 1986, 1988, 1990, 1992, 1994, 1996, 1998, 2000, 2002, 2004, 2006, 2008, 2010, 2012, 2014, 2016, or 2018.

[0476] In some embodiments, the recombinant polynucleotide comprises a polynucleotide sequence having at least 70%, 75%, 75%, 80%, 81%, 82%, 83%, 84%, 85%, 90%, 91%, 92%, 93%, 94%, 95%, 96%, 97%, 98%, 99%, or more sequence identity to a reference polynucleotide sequence corresponding to nucleotide residues 21 to 2670 of an odd-numbered SEQ ID NO. of SEQ ID NOs: 1-2017, or a reference polynucleotide sequence corresponding to an odd-numbered SEQ ID NO. of SEQ ID NOs: 1-2017, wherein the recombinant polynucleotide encodes an RNA polymerase.

[0477] In some embodiments, the recombinant polynucleotide comprises a polynucleotide sequence having at least 70%, 75%, 75%, 80%, 81%, 82%, 83%, 84%, 85%, 90%, 91%, 92%, 93%, 94%, 95%, 96%, 97%, 98%, 99%, or more sequence identity to a reference polynucleotide sequence corresponding to nucleotide residues 21 to 2670 of SEQ ID NO: 1, 3, 25, 423,547, 895, 1029, 1035, 1741, or 1837, or a reference polynucleotide sequence corresponding to SEQ ID NO: 1, 3, 25, 423,547, 895, 1029, 1035, 1741, or 1837, wherein the recombinant polynucleotide encodes an RNA polymerase.

[0478] In some embodiments, the recombinant polynucleotide comprises a polynucleotide sequence having at least 70%, 75%, 80%, 81%, 82%, 83%, 84%, 85%, 86%, 87%, 88%, 89%, 90%, 91%, 92%, 93%, 94%, 95%, 96%, 97%, 98%, 99% or more sequence identity to a reference polynucleotide sequence corresponding to nucleotide residues 21 to 2670 of SEQ ID NO: 1, 3, 5, 7, 9, 11, 13, 15, 17, 19, 21, 23, 25, 27, 29, 31, 33, 35, 37, 39, 41, 43, 45, 47, 49, 51, 53, 55, 57, 59, 61, 63, 65, 67, 69, 71, 73, 75, 77, 79, 81, 83, 85, 87, 89, 91, 93, 95, 97, 99, 101,103, 105, 107, 109, 111, 113, 115, 117, 119, 121, 123, 125, 127, 129, 131, 133, 135, 137, 139, 141, 143, 145, 147, 149, 151, 153, 155, 157, 159, 161, 163, 165, 167, 169, 171, 173, 175, 177, 179, 181, 183, 185, 187, 189, 191, 193, 195, 197, 199, 201, 203, 205, 207, 209, 211, 213, 215, 217, 219, 221, 223, 225, 227, 229, 231, 233, 235, 237, 239, 241, 243, 245, 247, 249, 251, 253, 255, 257, 259, 261, 263, 265, 267, 269, 271, 273, 275, 277, 279, 281, 283, 285, 287, 289, 291, 293, 295, 297, 299, 301, 303, 305, 307, 309, 311, 313, 315, 317, 319, 321, 323, 325, 327, 329, 331, 333, 335, 337, 339, 341, 343, 345, 347, 349, 351, 353, 355, 357, 359, 361, 363, 365, 367, 369, 371, 373, 375, 377, 379, 381, 383, 385, 387, 389, 391, 393, 395, 397, 399, 401, 403, 405, 407, 409, 411, 413, 415, 417, 419, 421, 423, 425, 427, 429, 431, 433, 435, 437, 439, 441, 443, 445, 447, 449, 451, 453, 455, 457, 459, 461, 463, 465, 467, 469, 471, 473, 475, 477, 479, 481, 483, 485, 487, 489, 491, 493, 495, 497, 399, 401, 403, 405, 407, 409, 411, 413, 415, 417, 419, 421, 423, 425, 427, 429, 431, 433, 435, 437, 439, 441, 443, 445, 447, 449, 451, 453, 455, 457, 459, 461, 463, 465, 467, 469, 471, 473, 475, 477, 479, 481, 483, 485, 487, 489, 491, 493, 495, 497, 499, 501, 503, 505, 507, 509, 511, 513, 515, 517, 519, 521, 523, 525, 527, 529, 531, 533, 535, 537, 539, 541, 543, 545, 547, 549, 551, 553, 555, 557, 559, 561, 563, 565, 567, 569, 571, 573, 575, 577, 579, 581, 583, 585, 587, 589, 591, 593, 595, 597, 599, 601, 603, 605, 607, 609, 611, 613, 615, 617, 619, 621, 623, 625, 627, 629, 631, 633, 635, 637, 639, 641, 643, 645, 647, 649, 651, 653, 655, 657, 659, 661, 663, 665, 667, 669, 671, 673, 675, 677, 679, 681, 683, 685, 687, 689, 691, 693, 695, 697, 699, 701, 703, 705, 707, 709, 711, 713, 715, 717, 719, 721, 723, 275, 727, 729, 731, 733, 735, 737, 739, 741, 743, 745, 747, 749, 751, 753, 755, 757, 759, 761, 763, 765, 767, 769, 771, 773, 775, 777, 779, 781, 783, 785, 787, 789, 791, 793, 795, 797, 799, 801, 803, 805, 807, 809, 811, 813, 815, 817, 819, 821, 823, 825, 827, 829, 831, 833, 835, 837, 839, 841, 843, 845, 847, 849, 851, 853, 855, 857, 859, 861, 863, 865, 867, 869, 871, 873, 875, 877, 879, 881, 883, 885, 887, 889, 891, 893, 895, 897, 899, 901, 903, 905, 907, 909, 911, 913, 915, 917, 919, 921, 923, 925, 927, 929, 931, 933, 935, 937, 939, 941, 943, 945, 947, 949, 951, 953, 955, 957, 959, 961, 963, 965, 967, 969, 971, 973, 975, 977, 979, 981, 983, 985, 987, 989, 991, 993, 995, 997, 999, 1001, 1003, 1005, 1007, 1009, 1011, 1013, 1015, 1017, 1019, 1021, 1023, 1025, 1027, 1029, 1031, 1033, 1035, 1037, 1039, 1041, 1043, 1045, 1047, 1049, 1051, 1053, 1055, 1057, 1059, 1061, 1063, 1065, 1067, 1069, 1071, 1073, 1075, 1077, 1079, 1081, 1083, 1085, 1087, 1089, 1091, 1093, 1095, 1097, 1099, 1101, 1103, 1105, 1107, 1109, 1111, 1113, 1115, 1117, 1119, 1121, 1123, 1125, 1127, 1129, 1131, 1133, 1135, 1137, 1139, 1141, 1143, 1145, 1147, 1149, 1151,1153, 1155, 1157, 1159, 1161, 1163, 1165, 1167, 1169, 1171, 1173, 1175, 1177, 1179, 1181, 1183, 1185, 1187, 1189, 1191, 1193, 1195, 1197, 1199, 1201, 1203, 1205, 1207, 1209, 1211, 1213, 1215, 1217, 1219, 1221, 1223, 1225, 1227, 1229, 1231, 1233, 1235, 1237, 1239, 1241, 1243, 1245, 1247, 1249, 1251, 1253, 1255, 1257, 1259, 1261, 1263, 1265, 1267, 1269, 1271, 1273, 1275, 1277, 1279, 1281, 1283, 1285, 1287, 1289, 1291, 1293, 1295, 1297, 1299, 1301, 1303, 1305, 1307, 1309, 1311, 1313, 1315, 1317, 1319, 1321, 1323, 1325, 1327, 1329, 1331, 1333, 1335, 1337, 1339, 1341, 1343, 1345, 1347, 1349, 1351, 1353, 1355, 1357, 1359, 1361, 1363, 1365, 1367, 1369, 1371, 1373, 1375, 1377, 1379, 1381, 1383, 1385, 1387, 1389, 1391, 1393, 1395, 1397, 1399, 1401, 1403, 1405, 1407, 1409, 1411, 1413, 1415, 1417, 1419, 1421, 1423, 1425, 1427, 1429, 1431, 1433, 1435, 1437, 1439, 1441, 1443, 1445, 1447, 1449, 1451, 1453, 1455, 1457, 1459, 1461, 1463, 1465, 1467, 1469, 1471, 1473, 1475, 1477, 1479, 1481, 1483, 1485, 1487, 1489, 1491, 1493, 1495, 1497, 1499, 1501, 1503, 1505, 1507, 1509, 1511, 1513, 1515, 1517, 1519, 1521, 1523, 1575, 1527, 1529, 1531, 1533, 1535, 1537, 1539, 1541, 1543, 1545, 1547, 1549, 1551, 1553, 1555, 1557, 1559, 1561, 1563, 1565, 1567, 1569, 1571, 1573, 1575, 1577, 1579, 1581, 1583, 1585, 1587, 1589, 1591, 1593, 1595, 1597, 1599, 1601, 1603, 1605, 1607, 1609, 1611, 1613, 1615, 1617, 1619, 1621, 1623, 1625, 1627, 1629, 1631, 1633, 1635, 1637, 1639, 1641, 1643, 1645, 1647, 1649, 1651, 1653, 1655, 1657, 1659, 1661, 1663, 1665, 1667, 1669, 1671, 1673, 1675, 1677, 1679, 1681, 1683, 1685, 1687, 1689, 1691, 1693, 1695, 1697, 1699, 1701, 1703, 1705, 1707, 1709, 1711, 1713, 1715, 1717, 1719, 1721, 1723, 1725, 1727, 1729, 1731, 1733, 1735, 1737, 1739, 1741, 1743, 1745, 1747, 1749, 1751, 1753, 1755, 1757, 1759, 1761, 1763, 1765, 1767, 1769, 1771, 1773, 1775, 1777, 1779, 1781, 1783, 1785, 1787, 1789, 1791, 1793, 1795, 1797, 1799, 1801, 1803, 1805, 1807, 1809, 1811, 1813, 1815, 1817, 1819, 1821, 1823, 1825, 1827, 1829, 1831, 1833, 1835, 1837, 1839, 1841, 1843, 1845, 1847, 1849, 1851, 1853, 1855, 1857, 1859, 1861, 1863, 1865, 1867, 1869, 1871, 1873, 1875, 1877, 1879, 1881, 1883, 1885, 1887, 1889, 1891, 1893, 1895, 1897, 1899, 1901, 1903, 1905, 1907, 1909, 1911, 1913, 1915, 1917, 1919, 1921, 1923, 1925, 1927, 1929, 1931, 1933, 1935, 1937, 1939, 1941, 1943, 1945, 1947, 1949, 1951, 1953, 1955, 1957, 1959, 1961, 1963, 1965, 1967, 1969, 1971, 1973, 1975, 1977, 1979, 1981, 1983, 1985, 1987, 1989, 1991, 1993, 1995, 1997, 1999, 2001, 2003, 2005, 2007, 2009, 2011, 2013, 2015, or 2017, wherein the recombinant polynucleotide encodes an RNA polymerase.

[0479] In some embodiments, the recombinant polynucleotide comprises a polynucleotide sequence having at least 70%, 75%, 80%, 81%, 82%, 83%, 84%, 85%, 86%, 87%, 88%, 89%, 90%, 91%, 92%, 93%, 94%, 95%, 96%, 97%, 98%, 99% or more sequence identity to the reference polynucleotide sequence corresponding to SEQ ID NO: 1, 3, 5, 7, 9, 11, 13, 15, 17, 19, 21, 23, 25, 27, 29, 31, 33, 35, 37, 39, 41, 43, 45, 47, 49, 51, 53, 55, 57, 59, 61, 63, 65, 67, 69, 71, 73, 75, 77, 79, 81, 83, 85, 87, 89, 91, 93, 95, 97, 99, 101,103, 105, 107, 109, 111, 113, 115, 117, 119, 121, 123, 125, 127, 129, 131, 133, 135, 137, 139, 141, 143, 145, 147, 149, 151, 153, 155, 157, 159, 161, 163, 165, 167, 169, 171, 173, 175, 177, 179, 181, 183, 185, 187, 189, 191, 193, 195, 197, 199, 201, 203, 205, 207, 209, 211, 213, 215, 217, 219, 221, 223, 225, 227, 229, 231, 233, 235, 237, 239, 241, 243, 245, 247, 249, 251, 253, 255, 257, 259, 261, 263, 265, 267, 269, 271, 273, 275, 277, 279, 281, 283, 285, 287, 289, 291, 293, 295, 297, 299, 301, 303, 305, 307, 309, 311, 313, 315, 317, 319, 321, 323, 325, 327, 329, 331, 333, 335, 337, 339, 341, 343, 345, 347, 349, 351, 353, 355, 357, 359, 361, 363, 365, 367, 369, 371, 373, 375, 377, 379, 381, 383, 385, 387, 389, 391, 393, 395, 397, 399, 401, 403, 405, 407, 409, 411, 413, 415, 417, 419, 421, 423, 425, 427, 429, 431, 433, 435, 437, 439, 441, 443, 445, 447, 449, 451, 453, 455, 457, 459, 461, 463, 465, 467, 469, 471, 473, 475, 477, 479, 481, 483, 485, 487, 489, 491, 493, 495, 497, 399, 401, 403, 405, 407, 409, 411, 413, 415, 417, 419, 421, 423, 425, 427, 429, 431, 433, 435, 437, 439, 441, 443, 445, 447, 449, 451, 453, 455, 457, 459, 461, 463, 465, 467, 469, 471, 473, 475, 477, 479, 481, 483, 485, 487, 489, 491, 493, 495, 497, 499, 501, 503, 505, 507, 509, 511, 513, 515, 517, 519, 521, 523, 525, 527, 529, 531, 533, 535, 537, 539, 541, 543, 545, 547, 549, 551, 553, 555, 557, 559, 561, 563, 565, 567, 569, 571, 573, 575, 577, 579, 581, 583, 585, 587, 589, 591, 593, 595, 597, 599, 601, 603, 605, 607, 609, 611, 613, 615, 617, 619, 621, 623, 625, 627, 629, 631, 633, 635, 637, 639, 641, 643, 645, 647, 649, 651, 653, 655, 657, 659, 661, 663, 665, 667, 669, 671, 673, 675, 677, 679, 681, 683, 685, 687, 689, 691, 693, 695, 697, 699, 701, 703, 705, 707, 709, 711, 713, 715, 717, 719, 721, 723, 275, 727, 729, 731, 733, 735, 737, 739, 741, 743, 745, 747, 749, 751, 753, 755, 757, 759, 761, 763, 765, 767, 769, 771, 773, 775, 777, 779, 781, 783, 785, 787, 789, 791, 793, 795, 797, 799, 801, 803, 805, 807, 809, 811, 813, 815, 817, 819, 821, 823, 825, 827, 829, 831, 833, 835, 837, 839, 841, 843, 845, 847, 849, 851, 853, 855, 857, 859, 861, 863, 865, 867, 869, 871, 873, 875, 877, 879, 881, 883, 885, 887, 889, 891, 893, 895, 897, 899, 901, 903, 905, 907, 909, 911, 913, 915, 917, 919, 921, 923, 925, 927, 929, 931, 933, 935, 937, 939, 941, 943, 945, 947, 949, 951, 953, 955, 957, 959, 961, 963, 965, 967, 969, 971, 973, 975, 977, 979, 981, 983, 985, 987, 989, 991, 993, 995, 997, 999, 1001, 1003, 1005, 1007, 1009, 1011, 1013, 1015, 1017, 1019, 1021, 1023, 1025, 1027, 1029, 1031, 1033, 1035, 1037, 1039, 1041, 1043, 1045, 1047, 1049, 1051, 1053, 1055, 1057, 1059, 1061, 1063, 1065, 1067, 1069, 1071, 1073, 1075, 1077, 1079, 1081, 1083, 1085, 1087, 1089, 1091, 1093, 1095, 1097, 1099, 1101, 1103, 1105, 1107, 1109, 1111, 1113, 1115, 1117, 1119, 1121, 1123, 1125, 1127, 1129, 1131, 1133, 1135, 1137, 1139, 1141, 1143, 1145, 1147, 1149, 1151,1153, 1155, 1157, 1159, 1161, 1163, 1165, 1167, 1169, 1171, 1173, 1175, 1177, 1179, 1181, 1183, 1185, 1187, 1189, 1191, 1193, 1195, 1197, 1199, 1201, 1203, 1205, 1207, 1209, 1211, 1213, 1215, 1217, 1219, 1221, 1223, 1225, 1227, 1229, 1231, 1233, 1235, 1237, 1239, 1241, 1243, 1245, 1247, 1249, 1251, 1253, 1255, 1257, 1259, 1261, 1263, 1265, 1267, 1269, 1271, 1273, 1275, 1277, 1279, 1281, 1283, 1285, 1287, 1289, 1291, 1293, 1295, 1297, 1299, 1301, 1303, 1305, 1307, 1309, 1311, 1313, 1315, 1317, 1319, 1321, 1323, 1325, 1327, 1329, 1331, 1333, 1335, 1337, 1339, 1341, 1343, 1345, 1347, 1349, 1351, 1353, 1355, 1357, 1359, 1361, 1363, 1365, 1367, 1369, 1371, 1373, 1375, 1377, 1379, 1381, 1383, 1385, 1387, 1389, 1391, 1393, 1395, 1397, 1399, 1401, 1403, 1405, 1407, 1409, 1411, 1413, 1415, 1417, 1419, 1421, 1423, 1425, 1427, 1429, 1431, 1433, 1435, 1437, 1439, 1441, 1443, 1445, 1447, 1449, 1451, 1453, 1455, 1457, 1459, 1461, 1463, 1465, 1467, 1469, 1471, 1473, 1475, 1477, 1479, 1481, 1483, 1485, 1487, 1489, 1491, 1493, 1495, 1497, 1499, 1501, 1503, 1505, 1507, 1509, 1511, 1513, 1515, 1517, 1519, 1521, 1523, 1575, 1527, 1529, 1531, 1533, 1535, 1537, 1539, 1541, 1543, 1545, 1547, 1549, 1551, 1553, 1555, 1557, 1559, 1561, 1563, 1565, 1567, 1569, 1571, 1573, 1575, 1577, 1579, 1581, 1583, 1585, 1587, 1589, 1591, 1593, 1595, 1597, 1599, 1601, 1603, 1605, 1607, 1609, 1611, 1613, 1615, 1617, 1619, 1621, 1623, 1625, 1627, 1629, 1631, 1633, 1635, 1637, 1639, 1641, 1643, 1645, 1647, 1649, 1651, 1653, 1655, 1657, 1659, 1661, 1663, 1665, 1667, 1669, 1671, 1673, 1675, 1677, 1679, 1681, 1683, 1685, 1687, 1689, 1691, 1693, 1695, 1697, 1699, 1701, 1703, 1705, 1707, 1709, 1711, 1713, 1715, 1717, 1719, 1721, 1723, 1725, 1727, 1729, 1731, 1733, 1735, 1737, 1739, 1741, 1743, 1745, 1747, 1749, 1751, 1753, 1755, 1757, 1759, 1761, 1763, 1765, 1767, 1769, 1771, 1773, 1775, 1777, 1779, 1781, 1783, 1785, 1787, 1789, 1791, 1793, 1795, 1797, 1799, 1801, 1803, 1805, 1807, 1809, 1811, 1813, 1815, 1817, 1819, 1821, 1823, 1825, 1827, 1829, 1831, 1833, 1835, 1837, 1839, 1841, 1843, 1845, 1847, 1849, 1851, 1853, 1855, 1857, 1859, 1861, 1863, 1865, 1867, 1869, 1871, 1873, 1875, 1877, 1879, 1881, 1883, 1885, 1887, 1889, 1891, 1893, 1895, 1897, 1899, 1901, 1903, 1905, 1907, 1909, 1911, 1913, 1915, 1917, 1919, 1921, 1923, 1925, 1927, 1929, 1931, 1933, 1935, 1937, 1939, 1941, 1943, 1945, 1947, 1949, 1951, 1953, 1955, 1957, 1959, 1961, 1963, 1965, 1967, 1969, 1971, 1973, 1975, 1977, 1979, 1981, 1983, 1985, 1987, 1989, 1991, 1993, 1995, 1997, 1999, 2001, 2003, 2005, 2007, 2009, 2011, 2013, 2015, or 2017, wherein the recombinant polynucleotide encodes an RNA polymerase.

[0480] In some embodiments, the recombinant polynucleotide comprises a polynucleotide sequence comprising nucleotide residues 21 to 2670 of SEQ ID NO: 1, 3, 5, 7, 9, 11, 13, 15, 17, 19, 21, 23, 25, 27, 29, 31, 33, 35, 37, 39, 41, 43, 45, 47, 49, 51, 53, 55, 57, 59, 61, 63, 65, 67, 69, 71, 73, 75, 77, 79, 81, 83, 85, 87, 89, 91, 93, 95, 97, 99, 101,103, 105, 107, 109, 111, 113, 115, 117, 119, 121, 123, 125, 127, 129, 131, 133, 135, 137, 139, 141, 143, 145, 147, 149, 151, 153, 155, 157, 159, 161, 163, 165, 167, 169, 171, 173, 175, 177, 179, 181, 183, 185, 187, 189, 191, 193, 195, 197, 199, 201, 203, 205, 207, 209, 211, 213, 215, 217, 219, 221, 223, 225, 227, 229, 231, 233, 235, 237, 239, 241, 243, 245, 247, 249, 251, 253, 255, 257, 259, 261, 263, 265, 267, 269, 271, 273, 275, 277, 279, 281, 283, 285, 287, 289, 291, 293, 295, 297, 299, 301, 303, 305, 307, 309, 311, 313, 315, 317, 319, 321, 323, 325, 327, 329, 331, 333, 335, 337, 339, 341, 343, 345, 347, 349, 351, 353, 355, 357, 359, 361, 363, 365, 367, 369, 371, 373, 375, 377, 379, 381, 383, 385, 387, 389, 391, 393, 395, 397, 399, 401, 403, 405, 407, 409, 411, 413, 415, 417, 419, 421, 423, 425, 427, 429, 431, 433, 435, 437, 439, 441, 443, 445, 447, 449, 451, 453, 455, 457, 459, 461, 463, 465, 467, 469, 471, 473, 475, 477, 479, 481, 483, 485, 487, 489, 491, 493, 495, 497, 399, 401, 403, 405, 407, 409, 411, 413, 415, 417, 419, 421, 423, 425, 427, 429, 431, 433, 435, 437, 439, 441, 443, 445, 447, 449, 451, 453, 455, 457, 459, 461, 463, 465, 467, 469, 471, 473, 475, 477, 479, 481, 483, 485, 487, 489, 491, 493, 495, 497, 499, 501, 503, 505, 507, 509, 511, 513, 515, 517, 519, 521, 523, 525, 527, 529, 531, 533, 535, 537, 539, 541, 543, 545, 547, 549, 551, 553, 555, 557, 559, 561, 563, 565, 567, 569, 571, 573, 575, 577, 579, 581, 583, 585, 587, 589, 591, 593, 595, 597, 599, 601, 603, 605, 607, 609, 611, 613, 615, 617, 619, 621, 623, 625, 627, 629, 631, 633, 635, 637, 639, 641, 643, 645, 647, 649, 651, 653, 655, 657, 659, 661, 663, 665, 667, 669, 671, 673, 675, 677, 679, 681, 683, 685, 687, 689, 691, 693, 695, 697, 699, 701, 703, 705, 707, 709, 711, 713, 715, 717, 719, 721, 723, 275, 727, 729, 731, 733, 735, 737, 739, 741, 743, 745, 747, 749, 751, 753, 755, 757, 759, 761, 763, 765, 767, 769, 771, 773, 775, 777, 779, 781, 783, 785, 787, 789, 791, 793, 795, 797, 799, 801, 803, 805, 807, 809, 811, 813, 815, 817, 819, 821, 823, 825, 827, 829, 831, 833, 835, 837, 839, 841, 843, 845, 847, 849, 851, 853, 855, 857, 859, 861, 863, 865, 867, 869, 871, 873, 875, 877, 879, 881, 883, 885, 887, 889, 891, 893, 895, 897, 899, 901, 903, 905, 907, 909, 911, 913, 915, 917, 919, 921, 923, 925, 927, 929, 931, 933, 935, 937, 939, 941, 943, 945, 947, 949, 951, 953, 955, 957, 959, 961, 963, 965, 967, 969, 971, 973, 975, 977, 979, 981, 983, 985, 987, 989, 991, 993, 995, 997, 999, 1001, 1003, 1005, 1007, 1009, 1011, 1013, 1015, 1017, 1019, 1021, 1023, 1025, 1027, 1029, 1031, 1033, 1035, 1037, 1039, 1041, 1043, 1045, 1047, 1049, 1051, 1053, 1055, 1057, 1059, 1061, 1063, 1065, 1067, 1069, 1071, 1073, 1075, 1077, 1079, 1081, 1083, 1085, 1087, 1089, 1091, 1093, 1095, 1097, 1099, 1101, 1103, 1105, 1107, 1109, 1111, 1113, 1115, 1117, 1119, 1121, 1123, 1125, 1127, 1129, 1131, 1133, 1135, 1137, 1139, 1141, 1143, 1145, 1147, 1149, 1151,1153, 1155, 1157, 1159, 1161, 1163, 1165, 1167, 1169, 1171, 1173, 1175, 1177, 1179, 1181, 1183, 1185, 1187, 1189, 1191, 1193, 1195, 1197, 1199, 1201, 1203, 1205, 1207, 1209, 1211, 1213, 1215, 1217, 1219, 1221, 1223, 1225, 1227, 1229, 1231, 1233, 1235, 1237, 1239, 1241, 1243, 1245, 1247, 1249, 1251, 1253, 1255, 1257, 1259, 1261, 1263, 1265, 1267, 1269, 1271, 1273, 1275, 1277, 1279, 1281, 1283, 1285, 1287, 1289, 1291, 1293, 1295, 1297, 1299, 1301, 1303, 1305, 1307, 1309, 1311, 1313, 1315, 1317, 1319, 1321, 1323, 1325, 1327, 1329, 1331, 1333, 1335, 1337, 1339, 1341, 1343, 1345, 1347, 1349, 1351, 1353, 1355, 1357, 1359, 1361, 1363, 1365, 1367, 1369, 1371, 1373, 1375, 1377, 1379, 1381, 1383, 1385, 1387, 1389, 1391, 1393, 1395, 1397, 1399, 1401, 1403, 1405, 1407, 1409, 1411, 1413, 1415, 1417, 1419, 1421, 1423, 1425, 1427, 1429, 1431, 1433, 1435, 1437, 1439, 1441, 1443, 1445, 1447, 1449, 1451, 1453, 1455, 1457, 1459, 1461, 1463, 1465, 1467, 1469, 1471, 1473, 1475, 1477, 1479, 1481, 1483, 1485, 1487, 1489, 1491, 1493, 1495, 1497, 1499, 1501, 1503, 1505, 1507, 1509, 1511, 1513, 1515, 1517, 1519, 1521, 1523, 1575, 1527, 1529, 1531, 1533, 1535, 1537, 1539, 1541, 1543, 1545, 1547, 1549, 1551, 1553, 1555, 1557, 1559, 1561, 1563, 1565, 1567, 1569, 1571, 1573, 1575, 1577, 1579, 1581, 1583, 1585, 1587, 1589, 1591, 1593, 1595, 1597, 1599, 1601, 1603, 1605, 1607, 1609, 1611, 1613, 1615, 1617, 1619, 1621, 1623, 1625, 1627, 1629, 1631, 1633, 1635, 1637, 1639, 1641, 1643, 1645, 1647, 1649, 1651, 1653, 1655, 1657, 1659, 1661, 1663, 1665, 1667, 1669, 1671, 1673, 1675, 1677, 1679, 1681, 1683, 1685, 1687, 1689, 1691, 1693, 1695, 1697, 1699, 1701, 1703, 1705, 1707, 1709, 1711, 1713, 1715, 1717, 1719, 1721, 1723, 1725, 1727, 1729, 1731, 1733, 1735, 1737, 1739, 1741, 1743, 1745, 1747, 1749, 1751, 1753, 1755, 1757, 1759, 1761, 1763, 1765, 1767, 1769, 1771, 1773, 1775, 1777, 1779, 1781, 1783, 1785, 1787, 1789, 1791, 1793, 1795, 1797, 1799, 1801, 1803, 1805, 1807, 1809, 1811, 1813, 1815, 1817, 1819, 1821, 1823, 1825, 1827, 1829, 1831, 1833, 1835, 1837, 1839, 1841, 1843, 1845, 1847, 1849, 1851, 1853, 1855, 1857, 1859, 1861, 1863, 1865, 1867, 1869, 1871, 1873, 1875, 1877, 1879, 1881, 1883, 1885, 1887, 1889, 1891, 1893, 1895, 1897, 1899, 1901, 1903, 1905, 1907, 1909, 1911, 1913, 1915, 1917, 1919, 1921, 1923, 1925, 1927, 1929, 1931, 1933, 1935, 1937, 1939, 1941, 1943, 1945, 1947, 1949, 1951, 1953, 1955, 1957, 1959, 1961, 1963, 1965, 1967, 1969, 1971, 1973, 1975, 1977, 1979, 1981, 1983, 1985, 1987, 1989, 1991, 1993, 1995, 1997, 1999, 2001, 2003, 2005, 2007, 2009, 2011, 2013, 2015, or 2017.

[0481] In some embodiments, the recombinant polynucleotide comprises a polynucleotide sequence comprising SEQ ID NO: 1, 3, 5, 7, 9, 11, 13, 15, 17, 19, 21, 23, 25, 27, 29, 31, 33, 35, 37, 39, 41, 43, 45, 47, 49, 51, 53, 55, 57, 59, 61, 63, 65, 67, 69, 71, 73, 75, 77, 79, 81, 83, 85, 87, 89, 91, 93, 95, 97, 99, 101, 103, 105, 107, 109, 111, 113, 115, 117, 119, 121, 123, 125, 127, 129, 131, 133, 135, 137, 139, 141, 143, 145, 147, 149, 151, 153, 155, 157, 159, 161, 163, 165, 167, 169, 171, 173, 175, 177, 179, 181, 183, 185, 187, 189, 191, 193, 195, 197, 199, 201, 203, 205, 207, 209, 211, 213, 215, 217, 219, 221, 223, 225, 227, 229, 231, 233, 235, 237, 239, 241, 243, 245, 247, 249, 251, 253, 255, 257, 259, 261, 263, 265, 267, 269, 271, 273, 275, 277, 279, 281, 283, 285, 287, 289, 291, 293, 295, 297, 299, 301, 303, 305, 307, 309, 311, 313, 315, 317, 319, 321, 323, 325, 327, 329, 331, 333, 335, 337, 339, 341, 343, 345, 347, 349, 351, 353, 355, 357, 359, 361, 363, 365, 367, 369, 371, 373, 375, 377, 379, 381, 383, 385, 387, 389, 391, 393, 395, 397, 399, 401, 403, 405, 407, 409, 411, 413, 415, 417, 419, 421, 423, 425, 427, 429, 431, 433, 435, 437, 439, 441, 443, 445, 447, 449, 451, 453, 455, 457, 459, 461, 463, 465, 467, 469, 471, 473, 475, 477, 479, 481, 483, 485, 487, 489, 491, 493, 495, 497, 399, 401, 403, 405, 407, 409, 411, 413, 415, 417, 419, 421, 423, 425, 427, 429, 431, 433, 435, 437, 439, 441, 443, 445, 447, 449, 451, 453, 455, 457, 459, 461, 463, 465, 467, 469, 471, 473, 475, 477, 479, 481, 483, 485, 487, 489, 491, 493, 495, 497, 499, 501, 503, 505, 507, 509, 511, 513, 515, 517, 519, 521, 523, 525, 527, 529, 531, 533, 535, 537, 539, 541, 543, 545, 547, 549, 551, 553, 555, 557, 559, 561, 563, 565, 567, 569, 571, 573, 575, 577, 579, 581, 583, 585, 587, 589, 591, 593, 595, 597, 599, 601, 603, 605, 607, 609, 611, 613, 615, 617, 619, 621, 623, 625, 627, 629, 631, 633, 635, 637, 639, 641, 643, 645, 647, 649, 651, 653, 655, 657, 659, 661, 663, 665, 667, 669, 671, 673, 675, 677, 679, 681, 683, 685, 687, 689, 691, 693, 695, 697, 699, 701, 703, 705, 707, 709, 711, 713, 715, 717, 719, 721, 723, 275, 727, 729, 731, 733, 735, 737, 739, 741, 743, 745, 747, 749, 751, 753, 755, 757, 759, 761, 763, 765, 767, 769, 771, 773, 775, 777, 779, 781, 783, 785, 787, 789, 791, 793, 795, 797, 799, 801, 803, 805, 807, 809, 811, 813, 815, 817, 819, 821, 823, 825, 827, 829, 831, 833, 835, 837, 839, 841, 843, 845, 847, 849, 851, 853, 855, 857, 859, 861, 863, 865, 867, 869, 871, 873, 875, 877, 879, 881, 883, 885, 887, 889, 891, 893, 895, 897, 899, 901, 903, 905, 907, 909, 911, 913, 915, 917, 919, 921, 923, 925, 927, 929, 931, 933, 935, 937, 939, 941, 943, 945, 947, 949, 951, 953, 955, 957, 959, 961, 963, 965, 967, 969, 971, 973, 975, 977, 979, 981, 983, 985, 987, 989, 991, 993, 995, 997, 999, 1001, 1003, 1005, 1007, 1009, 1011, 1013, 1015, 1017, 1019, 1021, 1023, 1025, 1027, 1029, 1031, 1033, 1035, 1037, 1039, 1041, 1043, 1045, 1047, 1049, 1051, 1053, 1055, 1057, 1059, 1061, 1063, 1065, 1067, 1069, 1071, 1073, 1075, 1077, 1079, 1081, 1083, 1085, 1087, 1089, 1091, 1093, 1095, 1097, 1099, 1101, 1103, 1105, 1107, 1109, 1111, 1113, 1115, 1117, 1119, 1121, 1123, 1125, 1127, 1129, 1131, 1133, 1135, 1137, 1139, 1141, 1143, 1145, 1147, 1149, 1151,1153, 1155, 1157, 1159, 1161, 1163, 1165, 1167, 1169, 1171, 1173, 1175, 1177, 1179, 1181, 1183, 1185, 1187, 1189, 1191, 1193, 1195, 1197, 1199, 1201, 1203, 1205, 1207, 1209, 1211, 1213, 1215, 1217, 1219, 1221, 1223, 1225, 1227, 1229, 1231, 1233, 1235, 1237, 1239, 1241, 1243, 1245, 1247, 1249, 1251, 1253, 1255, 1257, 1259, 1261, 1263, 1265, 1267, 1269, 1271, 1273, 1275, 1277, 1279, 1281, 1283, 1285, 1287, 1289, 1291, 1293, 1295, 1297, 1299, 1301, 1303, 1305, 1307, 1309, 1311, 1313, 1315, 1317, 1319, 1321, 1323, 1325, 1327, 1329, 1331, 1333, 1335, 1337, 1339, 1341, 1343, 1345, 1347, 1349, 1351, 1353, 1355, 1357, 1359, 1361, 1363, 1365, 1367, 1369, 1371, 1373, 1375, 1377, 1379, 1381, 1383, 1385, 1387, 1389, 1391, 1393, 1395, 1397, 1399, 1401, 1403, 1405, 1407, 1409, 1411, 1413, 1415, 1417, 1419, 1421, 1423, 1425, 1427, 1429, 1431, 1433, 1435, 1437, 1439, 1441, 1443, 1445, 1447, 1449, 1451, 1453, 1455, 1457, 1459, 1461, 1463, 1465, 1467, 1469, 1471, 1473, 1475, 1477, 1479, 1481, 1483, 1485, 1487, 1489, 1491, 1493, 1495, 1497, 1499, 1501, 1503, 1505, 1507, 1509, 1511, 1513, 1515, 1517, 1519, 1521, 1523, 1575, 1527, 1529, 1531, 1533, 1535, 1537, 1539, 1541, 1543, 1545, 1547, 1549, 1551, 1553, 1555, 1557, 1559, 1561, 1563, 1565, 1567, 1569, 1571, 1573, 1575, 1577, 1579, 1581, 1583, 1585, 1587, 1589, 1591, 1593, 1595, 1597, 1599, 1601, 1603, 1605, 1607, 1609, 1611, 1613, 1615, 1617, 1619, 1621, 1623, 1625, 1627, 1629, 1631, 1633, 1635, 1637, 1639, 1641, 1643, 1645, 1647, 1649, 1651, 1653, 1655, 1657, 1659, 1661, 1663, 1665, 1667, 1669, 1671, 1673, 1675, 1677, 1679, 1681, 1683, 1685, 1687, 1689, 1691, 1693, 1695, 1697, 1699, 1701, 1703, 1705, 1707, 1709, 1711, 1713, 1715, 1717, 1719, 1721, 1723, 1725, 1727, 1729, 1731, 1733, 1735, 1737, 1739, 1741, 1743, 1745, 1747, 1749, 1751, 1753, 1755, 1757, 1759, 1761, 1763, 1765, 1767, 1769, 1771, 1773, 1775, 1777, 1779, 1781, 1783, 1785, 1787, 1789, 1791, 1793, 1795, 1797, 1799, 1801, 1803, 1805, 1807, 1809, 1811, 1813, 1815, 1817, 1819, 1821, 1823, 1825, 1827, 1829, 1831, 1833, 1835, 1837, 1839, 1841, 1843, 1845, 1847, 1849, 1851, 1853, 1855, 1857, 1859, 1861, 1863, 1865, 1867, 1869, 1871, 1873, 1875, 1877, 1879, 1881, 1883, 1885, 1887, 1889, 1891, 1893, 1895, 1897, 1899, 1901, 1903, 1905, 1907, 1909, 1911, 1913, 1915, 1917, 1919, 1921, 1923, 1925, 1927, 1929, 1931, 1933, 1935, 1937, 1939, 1941, 1943, 1945, 1947, 1949, 1951, 1953, 1955, 1957, 1959, 1961, 1963, 1965, 1967, 1969, 1971, 1973, 1975, 1977, 1979, 1981, 1983, 1985, 1987, 1989, 1991, 1993, 1995, 1997, 1999, 2001, 2003, 2005, 2007, 2009, 2011, 2013, 2015, or 2017.

[0482] In some embodiments, a recombinant polynucleotide encoding any of the RNA polymerase herein is manipulated in a variety of ways to facilitate expression of the encoded RNA polymerase polypeptide. As such, in some embodiments, the present disclosure provides an expression vector comprising a recombinant polynucleotide encoding an engineered RNA polymerase described herein. In some embodiments, the expression vector comprises one or more control sequences operably linked to the recombinant polynucleotide to regulate expression of the polynucleotide encoding the RNA polymerase and/or expression of the corresponding RNA polymerase polypeptide. In some embodiments, the control sequence includes, among others, promoters, leader sequences, polyadenylation sequences, signal peptide sequences, and transcription terminators. In some embodiments, the control sequences are selected depending on the type of hosts into which the expression vectors are to be introduced.

[0483] In some embodiments, suitable promoters are selected based on the host cells. For bacterial host cells, suitable promoters for directing transcription of the nucleic acid constructs of the present disclosure, include, but are not limited to promoters obtained from the E. coli lac operon, Streptomyces coelicolor agarase gene (dagA), Bacillus subtilis levansucrase gene (sacB), Bacillus licheniformis alpha-amylase gene (amyL), Bacillus stearothermophilus maltogenic amylase gene (amyM), Bacillus amyloliquefaciens alpha-amylase gene (amyQ), Bacillus licheniformis penicillinase gene (penP), Bacillus subtilis xylA and xylB genes, and prokaryotic beta-lactamase gene (see, e.g., Villa-Kamaroff et al., Proc. Natl Acad. Sci. USA, 1978, 75:3727-3731), as well as the tac promoter (see, e.g., DeBoer et al., Proc. Natl Acad. Sci. USA, 1983, 80:21-25). Exemplary promoters for filamentous fungal host cells, include, but are not limited to promoters obtained from the genes for Aspergillus oryzae TAKA amylase, Rhizomucor miehei aspartic proteinase, Aspergillus niger neutral alpha-amylase, Aspergillus niger acid stable alpha-amylase, Aspergillus niger or Aspergillus awamori glucoamylase (glaA), Rhizomucor miehei lipase, Aspergillus oryzae alkaline protease, Aspergillus oryzae triose phosphate isomerase, Aspergillus nidulans acetamidase, and Fusarium oxysporum trypsin-like protease (see, e.g., WO 96/00787), as well as the NA2-tpi promoter (a hybrid of the promoters from the genes for Aspergillus niger neutral alpha-amylase and Aspergillus oryzae triose phosphate isomerase), and mutant, truncated, and hybrid promoters thereof. Exemplary yeast cell promoters can be from the genes for Saccharomyces cerevisiae enolase (ENO-1), Saccharomyces cerevisiae galactokinase (GAL1), Saccharomyces cerevisiae alcohol dehydrogenase/glyceraldehyde-3-phosphate dehydrogenase (ADH2/GAP), and Saccharomyces cerevisiae 3-phosphoglycerate kinase. Other useful promoters for yeast host cells are known in the art (see, e.g., Romanos et al., Yeast, 1992, 8:423-488). Exemplary promoters for use in insect cells include, but are not limited to, polyhedrin, p10, ELT, OpIE2, and hr5/iel promoters. Exemplary promoters for use in mammalian cells include, but are not limited to those from cytomegalovirus (CMV), chicken β-actin promoter fused with the CMV enhancer, Simian virus 40 (SV40), from Homo sapiens phosphoglycerate kinase, beta actin, elongation factor-1a or glyceraldehyde-3-phosphate dehydrogenase, or from Gallus β-actin.

[0484] In some embodiments, the control sequence is a suitable transcription terminator sequence (i.e., a sequence recognized by a host cell to terminate transcription). In some embodiments, the terminator sequence is operably linked to the 3′ terminus of the nucleic acid sequence encoding the RNA polymerase polypeptide. Any suitable terminator which is functional in the host cell of choice finds use in the present invention. For bacterial expression, the transcription terminators can be a Rho-dependent terminators that rely on a Rho transcription factor, or a Rho-independent, or intrinsic terminators, which do not require a transcription factor. Exemplary bacterial transcription terminators are described in Peters et al., J Mol Biol., 2011, 412(5):793-813. Exemplary transcription terminators for filamentous fungal host cells can be obtained from the genes for Aspergillus oryzae TAKA amylase, Aspergillus niger glucoamylase, Aspergillus nidulans anthranilate synthase, Aspergillus niger alpha-glucosidase, and Fusarium oxysporum trypsin-like protease. Exemplary terminators for yeast host cells can be obtained from the genes for Saccharomyces cerevisiae enolase, Saccharomyces cerevisiae cytochrome C (CYC1), and Saccharomyces cerevisiae glyceraldehyde-3-phosphate dehydrogenase. Other useful terminators for yeast host cells are known in the art (see, e.g., Romanos et al., supra). Exemplary terminators for insect cells and mammalian cells include, but are not limited to, those from cytomegalovirus (CMV), Simian virus 40 (SV40), from Homo sapiens growth hormone hGH, from bovine growth hormone BGH, and from human or rabbit beta globulin.

[0485] In some embodiments, the control sequence is a suitable leader sequence, a non-translated region of an mRNA that is important for translation by the host cell. In some embodiments, the leader sequence is operably linked to the 5′ terminus of the nucleic acid sequence encoding the RNA polymerase polypeptide. Any suitable leader sequence that is functional in the host cell of choice find use in the present disclosure. Exemplary leaders for filamentous fungal host cells are obtained from the genes for Aspergillus oryzae TAKA amylase, and Aspergillus nidulans triose phosphate isomerase. Suitable leaders for yeast host cells are obtained from the genes for Saccharomyces cerevisiae enolase (ENO-1), Saccharomyces cerevisiae 3-phosphoglycerate kinase, Saccharomyces cerevisiae alpha-factor, and Saccharomyces cerevisiae alcohol dehydrogenase/glyceraldehyde-3-phosphate dehydrogenase (ADH2/GAP). Suitable leaders for mammalian host cells include but are not limited to the 5′-UTR element present in orthopoxvirus mRNA.

[0486] In some embodiments, the control sequence is a polyadenylation sequence (i.e., a sequence operably linked to the 3′ terminus of the nucleic acid sequence and which, when transcribed, is recognized by the host cell as a signal to add polyadenosine residues to transcribed mRNA). Any suitable polyadenylation sequence which is functional in the host cell of choice finds use in the present invention. Exemplary polyadenylation sequences for filamentous fungal host cells include, but are not limited to the genes for Aspergillus oryzae TAKA amylase, Aspergillus niger glucoamylase, Aspergillus nidulans anthranilate synthase, Fusarium oxysporum trypsin-like protease, and Aspergillus niger alpha-glucosidase. Useful polyadenylation sequences for yeast host cells are known (see, e.g., Guo and Sherman, Mol. Cell. Biol., 1995, 15:5983-5990). Useful polyadenylation and 3′ UTR sequences for mammalian host cells include, but are not limited to, the 3′-UTRs of a- and $3-globin mRNAs that harbor several sequence elements that increase the stability and translation of mRNA.

[0487] In some embodiments, the control sequence is also a signal peptide (i.e., a coding region that codes for an amino acid sequence linked to the amino terminus of a polypeptide and directs the encoded polypeptide into the cell's secretory pathway). In some embodiments, the 5′ end of the coding sequence of the nucleic acid sequence inherently contains a signal peptide coding region naturally linked in translation reading frame with the segment of the coding region that encodes the secreted polypeptide. Alternatively, in some embodiments, the 5′ end of the coding sequence contains a signal peptide coding region that is foreign to the coding sequence. Any suitable signal peptide coding region which directs the expressed polypeptide into the secretory pathway of a host cell of choice finds use for expression of the engineered polypeptide(s). Effective signal peptide coding regions for bacterial host cells are the signal peptide coding regions include, but are not limited to those obtained from the genes for Bacillus NC1B 11837 maltogenic amylase, Bacillus stearothermophilus alpha-amylase, Bacillus licheniformis subtilisin, Bacillus licheniformis beta-lactamase, Bacillus stearothermophilus neutral proteases (nprT, nprS, nprM), and Bacillus subtilis prsA. Further signal peptides are known in the art (see, e.g., Simonen and Palva, Microbiol. Rev., 1993, 57:109-137). In some embodiments, effective signal peptide coding regions for filamentous fungal host cells include, but are not limited to the signal peptide coding regions obtained from the genes for Aspergillus oryzae TAKA amylase, Aspergillus niger neutral amylase, Aspergillus niger glucoamylase, Rhizomucor miehei aspartic proteinase, Humicola insolens cellulase, and Humicola lanuginosa lipase. Useful signal peptides for yeast host cells include, but are not limited to those from the genes for Saccharomyces cerevisiae alpha-factor and Saccharomyces cerevisiae invertase. Useful signal peptides for mammalian host cells include but are not limited to those from the genes for immunoglobulin gamma (IgG) or other secreted human proteins, e.g., human beta-galactosidase polypeptide.

[0488] In some embodiments, the control sequence is a propeptide coding region that codes for an amino acid sequence positioned at the amino terminus of a polypeptide. The resultant polypeptide is referred to as a “proenzyme,” “propolypeptide,” or “zymogen.” A propolypeptide can be converted to a mature active polypeptide by catalytic or autocatalytic cleavage of the propeptide from the propolypeptide. The propeptide coding region may be obtained from any suitable source, including, but not limited to the genes for Bacillus subtilis alkaline protease (aprE), Bacillus subtilis neutral protease (nprT), Saccharomyces cerevisiae alpha-factor, Rhizomucor miehei aspartic proteinase, and Myceliophthora thermophila lactase (see, e.g., WO95/33836). Where both signal peptide and propeptide regions are present at the amino terminus of a polypeptide, the propeptide region is positioned next to the amino terminus of a polypeptide and the signal peptide region is positioned next to the amino terminus of the propeptide region.

[0489] In some embodiments, the control sequence comprises one or more regulatory sequences that facilitate regulation of the expression of the polynucleotide and/or corresponding encoded polypeptide relative to the growth of the host cell. Examples of regulatory systems are those that cause the expression of the gene to be turned on or off in response to a chemical or physical stimulus, including the presence of a regulatory compound. In prokaryotic host cells, suitable regulatory sequences include, but are not limited to the lac, tac, and trp operator systems. In yeast host cells, suitable regulatory systems include, but are not limited to the ADH2 system or GAL1 system. In filamentous fungi, suitable regulatory sequences include, but are not limited to the TAKA alpha-amylase promoter, Aspergillus niger glucoamylase promoter, and Aspergillus oryzae glucoamylase promoter. Exemplary inducible promoters regulated by exogenous agents include the zinc-inducible sheep metallothionine (MT) promoter, dexamethasone (Dex)-inducible promoter, mouse mammary tumor virus (MMTV) promoter; ecdysone insect promoter, tetracycline-inducible promoter system, RU486-inducible promoter system, and the rapamycin-inducible promoter system.

[0490] The recombinant expression vector may be any suitable vector (e.g., a plasmid or virus), that can be conveniently subjected to recombinant DNA procedures and bring about the expression of the engineered RNA polymerase. The choice of the vector typically is selected based on the compatibility of the vector with the host cell into which the vector is to be introduced. The vectors may be linear or closed circular plasmids.

[0491] In some embodiments, the expression vector is an autonomously replicating vector (i.e., a vector that exists as an extra-chromosomal entity, the replication of which is independent of chromosomal replication, such as a plasmid, an extra-chromosomal element, a minichromosome, or an artificial chromosome). The vector may contain any means for assuring self-replication, e.g., origin of replication. In some alternative embodiments, the vector is one in which, when introduced into the host cell, it is integrated into the genome and replicated together with the chromosome(s) into which it has been integrated. Furthermore, in some embodiments, a single vector or plasmid, or two or more vectors or plasmids which together contain the total DNA to be introduced into the genome of the host cell, and/or a transposon is utilized.

[0492] In some embodiment, the recombinant polynucleotides may be provided on a non-replicating expression vector or plasmid. In some embodiments, the non-replicating expression vector or plasmid can be based on viral vectors defective in replication (see, e.g., Travieso et al., npj Vaccines, 2022, Vol. 7, Article 75).

[0493] In some embodiments, the expression vector contains one or more selectable markers, which permit easy selection of transformed cells. A “selectable marker” is a gene, the product of which provides for biocide or viral resistance, resistance to heavy metals, prototrophy to auxotrophs, and the like. Examples of bacterial selectable markers include, but are not limited to the dal genes from Bacillus subtilis or Bacillus licheniformis, or markers, which confer antibiotic resistance such as ampicillin, kanamycin, chloramphenicol, or tetracycline resistance. Suitable markers for yeast host cells include, but are not limited to ADE2, HIS3, LEU2, LYS2, MET3, TRP1, and URA3. Selectable markers for use in filamentous fungal host cells include, but are not limited to, amdS (acetamidase; e.g., from A. nidulans or A. orzyae), argB (ornithine carbamoyltransferases), bar (phosphinothricin acetyltransferase; e.g., from S. hygroscopicus), hph (hygromycin phosphotransferase), niaD (nitrate reductase), pyrG (orotidine-5′-phosphate decarboxylase; e.g., from A. nidulans or A. orzyae), sC (sulfate adenyltransferase), and trpC (anthranilate synthase), as well as equivalents thereof. Selectable marker for mammalian cells include, but are not limited to, chloramphenicol acetyl transferase (CAT), nourseothricin N-acetyl transferase, blasticidin-S deaminase, blastcidin S acetyltransferase, Sh ble (Zeocin® resistance), aminoglycoside 3′-phosphotransferase (neomycin resistance), hph (hygromycin resistance), thymidine kinase, and puromycin N-acetyl-transferase.

[0494] In another aspect, the present disclosure provides a host cell comprising a polynucleotide encoding at least one engineered RNA polymerase polypeptide of the present disclosure, the polynucleotide(s) being operably linked to one or more control sequences for expression of the encoded engineered RNA polymerase polypeptide(s) in the host cell. In some embodiments, the host cell comprises an expression vector comprising a polynucleotide encoding an engineered RNA polymerase polypeptide described herein, where the polynucleotide is operably linked to one or more control sequences. Host cells suitable for use in expressing the polypeptides encoded by the expression vectors of the present disclosure are known in the art and include but are not limited to, bacterial cells, such as E. coli, B. subtilis, Vibrio fluvialis, Streptomyces and Salmonella typhimurium cells; fungal cells, such as yeast cells (e.g., Saccharomyces cerevisiae or Pichia pastoris (ATCC Accession No. 201178)); insect cells such as Drosophila S2 and Spodoptera Sf9 cells; animal cells such as CHO, COS, BHK, 293, and Bowes melanoma cells; and plant cells. Exemplary host cells also include various Escherichia coli strains (e.g., W3110 (ΔfhuA) and BL21).

[0495] In another aspect, the present disclosure provides a method of producing the engineered RNA polymerase polypeptides, where the method comprises culturing a host cell capable of expressing a polynucleotide encoding the engineered RNA polymerase polypeptide under conditions suitable for expression of the polypeptide such that the engineered RNA polymerase is produced. In some embodiments, the method further comprises isolating the RNA polymerase polypeptides. In some embodiments, the method further comprises purifying the engineered RNA polymerase polypeptide.

[0496] Appropriate culture media and growth conditions for host cells are known in the art. It is contemplated that any suitable method for introducing polynucleotides for expression of the RNA polymerase polypeptides in cells will find use in the present invention. Suitable techniques include, but are not limited to electroporation, biolistic particle bombardment, liposome mediated transfection, calcium chloride transfection, and protoplast fusion.

[0497] In some embodiments, recombinant polypeptides encoding the engineered RNA polymerase polypeptides can be produced using any suitable methods known the art. For example, a wide variety of different mutagenesis techniques are available to the person of skill in the art. In addition, mutagenesis kits are also available from many commercial molecular biology suppliers. Methods are available to make specific substitutions at defined amino acids (site-directed), specific or random mutations in a localized region of the gene (region-specific), or random mutagenesis over the entire gene (e.g., saturation mutagenesis). Numerous methods known to those in the art to generate polypeptide variants, include, by way of example and not limitation, site-directed mutagenesis of single-stranded DNA or double-stranded DNA using PCR, cassette mutagenesis, gene synthesis, error-prone PCR, shuffling, and chemical saturation mutagenesis, or any other suitable method known in the art. Non-limiting examples of methods used for DNA and protein engineering are provided in the following patents: U.S. Pat. Nos. 6,117,679; 6,420,175; 6,376,246; 6,586,182; 7,747,391; 7,747,393; 7,783,428; and 8,383,346. After the variants are produced, they can be screened for any desired property (e.g., high or increased activity, or low or reduced activity, increased thermal activity, increased stability, increased substrate range, increased fidelity, increased salt tolerance, and/or pH stability, etc.).

[0498] In some embodiments, the engineered RNA polymerase polypeptides with the properties disclosed herein can be obtained by subjecting the polynucleotide encoding the naturally occurring or engineered RNA polymerase polypeptide to a suitable mutagenesis and/or directed evolution methods known in the art, for example, as described herein. An exemplary directed evolution technique is mutagenesis and/or DNA shuffling (see, e.g., Stemmer, Proc. Natl. Acad. Sci. USA, 1994, 91:10747-10751; WO 95/22625; WO 97/0078; WO 97/35966; WO 98/27230; WO 00/42651; WO 01/75767 and U.S. Pat. No. 6,537,746). Other directed evolution procedures that can be used include, among others, staggered extension process (StEP), in vitro recombination (see, e.g., Zhao et al., Nat. Biotechnol., 1998, 16:258-261), mutagenic PCR (see, e.g., Caldwell et al., PCR Methods Appl., 1994, 3:S136-S140), and cassette mutagenesis (see, e.g., Black et al., Proc. Natl. Acad. Sci. USA, 1996, 93:3525-3529).

[0499] Mutagenesis and directed evolution methods can be applied to RNA polymerase-encoding polynucleotides to generate variant libraries that can be expressed, screened, and assayed. Any suitable mutagenesis and directed evolution methods find use in the present disclosure (see, e.g., U.S. Pat. Nos. 5,605,793, 5,811,238, 5,830,721, 5,834,252, 5,837,458, 5,928,905, 6,096,548, 6,117,679, 6,132,970, 6,165,793, 6,180,406, 6,251,674, 6,265,201, 6,277,638, 6,287,861, 6,287,862, 6,291,242, 6,297,053, 6,303,344, 6,309,883, 6,319,713, 6,319,714, 6,323,030, 6,326,204, 6,335,160, 6,335,198, 6,344,356, 6,352,859, 6,355,484, 6,358,740, 6,358,742, 6,365,377, 6,365,408, 6,368,861, 6,372,497, 6,337,186, 6,376,246, 6,379,964, 6,387,702, 6,391,552, 6,391,640, 6,395,547, 6,406,855, 6,406,910, 6,413,745, 6,413,774, 6,420,175, 6,423,542, 6,426,224, 6,436,675, 6,444,468, 6,455,253, 6,479,652, 6,482,647, 6,483,011, 6,484,105, 6,489,146, 6,500,617, 6,500,639, 6,506,602, 6,506,603, 6,518,065, 6,519,065, 6,521,453, 6,528,311, 6,537,746, 6,573,098, 6,576,467, 6,579,678, 6,586,182, 6,602,986, 6,605,430, 6,613,514, 6,653,072, 6,686,515, 6,703,240, 6,716,631, 6,825,001, 6,902,922, 6,917,882, 6,946,296, 6,961,664, 6,995,017, 7,024,312, 7,058,515, 7,105,297, 7,148,054, 7,220,566, 7,288,375, 7,384,387, 7,421,347, 7,430,477, 7,462,469, 7,534,564, 7,620,500, 7,620,502, 7,629,170, 7,702,464, 7,747,391, 7,747,393, 7,751,986, 7,776,598, 7,783,428, 7,795,030, 7,853,410, 7,868,138, 7,783,428, 7,873,477, 7,873,499, 7,904,249, 7,957,912, 7,981,614, 8,014,961, 8,029,988, 8,048,674, 8,058,001, 8,076,138, 8,108,150, 8,170,806, 8,224,580, 8,377,681, 8,383,346, 8,457,903, 8,504,498, 8,589,085, 8,762,066, 8,768,871, 9,593,326, 9,665,694, 9,684,771, and all related PCT and non-US counterparts; Ling et al., Anal. Biochem., 1997, 254(2):157-78; Dale et al., Meth. Mol. Biol., 1996, 57:369-74; Smith, Ann. Rev. Genet., 1985, 19:423-462; Botstein et al., Science, 1985, 229:1193-1201; Carter, Biochem. J., 1986, 237:1-7; Kramer et al., Cell, 1984, 38:879-887; Wells et al., Gene, 1985, 34:315-323; Minshull et al., Curr. Op. Chem. Biol., 1999, 3:284-290; Christians et al., Nat. Biotechnol., 1999, 17:259-264; Crameri et al., Nature, 1998, 391:288-291; Crameri, et al., Nat. Biotechnol., 1997, 15:436-438; Zhang et al., Proc. Nat. Acad. Sci. U.S.A., 1997, 94:4504-4509; Crameri et al., Nat. Biotechnol., 1996, 14:315-319; Stemmer, Nature, 1994, 366:389-391; Stemmer, Proc. Nat. Acad. Sci. USA, 1994, 91:10747-10751; EP 3 049 973; WO 95/22625; WO 97/0078; WO 97/35966; WO 98/27230; WO 00/42651; WO 01/75767; WO 2009/152336; and WO 2015/048573, all of which are incorporated herein by reference).

[0500] In some embodiments, the clones obtained following mutagenesis treatment are screened by subjecting the polypeptide preparations to a defined treatment conditions or assay conditions (e.g., buffer, temperature, pH condition, DNA template, etc.) and measuring polypeptide activity after the treatments or other suitable assay conditions. Clones containing a polynucleotide encoding the polypeptide of interest are then isolated, the polynucleotide sequenced to identify the nucleotide sequence changes (if any), and used to express the polypeptide in a host cell. Measuring polypeptide activity from the expression libraries can be performed using any suitable method known in the art and as described in the Examples.

[0501] For engineered polypeptides of known sequence, the polynucleotides encoding the polypeptide can be prepared by standard solid-phase methods, according to known synthetic methods. In some embodiments, fragments of up to about 100 bases can be individually synthesized, then joined (e.g., by enzymatic or chemical ligation methods, or polymerase mediated methods) to form any desired continuous sequence (see, e.g., Hughes et al., Cold Spring Harb Perspect Biol. 2017 January; 9(1):a023812). For example, polynucleotides and oligonucleotides disclosed herein can be prepared by chemical synthesis using the classical phosphoramidite method (see, e.g., Beaucage et al., Tet. Lett., 1981, 22:1859-69; and Matthes et al., EMBO J., 1984, 3:801-05), as it is typically practiced in automated synthetic methods. According to the phosphoramidite method, oligonucleotides are synthesized (e.g., in an automatic DNA synthesizer, purified, annealed, ligated, and cloned in appropriate vectors).

[0502] In some embodiments, a method for preparing the engineered RNA polymerase polypeptide can comprise: (a) synthesizing a polynucleotide encoding a polypeptide comprising an amino acid sequence selected from the amino acid sequence of any variant as described herein, and (b) expressing the RNA polymerase polypeptide encoded by the polynucleotide. In some embodiments of the method, the amino acid sequence encoded by the polynucleotide can optionally have one or several (e.g., up to 3, 4, 5, or up to 10) amino acid residue deletions, insertions and/or substitutions. In some embodiments, the amino acid sequence has optionally 1-2, 1-3, 1-4, 1-5, 1-6, 1-7, 1-8, 1-9, 1-10, 1-15, 1-20, 1-21, 1-22, 1-23, 1-24, 1-25, 1-30, 1-35, 1-40, 1-45, or 1-50 amino acid residue deletions, insertions and/or substitutions. In some embodiments, the amino acid sequence has optionally 1, 2, 3, 4, 5, 6, 7, 8, 9, 10, 11, 12, 13, 14, 15, 16, 17, 18, 19, 20, 21, 22, 23, 24, 25, 30, 30, 35, 40, 45, or 50 amino acid residue deletions, insertions and/or substitutions. In some embodiments, the amino acid sequence has optionally 1, 2, 3, 4, 5, 6, 7, 8, 9, 10, 11, 12, 13, 14, 15, 16, 18, 20, 21, 22, 23, 24, or 25 amino acid residue deletions, insertions and/or substitutions. In some embodiments, the substitutions are conservative or non-conservative substitutions.

[0503] In some embodiments, any of the engineered RNA polymerase polypeptides expressed in a host cell are recovered and/or purified from the cells and/or the culture medium using any one or more of the known techniques for protein purification, including, among others, lysozyme treatment, sonication, filtration, salting-out, selective precipitation, ultra-centrifugation, and chromatography.

[0504] Chromatographic techniques for isolation and purification of the RNA polymerase polypeptides include, among others, reverse phase chromatography, high-performance liquid chromatography, ion-exchange chromatography, hydrophobic-interaction chromatography, size-exclusion chromatography, gel electrophoresis, and affinity chromatography. Conditions for purifying a particular polypeptide may depend, in part, on factors such as net charge, hydrophobicity, hydrophilicity, molecular weight, molecular shape, etc., and will be apparent to those having skill in the art. In some embodiments, affinity techniques may be used to isolate the improved RNA polymerase polypeptides. For affinity chromatography purification, any antibody that specifically binds an RNA polymerase polypeptide of interest can be used. For the production of antibodies, various host animals, including but not limited to rabbits, mice, rats, etc., are immunized by injection with an RNA polymerase polypeptide, or a fragment thereof. In some embodiments, the RNA polymerase polypeptide or fragment is attached to a suitable carrier, such as BSA, by means of a side chain functional group or linkers attached to a side chain functional group. Where the engineered RNA polymerase includes a fusion polypeptide that allows for affinity purification, such as a His-tag, standard affinity methods for the particular fusion protein can be used.

### Compositions

[0505] In a further aspect, the present disclosure provides compositions of the engineered RNA polymerase disclosed herein. In some embodiments, the engineered RNA polymerase polypeptide in the composition is isolated or purified. In some embodiments, the RNA polymerase is combined with other components and compounds to provide compositions and formulations comprising the engineered RNA polymerase polypeptide as appropriate for different applications and uses.

[0506] In some embodiments, the composition comprises at least one engineered RNA polymerase described herein. For example, a composition comprises at least one engineered RNA polymerase exemplified in Tables 8.1, 9.1, 10.1, 10.2, 11.1, 12.1, 13.1, 14.1, 15.1, 16.1, 17.1, and 18.1 and the Sequence Listing. In some embodiments, the composition comprising an engineered RNA polymerase is an aqueous solution. In some embodiments, the composition comprising an engineered RNA polymerase is a lyophilizate.

[0507] In some embodiments, the composition further comprises one or more of (i) a buffer, ii) one or more rNTPs, (iii) Mg⁺², and (iv) a target DNA substrate/template. In some embodiments, the target DNA substrate is a double stranded DNA template and includes a promoter recognized by the engineered RNA polymerase. As further described herein, in some embodiments, the promoter sequence is a naturally occurring T7 RNA polymerase promoter, such as, for example, a class II or class III promoter. In some embodiments, the RNA polymerase promoter is a synthetic or hybrid T7 RNA polymerase promoter.

[0508] In some embodiments, the composition further comprises a reducing agent, such as dithiothreitol or mercaptoethanol. In some embodiments, the composition further comprises an additive, such as a molecular crowding agent or a promoter of RNA polymerase activity. In some embodiments, the molecular crowding agent, includes, among others, bovine serum albumin (BSA), polyethylene glycol, dextran, and Ficoll. In some embodiments, the additive for promoting RNA polymerase activity is a surfactant, including, among others, non-ionic detergents (e.g., Triton X-100, Tween 20, or NP-40) and a poly-amine, e.g., spermidine or spermine.

[0509] In some embodiments, the composition further comprises one or more oligonucleotide primers, which can be sequence specific primers and/or “random” or “universal” primers that can act as primers for extension by the engineered RNA polymerase. In some embodiments, the primer is an oligoribonucleotide primer (i.e., RNA primer).

[0510] In some embodiments, the composition further comprises a “cap” analog, for example, for co-transcriptional production of capped RNA transcripts. In some embodiments, the cap analog is a dinucleotide or trinucleotide cap analog. In some embodiments, the cap analog is a dinucleotide cap analog, including, among others, alpha, gamma-bis(N7-methylguanosine)triphosphate (m7G(5′)ppp(5′)m7G) or an anti-reverse cap analog 3′-O-Me-m7G(5′)ppp(5′)G. In some embodiments, the dinucleotide cap analog is alpha, gamma-bis(N7-methylguanosine)triphosphate. In some embodiments, the cap analog is a trinucleotide cap analog, including, among others, m7G(5′)ppp(5′)AmpG (GAG) and m7,3′-O-propargylG(5′)ppp(5′)AmpG, m7GpppApA, m7GpppApC, m7GpppApG, m7GpppApU. m7GpppCpA, m7GpppCpC, m7GpppCpG, m7GpppCpU, m7GpppGpA, m7GpppGpC, m7GpppGpG, m7GpppGpU, m7CpppUpA, m7GpppUpC, m7GpppUpG, and m7GpppUpU. In some embodiments, the cap analog is a tetranucleotide cap, including, among others, (m7GpppNmpGmpG) and cap2-1 (m7GpppNpGmpG). Dinucleotide and trinucleotide cap analogs are described in, among others, Shanmugasundaram et al., Chem Rec., 2022, 22(8): e202200005, and PCT patent publication WO20172239, incorporated by reference herein. Tetranucleotide caps are described in, among others, Drazkowska et al., Nucl Acids Res., 2022, 50(16):9051-9071. In some embodiments, the cap analogs are commercially available cap analogs, sold s Trilink® or CleanCap®.

[0511] In some embodiments, the trinucleotide cap is m7G3′OMepppApA, m7G3′OMepppApC, m7G3′OMepppApG, m7G3′OMepppApU, m7G3′OmepppCpA, m7G3′OMepppCPC, m7G3′OMepppCpG, m7G3′OMepppCpU, m7G3′OMepppGpA, m7G3′OMepppGpC, m7G3′OMepppGpG, m7C3′OMepppGpU, m7G3′OMepppUpA, m7C3′OMepppUpC, m7G3′OMepppUpG, or m7G3′OMepppUpU. In some embodiments, the trinucleotide cap is m7G3′OMepppA2′OMepA, m7G3′OMepppA2′OMepC, m7G3′OMepppA2′OMepG, m7C3′OMepppA 2′OMepU, m7G3′OMepppC2′OMepA, m7Ci3′OMeppppC2′OMepC, m7C3′OMepppC2′OMepCi. m7G3′OMepppC2′OMepU, m7G3′OMepppG2′OMepA. m7G3′OMeppppG2′OMepC, m7G3′OMepppG2′OMepG, m7G 3′OMepppC2′OMepU, m7G3′OMepppU2′OMepA, m7G3′OMepppU2′OMepC, m7G3′OMepppU2′OMepG, or m7G3′OMepppU2′OMepU. In some embodiments, the trinucleotide cap is m7GpppA2′OMepA, m7GpppA2′OMepC, m7GpppA2′OMepG, m7GpppA2′OMepU, m7GpppC2′OMepA, m7GpppC2′OMepC, m7GpppC2′OMepG, m7CpppC2′OMepU, m7GpppG2′OMepA. m7GpppG2′OMepC, m7CpppG2′OMepG, m7GpppG2′OMepU, m7GpppU2′OMepA, m7GpppU2′OMepC, m7GpppU2′OMepG, or m7GpppU2′OMepU.

[0512] In some embodiments, the composition further comprises a pyrophosphatase and/or an RNase inhibitor. In some embodiments, the pyrophosphatase is an inorganic pyrophosphatase. In some embodiments, the RNase inhibitor is a mammalian RNase inhibitor (e.g., placental RNase inhibitor or porcine RNase inhibitor) or a synthetic RNase inhibitor, e.g., RiboGrip®.

[0513] In some embodiments, an engineered RNA polymerase described herein is provided immobilized on a substrate or support medium, such as a solid substrate, a porous substrate, a membrane, or particles. The polypeptide can be entrapped in matrixes or membranes. In some embodiments, matrices include polymeric materials such as calcium-alginate, agar, k-carrageenin, polyacrylamide, and collagen. In some embodiments, the solid matrices, includes, among others, activated carbon, porous ceramic, and diatomaceous earth. In some embodiments, the matrix is a particle, a membrane, or a fiber. Types of membranes include, among others, nylon, cellulose, polysulfone, or polyacrylate.

[0514] In some embodiments, the RNA polymerase is immobilized on the surface of a support material. In some embodiments, the polypeptide is adsorbed on the support material. In some embodiments, the polypeptide is immobilized on the support material by covalent attachment. Support materials include, among others, inorganic materials, such as alumina, silica, porous glass, ceramics, diatomaceous earth, clay, and bentonite, or organic materials, such as cellulose (CMC, DEAE-cellulose), starch, activated carbon, polyacrylate, agarose or derivatives thereof (e.g., cross-linked agarose), polyacrylamide, polystyrene, and ion-exchange resins, such as Amberlite, Sephadex, and Dowex.

### Uses and Methods

[0515] In another aspect, the present disclosure provides uses of the engineered RNA polymerases for preparing an RNA of interest. In some embodiments, the engineered RNA polymerase is used for in vitro transcription reactions. In some embodiments, the engineered RNA polymerase is used to produce, by way of example and not limitation, mRNA, self-replicating RNA, circular RNA, shRNA, miRNA, and CRISPR guide RNA. In embodiments, the RNA produced is mRNA that encodes a polypeptide of interest, such as a polypeptide vaccine or a therapeutic polypeptide.

[0516] In some embodiments, a method of producing RNA comprises contacting a target DNA template with an engineered RNA polymerase described herein in the presence of one or more nucleotide triphosphates (NTPs) under suitable reaction conditions such that an RNA transcript of all or part of the target DNA template is produced. In some embodiments, the method further comprises providing a cap analog, such as a dinucleotide, trinucleotide, or tetranucleotide cap as described herein.

[0517] In some embodiments, the NTPs are rNTPs. In some embodiments, the NTP substrates are modified nucleotides. In some embodiments, the modified nucleotides are naturally modified nucleotides, for example, the modified nucleotides of choice are the naturally occurring 5′-methylcytidine and/or pseudouridine. In some embodiments, the modified nucleotides are 2′-ribose modified nucleotides, for example 2-O-methyl, 2′-O-ethyl, and 2′-halo (e.g., 2′-bromo, 2′-fluoro). In some embodiments, the modified nucleotide substrates are base-modified nucleotides (see, e.g., Milisavljeviĉ et al., Org. Biomol. Chem., 2018, 16, 5800-5807).

[0518] In some embodiments, the concentration of one or more of the NTP, such as rNTP is 0.5-15 mM, 1-12 mM, 2-10 mM, or 4-8 mM. In some embodiments the concentration of NTPs is about 0.1 mM, 0.5 mM, 1 mM, 2 mM, 3 mM, 4 mM, 5 mM, 6 mM, 7 mM, 8 mM, 9 mM, 10 mM, 12 mM, 15 mM, or 20 mM.

[0519] In some embodiments, the suitable conditions comprises a temperature of about 10° C. to about 60° C. In some embodiments, the suitable conditions comprises a temperature of about 20° C. to about 55° C. In some embodiments, the suitable conditions comprises a temperature of about 25° C. to about 50° C. In some embodiments, the suitable conditions comprises a temperature of about 30° C. to about 40° C. In some embodiments, the suitable conditions comprises a temperature of about 10° C., 15° C., 20° C., 25° C., 30° C., 35° C., 40° C., 45° C., 50° C., 55° C., or 60° C.

[0520] In some embodiments, the suitable conditions include a buffer and/or Mg⁺². In some embodiments, the suitable conditions include a reducing agent, for example, dithiothreitol or mercaptoethanol. In some embodiments, the suitable reaction conditions further include an additive, for example, bovine serum albumin (BSA), glycerol, polyethylene glycol, dextran, Ficoll, spermidine, or spermine, as described above.

[0521] In some embodiments, the target DNA template is a double stranded DNA template that includes a promoter sequence recognized by the engineered RNA polymerase described herein. In some embodiments, the promoter sequence is a naturally occurring T7 RNA polymerase promoter, such as, for example, a class II or class III promoter (see, e.g., Ikeda et al., J Biol. Chem., 1992, 267(4):2640-2649). In some embodiments, the promoter is a hybrid or synthetic T7 promoter recognized by the engineered RNA polymerase of the present disclosure (see, e.g., Lieber et al., Eur. J. Biochem. 1993, 217:387-394).

[0522] In some embodiments, where a cap has not been provided in the transcription reaction for co-transcriptional capping, the method further comprises the step of capping the RNA transcript. In some embodiments, capping of the RNA is carried out by a capping enzyme, for example, Faustovirus or vaccinia virus capping enzyme.

[0523] In some embodiments, the method further comprises the step of poly-A tailing of the RNA transcript. In some embodiments, the step of poly-A tailing is added when the polynucleotide template does not have a sequence for generating a poly-A tail in the RNA transcription. In some embodiments, the step of poly-A tailing uses a poly(A) polymerase, which catalyzes the incorporation of adenine residues into the 3′ termini of an RNA. In some embodiments, the poly(A) polymerase is a bacterial poly(A) polymerase (e.g., E. coli.), a yeast poly(A) polymerase (e.g., Saccharomyces cerevisiae), or a mammalian poly(A) polymerase.

[0524] In some embodiments, the method further comprises presence of a pyrophosphatase in conjunction with the engineered RNA polymerase. In general, the pyrophosphatase is an inorganic pyrophosphatase.

[0525] In some embodiments, the method further comprises presence of an RNase inhibitor for inhibiting RNases that may be present in the reaction mixture.

[0526] In some embodiments, the method is used in the production of an RNA transcript that encodes a polypeptide of interest. In some embodiments, the polypeptide of interest is an enzyme, vaccine antigen, cytokine, growth factor, monoclonal antibody, structural polypeptide or protein, or a ligand or receptor polypeptide or protein.

[0527] In some embodiments, the DNA template and the corresponding RNA transcript produced encode a vaccine antigen or therapeutic polypeptide. In some embodiments, the DNA template and the RNA transcript produced encode a vaccine antigen for stimulating an immune response to the antigen, for example to treat a disease condition or stimulate immunity against an infectious agent.

[0528] In some embodiments the DNA template and the corresponding RNA transcript encode a vaccine antigen of a microbial or viral polypeptide. Exemplary microbial polypeptides include, among others, streptococcus (e.g., Group A or Group B antigens) and plague bacterium proteins (e.g., F1 protein). Exemplary viral peptides include peptides of, among others, human immunodeficiency virus (HIV), hepatitis virus (e.g., HAV, HBV, HCV, etc.), herpes simplex virus (e.g., HSV-1, HSV-2, etc.), herpes zoster virus, human papilloma virus, respiratory syncytial virus (RSV), coronavirus (e.g., SARS-CoV-2), measles virus, pox virus (e.g., small pox, monkey pox, etc.), rhabdovirus (e.g., rabies), influenza (e.g., HIN1, H10N8, H7N9, etc.), human metapneumovirus (HMPV) and parainfluenza virus Type 3 (PIV3), human cytomegalovirus, Zika virus, Epstein-Barr Virus (EBV), and the like.

[0529] In some embodiments, the DNA template and the corresponding RNA transcript encode a cancer or tumor antigen. Exemplary cancer antigens include, among others, tumor-associated antigens (TAAs), for example overexpressed antigens EGFR, HER2, cancer testis antigens (CTAs); differentiation antigens, for example. PSA and gp100; oncofoetal antigens, for example 5T4 and CEA; and onco-viral antigens, for example HPV E6 and E7 oncogenic proteins. In some embodiments, the cancer or tumor antigen is a tumor specific antigen (TSA) or tumor associated antigens (TAA) or neoantigens which are derived from somatic mutations. Exemplary TAA, TSA, and neoantigens include, among others, NY-ESO-1, MAGE-C3, tyrosinase, TPTE, RBL038, RBL039, RBL-040, RBL-041, RBL-045, PSA, PSCA, PSMA, STEAPI, PAP, and MUC1.

[0530] In some embodiments, the DNA template and the corresponding RNA transcript encode a therapeutic polypeptide. Exemplary therapeutic polypeptide includes, among others, an enzyme (e.g., associated with a disease condition), a cytokine, a structural polypeptide or protein, and a ligand or receptor polypeptide or protein.

[0531] Exemplary cytokines include, among others, IL-1β, IL-6, TNFα, IL-12, IL-15, GM-CSF, IFNα, and GM-CSF. Exemplary ligand proteins or polypeptides include, among others, OX40 ligand (OX40L), 4-1BB ligand (4-1BBL), glucocorticoid-induced tumor necrosis factor receptor (GITR) ligand (GITRL), CD40 ligand (CD40L), inducible T cell co-stimulatory ligand (ICOSL), CD70 and caTLR4.

[0532] Exemplary therapeutic polypeptides include, among others, glucose-6-phosphatase (glycogen storage deficiency type IA); phosphoenolpyruvatecarboxykinase (Pepck deficiency); galactose-1 phosphate uridyl transferase (galactosemia); phenylalanine hydroxylase (phenylketonuria); branched chain alpha-ketoacid dehydrogenase (Maple syrup urine disease); fumarylacetoacetate hydrolase (tyrosinemia type 1); methylmalonyl-CoA mutase (methylmalonic academia); medium chain acyl CoA dehydrogenase, (medium chain acetyl CoA deficiency); ornithine transcarbamylase (ornithine transcarbamylase deficiency); argininosuccinic acid synthetase (citrullinemia); low density lipoprotein receptor protein (familial hypercholesterolemia); UDP-glucouronosyltransferase (Crigler-Najjar disease); adenosine deaminase (severe combined immunodeficiency disease); hypoxanthine guanine phosphoribosyl transferase (Gout and Lesch-Nyan syndrome); biotinidase (biotinidase deficiency); beta-glucocerebrosidase (Gaucher disease); beta-glucuronidase (Sly syndrome); peroxisome membrane protein 70 kDa (Zellweger syndrome); porphobilinogen deaminase (acute intermittent porphyria); alpha-1 antitrypsin (alpha-1 antitrypsin deficiency; emphysema); Factor VIII (hemophilia A); and erythropoietin (thalassemia).

[0533] In some embodiments, the method is used to produce a non-coding RNA (ncRNA), for example, shRNA, siRNA, miRNA, iRNA, etc. In some embodiments, by way of example and not limitation, the non-coding RNA molecule is a miRNA which regulates gene expression by targeting RNA transcript cleavage/degradation or 5 translational repression of the target messenger RNA (mRNA). In some embodiments, the non-coding RNA is an shRNA or siRNA. The shRNA or siRNA can be directed to any target RNA (see, e.g., Zhang et al., Biochemical Pharmacology, 2021, 189:114432; and Schaefer et al., 2018, PLOS ONE 13(1): e0191570).

[0534] In some embodiments, the DNA template and expressed RNA is one or more components of a gene editing system or recombination system. In some embodiments, the DNA template and corresponding RNA encodes a CRISPR associated protein 9 (Cas9) or expresses a guide RNA (gRNA). In some embodiments, the DNA template and the corresponding RNA encode a zinc-finger nuclease (ZFN) or transcription factor-like effector nucleases (TALEN). In some embodiments, the DNA template and corresponding RNA encode a recombinase, such as Cre recombinase or flp recombinase.

[0535] In some embodiments, the engineered RNA polymerase is used to produce RNA for use as probes. In some embodiments, labeled nucleotide triphosphate substrates or nucleotide analogs can be used in the RNA polymerase reaction to incorporate the labeled nucleotide or nucleotide analog into the synthesized RNA. In some embodiments, the probe or label is attached to the RNA following transcription, such by chemical crosslinker or spacer.

[0536] In a further aspect, the present disclosure provides a kit comprising an engineered RNA polymerase or a composition thereof described herein. In some embodiments, the kit further comprises at least a buffer. In some embodiments, the buffer includes a reducing agent, e.g., dithiothreitol or mercaptoethanol.

[0537] In some embodiments, the composition further comprises an additive, such as glycerol, polyethylene glycol (e.g., PEG 6000 and PEG 8000), dextran, bovine serum albumin (BSA), Ficoll, spermidine, or spermine. In some embodiments, the kit further comprises on or more NTPs, particularly rNTPs. In some embodiments, the engineered RNA polymerase in the kit is provided as a lyophilizate or in solution.

### EXAMPLES

[0538] The following Examples, including experiments and results achieved, are provided for illustrative purposes only and are not to be construed as limiting the present invention.

### Example 1

E. coli Expression Hosts Containing Recombinant RNA Polymerases Genes

[0539] The initial RNA polymerase enzyme used to produce the variants of the present invention (SEQ ID NO: 2) was cloned into the expression vector pCK110900 (See, FIG. 3 of US Pat. Appln. Publn. No. 2006/0195947) operatively linked to the lac promoter under control of the lacl repressor. The expression vector also contains the P15a origin of replication and the chloramphenicol resistance gene. E. coli W3110 were transformed with the resulting plasmids, using standard methods known in the art. The transformants were isolated by subjecting the cells to chloramphenicol selection, as known in the art (See e.g., U.S. Pat. No. 8,383,346 and WO2010/144103).

### Example 2

### Preparation of Shake-Flask Expressed RNA Polymerase Via IPTG Induction

[0540] For each variant of interest, E. coli W3110 was transformed with the corresponding plasmid and plated onto LB agar plates with 1% glucose and 30 gg/mL chloramphenicol and grown overnight at 37° C. A single colony from each culture was transferred to 5 mL of LB broth with 1% glucose and 30 μg/ml chloramphenicol. The cultures were grown for 20 h at 30° C., 250 rpm, and sub-cultured at a dilution of approximately 1:50 into 250 mL of Terrific Broth with 30 gg/mL of chloramphenicol, to a final OD600 of about 0.05. The cultures were incubated for approximately 195 min at 30° C., 250 rpm, to an OD600 of about 0.6, and then induced by the addition of IPTG at a final concentration of 1 mM. The induced cultures were incubated for 20 h at 30° C., 250 rpm. Following this incubation period, the cultures were centrifuged in an Avanti J-series centrifuge and JLA-16.250 fixed rotor (Beckman Coulter) at 4,000 rpm for 10 min at 4° C. The culture supernatant liquid was discarded, and the pellets were stored at −20° C. or taken directly into protein purification (Example 4).

### Example 3

### Preparation of Shake-Flask Expressed RNA Polymerase Via Autoinduction

[0541] For each variant of interest, E. coli W3110 was transformed with the corresponding plasmid and plated onto LB agar plates with 1% glucose and 30 gg/ml chloramphenicol and grown overnight at 37° C. A single colony from each culture was transferred to 5 ml of LB broth with 1% glucose and 30 gg/ml chloramphenicol. These starter cultures were grown for 20 h at 30° C., 250 rpm. Glycerol stocks were generated with 750 μL saturated starter culture and 750 μL sterile glycerol and were stored at −80° C. until use.

[0542] Glycerol stocks of E. coli cells harboring RNA polymerase variants (40 μL) were added to 160 mL autoinduction media (Terrific Broth with glucose and lactose supplemented to final concentrations of 0.0875% glucose and 0.035% lactose) to a final OD600 of about 0.05. The cultures were incubated for 20 h at 30° C., 250 rpm. Following this incubation period, the cultures were centrifuged in an Avanti J-series centrifuge and JLA-16.250 fixed rotor (Beckman Coulter) at 4,000 rpm for 10 min at 4° C. The culture supernatant liquid was discarded, and the pellets were stored at −20° C. or taken directly into protein purification (Example 4).

### Example 4

### Preparation of Shake-Flask Purified RNA Polymerase

[0543] Cell pellets of E. coli harboring RNA polymerase variants were resuspended in 30 mL of 50 mM Tris-HCl, pH 8.0. This cell suspension was chilled in an ice bath and lysed using a Microfluidizer cell disruptor (Microfluidics M-110L). The crude lysate was pelleted by centrifugation in an Avanti J-series centrifuge and JLA-16.250 fixed rotor (Beckman Coulter) at 10,000 rpm for 60 min at 4° C., and the supernatant liquid was then filtered through a 0.2 gm PES membrane to further clarify the lysate.

[0544] RNA polymerase clarified lysates were purified using an AKTA Pure purification system and a 5-mL HisTrap FF column (GE Healthcare). The shake-flask wash buffer comprised 50 mM Tris-HCl pH 8.0, 500 mM NaCl, 20 mM imidazole and the elution buffer comprised 50 mM Tris-HCl pH 8.0, 500 mM NaCl, 250 mM imidazole. The clarified lysate sample (40 mL) was loaded onto the column. The column was washed with wash buffer (100 mL, 20 column volumes, 12 mL min-1), and the His-tagged protein of interest was eluted with 100% elution buffer (25 mL, 5 column volumes), with eluate fractions (1.5 mL) collected in 96-well deep-well plates in an F9-C fraction collector. Following elution, the system and column were re-equilibrated with wash buffer (25 mL, 5 column volumes).

[0545] The four most concentrated 1.5 mL fractions based on measured absorption at 280 nm were pooled, and 3.3 mL of this pooled sample was dialyzed at 4° C. for 20 h in storage buffer (20 mM Tris-HCl pH 8.0, 50 mM KCl, 0.05 mM EDTA, and 50% (v/v) glycerol) in a 3.5 kDa molecular weight cutoff Slide-A-Lyzer™ dialysis cassette (Thermo Fisher) for buffer exchange. RNA polymerase concentrations in the purified protein preparations were measured by absorption at 280 nm. The RNA polymerase samples were stored at −20° C. until further use.

### Example 5

### Preparation of High-Throughput (HTP) RNAP-Containing Wet Cell Pellets

[0546] E. coli cells containing recombinant RNAP-encoding genes from monoclonal colonies were inoculated into 180 μL LB containing 1% glucose and 30 gg/mL chloramphenicol (CAM) in the wells of 96-well, shallow-well microtiter plates. The plates were sealed with O₂-permeable seals, and cultures were grown overnight at 30° C., 200 rpm, and 85% humidity. Then, 10 μL of each of the cell cultures were transferred into the wells of 96-well, deep-well plates containing 390 mL TB and 30 gg/mL CAM. The deep-well plates were sealed with 02-permeable seals and incubated at 30° C., 250 rpm, and 85% humidity until OD600 0.6-0.8 was reached. The RNAP gene expression was then induced by addition of IPTG to a final concentration of 1 mM and incubated for 20 h under the same conditions as originally used. The cells were then pelleted using centrifugation at 4,000 rpm for 10 min. The supernatants were discarded, and the pellets were frozen and stored at, −80° C. prior to lysis.

### Example 6

### Preparation of HTP Purified RNAP Variants

[0547] High-throughput purification was carried out using HisPur™ Ni-NTA spin plate (Life technologies, catalog number 88230) and Zeba spin desalting plate, 40 kDa MWCO, 96 wells (Life technologies, catalog number 87775). The polypeptides encoded by each gene were produced in HTP as described in Example 5. Lysis buffer (50 mM sodium phosphate, pH 7.5, 0.01% Tween-20, 2 mM MgSO₄, 0.5 mg/mL lysozyme, 0.5 mg/mL PMBS, 0.2 U/mL DNase I, 600 μL) was added to the deep-well plate containing cell paste in each well. The plates were shaken on a bench-top shaker for 120 minutes to resuspend and lyse the cells. The plate containing crude lysate was then centrifuged for 15 min at 4,000 rpm and 4° C.

[0548] Clarified lysate (300 μL) was transferred into a 96-well HisPur™ Ni-NTA spin plate pre-equilibrated with wash buffer (50 mM Tris-HCl, pH 8.0, 0.01% Tween-20, 500 mM NaCl, 20 mM imidazole). The lysate was incubated in the HisPur™ Ni-NTA spin plate for 5 min at 4° C., then the plates were centrifuged at 1000 ref for 2 min at 4° C., and the flowthrough lysate was discarded. The HisPur™ Ni-NTA spin plate was washed three times with wash buffer, centrifuging at 1000 ref for 3 min at 4° C. and discarding flowthrough with each wash. Elution buffer (50 mM Tris-HCl, pH 8.0, 0.01% Tween-20, 500 mM NaCl, 250 mM imidazole) was added to each well of the HisPur™ Ni-NTA spin plate, the plate was put on a 96-well hard-shell PCR plate, and centrifuged at 1000 ref for 1 min at 4° C., keeping the eluate.

[0549] Eluate solutions from HisPur™ Ni-NTA purification (90 μL) were transferred into a Zeba spin desalting plate pre-equilibrated with glycerol-free storage buffer (40 mM Tris-HCl, pH 8.0, 100 mM KCl, 0.1 mM EDTA). The Zeba spin desalting plate was placed on a 96-well hard-shell PCR plate and centrifuged at 1000 ref for 2 min at 4° C. This HTP-purified and desalted protein was used directly in HTP-purified protein reactions. Desalted protein was mixed with 1 volume equivalent of 80% glycerol and stored at −20° C. for future use.

### Example 7

### Description of General Reaction Protocol and Templates

[0550] This Example is to briefly describe the general reaction protocol for RNA quantitation via Quant-It™ assay kits and capping assays via co-transcriptional capping and fluorescent labeling IVT reactions. The precise reaction conditions used within each Example are detailed further those examples.

[0551] RNA quantitation assays were performed to measure residual RNA polymerase activity in reactions following a thermal challenge. Cells harboring RNAP variants of interest were resuspended in lysis buffer and shaken on a bench-top shaker to resuspend. Resuspended cells were thermally challenged and, following centrifugation, the clarified supernatant liquid was used to supply RNA polymerase to in vitro transcription reactions. These in vitro transcription reactions (1-10 μL reaction volume) comprised RNAP variants, 30 mM Tris-HCl, pH 8.0, 26.9 MgCl₂, 50 ng/μL DNA template, 0-3 mM DTT, 5 mM NTPs, 1 U/μL RNase inhibitor, and 2 U/mL inorganic pyrophosphatase. The DNA template used in these reactions (6kb-GGG) is a linearized DNA template with a GGG initiator codon and 61% GC content in the 6kb-long transcribed region. The IVTs were carried out at 37° C. for 60 minutes, then quenched with EDTA. IVT yields were quantified using the Quant-It™ RNA assay kit, broad range (Invitrogen, Q10213). Sample was added to working solution and fluorescence was measured using a SpectraMax M5 fluorescent plate reader, using excitation and emission maxima of 644 nm and 673 nm, respectively.

[0552] Co-transcriptional capping was assayed via in vitro transcription in the presence of both cap analog and fluorescently labeled nucleotide analog to select RNAP variants with improved incorporation of the cap analog and fluorescently labeled NTPs. These in vitro transcription reactions (1 μL reaction volume) comprised RNAP variants, 30 mM Tris-HCl, pH 8.0, 26.9 mM MgCl₂, 1 μM DNA template, 5 mM ATP, 5 mM CTP, 5 mM GTP, 1 mM UTP, 0.2 uM ChromaTide™ Alexa Fluor™ 488-5-UTP (Invitrogen, C11403), cap analog (TriLink), 1 U/μL RNase inhibitor, and 2 U/mL inorganic pyrophosphatase.

[0553] The templates used for these co-transcriptional capping assays were annealed duplexes of oligonucleotides comprising the RNAP promoter sequence and a 15-nucleotide transcribed region. The 5′-end of the reverse complement includes two nucleotides with 2′-methoxy modifications. For reactions using anti-reverse cap analog (ARCA), the oligonucleotide template with the GGC initiator sequence (SEQ ID NOs 2019/2020) was used to generate the RNA transcripts SEQ ID NO 2021-2024. SEQ ID NOs 2023 and 2024 are fluorescently labeled (and thus visible on CE), and SEQ ID NO 2024 is the capped and labeled product. For reactions using CseanCap AG, the oligonucleotide template with the AGG initiator sequence (SEQ ID NOs 2025/2026) was used to generate the RNA transcripts SEQ ID NO 2027-2030. SEQ ID NOs 2029 and 2030 are fluorescently labeled (and thus visible on CE), and SEQ ID NO 2030 is the capped and labeled product. The sequences and descriptions of these oligos are shown in Table 7.1. The IVT reactions were incubated at 37 C for 60 minutes, then quenched with EDTA. Analysis of the co-transcriptional capping samples was carried out via capillary electrophoresis using an ABI 3500×1 Genetic Analyzer (ThermoFisher).

TABLE 7.1
Oligonucleotide template and mRNA products used
in o-transcriptional capping assays

| SEQ ID | | |
|---|---|---|
| NO: | Description | Sequence |
| 2019 | DNA template forward | CTAATACGACTCACTATAGGCACCCAGGCAAGT |
| | oligo initiating with GGC, | |
| | paired with SEQ ID NO | |
| | 2020 | |
| 2020 | DNA template reverse | mAmCTTGCCTGGGTGCCTATAGTGAGTCGTATTAG¹ |
| | complement oligo paired | |
| | with SEQ ID NO 2019 | |
| 2021 | RNA produced using | (5pppG)GCACCCAGGCAAGU² |
| | DNA template from SEQ | |
| | ID NOs 2019/2020 | |
| 2022 | RNA produced using | (ARCA-G)GCACCCAGGCAAGU³ |
| | DNA template from SEQ | |
| | ID NOs 2019/2020 with | |
| | ARCA incorporated | |
| 2023 | RNA produced using | (5pppG)GCACCCAGGCAAG(AF488-U)^{2,4} |
| | DNA template from SEQ | |
| | ID NOs 2019/2020 Alexa- | |
| | 488-UTP incorporated | |
| 2024 | RNA produced using | (ARCA-G)GCACCCAGGCAAG(AF488-U)^{3,4} |
| | DNA template from SEQ | |
| | ID NOs 2019/2020 with | |
| | ARCA and Alexa-488- | |
| | UTP incorporated | |
| 2025 | DNA template forward | CTAATACGACTCACTATAAGGCCCCAGGACGAT |
| | oligo initiating with AGG, | |
| | paired with SEQ ID NO | |
| | 2026 | |
| 2026 | DNA template reverse | mAmUCGTCCTGGGGCCTTATAGTGAGTCGTATTAG¹ |
| | complement oligo paired | |
| | with SEQ ID NO 2025 | |
| 2027 | RNA produced using | (5pppA)GGCCCCAGGACGAU² |
| | DNA template from SEQ | |
| | ID NOs 2025/2026 | |
| 2028 | RNA produced using | (CleanCap-AG)GCCCCAGGACGAU³ |
| | DNA template from SEQ | |
| | ID NOs 2025/2026 with | |
| | CleanCap AG | |
| | incorporated | |
| 2029 | RNA produced using | (5pppA)GGCCCCAGGACGA(AF488-U)^{2,4} |
| | DNA template from SEQ | |
| | ID NOs 2025/2026 with | |
| | Alexa-488-UTP | |
| | incorporated | |
| 2030 | RNA produced using | (CleanCap-AG)GCCCCAGGACGA(AF488-U)^{3,4} |
| | DNA template from SEQ | |
| | ID NOs 2025/2026 with | |
| | CleanCap AG and Alexa- | |
| | 488-UTP incorporated | |

¹mA, mU, mC, mG denote non-native 2′-methoxy-NTP oligos.
²(5pppA), (5pppU), (5pppC), (5pppG) denote 5′-triphosphate nucleotides.
³(CleanCap-AG), (ARCA-G) denote cap analogs CleanCap-AG and anti-reverse cap analog, respectively.
⁴(AF488-U) denotes Alexa-488-labeled UTP.

### Example 8

### Improvements Over SEQ ID NO: 2 in Activity

[0554] The RNA polymerase of SEQ ID NO: 2 was selected as the parent protein for this round of directed evolution. Libraries of engineered genes were produced using well-established techniques (e.g., saturation mutagenesis, recombination of previously identified beneficial mutations). The polypeptides encoded by each gene were produced in HTP as described in Example 5. Lysis buffer (50 mM sodium phosphate, pH 7.5, 0.1% Triton X-100, 2 mM MgSO₄, 0.5 mM DTT, 0.5 mg/mL lysozyme, 0.5 mg/mL PMBS, 0.2 U/mL DNase I, 400 μL total volume) was added to the deep-well plate containing cell paste in each well. The cells were shaken on a bench-top shaker for two hours at room temperature to resuspend and lyse the cells. The plate containing crude lysate was then centrifuged for 15 min at 4,000 rpm and 4° C. IVT reactions (10 μL reaction volume) were set up in 96-well hard-shell PCR plates with the following reaction conditions: 6% lysate loading, 30 mM Tris-HCl, pH 8.0, 26.9 mM MgCl₂, 3 mM DTT, 50 ng/μL DNA template (6kb-GGG), 5 mM ATP, 5 mM CTP, 5 mM GTP, 5 mM UTP, 1 U/μL RNase inhibitor, 2 U/mL inorganic pyrophosphatase. The IVT reactions were incubated at 37° C. for 60 minutes, then quenched with 5 mM EDTA (39 volume equivalents).

[0555] The IVT yield was quantified using the Quant-It™ RNA assay kit, broad range (Invitrogen, Q10213). Sample (2 μL) was added to working solution (20 μL) in a 384-well solid black polystyrene microplate. Fluorescence was measured at room temperature using a SpectraMax M5 fluorescent plate reader, using excitation and emission maxima of 644 nm and 673 nm, respectively.

[0556] Residual activity after heat treatment relative to SEQ ID NO: 2 (activity FIOP) was calculated as the ratio of relative fluorescence units (RFU) between the sample and SEQ ID NO: 2 and is shown in Table 8.1.

TABLE 8.1
RNA Polymerase Activity of Variants Relative to SEQ ID NO: 2

| | Amino Acid | |
|---|---|---|
| SEQ | Differences | Activity FIOP |
| ID NO: | (Relative to | (Relative to |
| (nt/aa) | SEQ ID NO: 2) | SEQ ID NO: 2)¹ |
| 3/4 | S796N/K800M/D841S/E884K | + |
| 5/6 | K394R/C846N | + |
| 7/8 | K394R/K808A/C846N | + |
| 9/10 | S404Y/C846N | + |
| 11/12 | K394R/S796N/S845E/C846N | + |

¹Levels of increased activity were determined relative to the reference polypeptide of SEQ ID NO: 2 and defined as follows: “+” 1.32-to 2.00-fold increased activity

### Example 9

### Improvements Over SEQ ID NO: 4

[0557] SEQ ID NO: 4 was selected as the parent protein for this round of directed evolution. Libraries of engineered genes were produced using well-established techniques (e.g., saturation mutagenesis, recombination of previously identified beneficial mutations). The polypeptides encoded by each gene were produced in HTP as described in Example 5. Lysis buffer (50 mM sodium phosphate, pH 7.5, 0.1% Triton X-100, 2 mM MgSO₄, 1 mM DTT, 0.5 mg/mL lysozyme, 0.5 mg/mL PMBS, 0.4 U/mL DNase I, 400 μL total volume) was added to the deep-well plate containing cell paste in each well. The cells were shaken on a bench-top shaker to resuspend. Resuspended cells (100 μL) were transferred to a 96-well hard-shell PCR plate and incubated at 30° C. for 30 minutes. The plate was then centrifuged for 15 min at 4,000 rpm and 4° C. The clarified supernatant liquids were transferred into a 384-well polypropylene source microplate. In vitro transcription reactions (1 μL reaction volume) were set up in 384-well hard-shell PCR plates with the following reaction conditions: 20% lysate loading, 30 mM Tris-HCl, pH 8.0, 26.9 mM MgCl₂, 3 mM DTT, 50 ng/μL DNA template (6kb-GGG), 5 mM ATP, 5 mM CTP, 5 mM GTP, 5 mM UTP, 1 U/μL RNase inhibitor, 2 U/mL inorganic pyrophosphatase. The IVT reactions were incubated at 37° C. for 60 minutes, then quenched with 5 mM EDTA (19 volume equivalents).

[0558] The IVT yield was quantified using the Quant-It™ RNA assay kit, broad range (Invitrogen, Q10213). Sample (3 μL) was added to working solution (60 μL) in a 384-well solid black polystyrene microplate. Fluorescence was measured at room temperature using a SpectraMax M5 fluorescent plate reader, using excitation and emission maxima of 644 nm and 673 nm, respectively.

[0559] Residual activity after heat treatment relative to SEQ ID NO: 4 (activity FIOP) was calculated as the ratio of relative fluorescence units (RFU) between the sample and SEQ ID NO: 4 and is shown in Table 9.1.

TABLE 9.1
RNA Polymerase Activity of Variants Relative to SEQ ID NO: 4

| | | Activity FIOP |
|---|---|---|
| | Amino Acid | after 30° C. heat |
| SEQ ID | Differences | treatment |
| NO: | (Relative to | (Relative to SEQ |
| (nt/aa) | SEQ ID NO: 4) | ID NO: 4)¹ |
| 13/14 | M839F/S841D | +++ |
| 15/16 | K884E/F887Y | +++ |
| 17/18 | V694E | +++ |
| 19/20 | V588M | +++ |
| 21/22 | L541Q | +++ |
| 23/24 | F852L | +++ |
| 25/26 | A645V | +++ |
| 27/28 | S582A | +++ |
| 29/30 | V657I | +++ |
| 31/32 | V574P | +++ |
| 33/34 | G456E | +++ |
| 35/36 | V574Y | +++ |
| 37/38 | G563A | +++ |
| 39/40 | L865R | +++ |
| 41/42 | K720P | +++ |
| 43/44 | V528A | +++ |
| 45/46 | L601V | +++ |
| 47/48 | G456T | +++ |
| 49/50 | N690D | +++ |
| 51/52 | V694G | +++ |
| 53/54 | E614Q | +++ |
| 55/56 | I550L | +++ |
| 57/58 | K187N | +++ |
| 59/60 | R57A | ++ |
| 61/62 | H168T | ++ |
| 63/64 | H531S | ++ |
| 65/66 | A347T | ++ |
| 67/68 | F18V | ++ |
| 69/70 | G527R | ++ |
| 71/72 | M197V | ++ |
| 73/74 | A76T/C537S | ++ |
| 75/76 | K171E | ++ |
| 77/78 | Y418E | ++ |
| 79/80 | R579L | ++ |
| 81/82 | V696F | ++ |
| 83/84 | A77T | ++ |
| 85/86 | V337I | ++ |
| 87/88 | I11E | ++ |
| 89/90 | M197Q | ++ |
| 91/92 | K200L | ++ |
| 93/94 | K186C | ++ |
| 95/96 | R64D/A296V | ++ |
| 97/98 | M197W | ++ |
| 99/100 | K200T | ++ |
| 101/102 | T724E | ++ |
| 103/104 | L198V | ++ |
| 105/106 | I13G | ++ |
| 107/108 | K186A | ++ |
| 109/110 | I529T | ++ |
| 111/112 | K419E | ++ |
| 113/114 | L198S | ++ |
| 115/116 | L593A | ++ |
| 117/118 | L164R | ++ |
| 119/120 | Y535T | ++ |
| 121/122 | G527M | ++ |
| 123/124 | F464L | ++ |
| 125/126 | K607P | ++ |
| 127/128 | R59L | ++ |
| 129/130 | L23I | ++ |
| 131/132 | K747R | + |
| 133/134 | F169V | + |
| 135/136 | V71E | + |
| 137/138 | R160C | + |
| 139/140 | A195T | + |
| 141/142 | K78N | + |
| 143/144 | I612K | + |
| 145/146 | V588H | + |
| 147/148 | C537S | + |
| 149/150 | N74R | + |
| 151/152 | K167S | + |
| 153/154 | V192T | + |
| 155/156 | R64H | + |
| 157/158 | S648V | + |
| 159/160 | H168I | + |
| 161/162 | V193G | + |
| 163/164 | N12E | + |
| 165/166 | A254T | + |
| 167/168 | K78Q | + |
| 169/170 | L601M | + |
| 171/172 | G182F | + |
| 173/174 | A254M | + |
| 175/176 | L23T | + |
| 177/178 | F189Q | + |
| 179/180 | E511G | + |
| 181/182 | C278M | + |
| 183/184 | A195D | + |
| 185/186 | A77L | + |
| 187/188 | A45T | + |
| 189/190 | K171G | + |
| 191/192 | K67Q | + |
| 193/194 | K186G | + |
| 195/196 | A25V | + |
| 197/198 | R41A | + |
| 199/200 | H183A | + |
| 201/202 | R59H | + |
| 203/204 | L202V | + |
| 205/206 | D858K | + |
| 207/208 | A76E | + |
| 209/210 | T82L | + |
| 211/212 | T82L/N178S | + |
| 213/214 | K167D | + |
| 215/216 | K186N | + |
| 217/218 | K340T | + |
| 219/220 | F189K | + |
| 221/222 | K179D | + |
| 223/224 | K720E | + |
| 225/226 | M61C | + |
| 227/228 | M61K | + |
| 229/230 | E505T | + |
| 231/232 | K607R | + |
| 233/234 | G784A | + |
| 235/236 | K686Q | + |
| 237/238 | K200E | + |
| 239/240 | V477E | + |
| 241/242 | R579G | + |
| 243/244 | V327L | + |
| 245/246 | V184T | + |
| 247/248 | S319D | + |
| 249/250 | N668S | + |

¹Levels of increased activity were determined relative to the reference polypeptide of SEQ ID NO: 4 and defined as follows: “+” 1.32 to 1.86-fold increased activity; “++” >1.86-fold increased activity; “+++” >2.82-fold increased activity.

### Example 10

### Improvements Over SEQ ID NO: 26

[0560] SEQ ID NO: 26 was selected as the parent protein for this round of directed evolution. Libraries of engineered genes were produced using well-established techniques (e.g., saturation mutagenesis, recombination of previously identified beneficial mutations). The polypeptides encoded by each gene were produced in HTP as described in Example 5. Lysis buffer (50 mM sodium phosphate, pH 7.5, 0.1% Triton X-100, 2 mM MgSO₄, 1 mM DTT, 0.5 mg/mL lysozyme, 0.5 mg/mL PMBS, 600 μL total volume) was added to the deep-well plate containing cell paste in each well. The cells were shaken on a bench-top shaker to resuspend. Resuspended cells (100 μL) were transferred to a 96-well hard-shell PCR plate and incubated at 32° C. (Table 10.1) or 34° C. (Table 10.2) for 30 minutes. The plate was then centrifuged for 15 min at 4,000 rpm and 4° C. The clarified supernatant liquids were transferred into a 384-well polypropylene source microplate. In vitro transcription reactions (1 μL reaction volume) were set up in 384-well hard-shell PCR plates with the following reaction conditions: 10% lysate loading, 30 mM Tris-HCl, pH 8.0, 26.9 mM MgCl₂, 3 mM DTT, 50 ng/μL DNA template (6kb-GGG), 5 mM ATP, 5 mM CTP, 5 mM GTP, 5 mM UTP, 1 U/μL RNase inhibitor, 2 U/mL inorganic pyrophosphatase. The IVT reactions were incubated at 37° C. for 60 minutes, then quenched with 5 mM EDTA (9 volume equivalents).

[0561] The IVT yield was quantified using the Quant-It™ RNA assay kit, broad range (Invitrogen, Q10213). Sample (3 μL) was added to working solution (60 μL) in a 384-well solid black polystyrene microplate. Fluorescence was measured at room temperature using a SpectraMax M5 fluorescent plate reader, using excitation and emission maxima of 644 nm and 673 nm, respectively.

[0562] Residual activity after heat treatment relative to SEQ ID NO: 26 (activity FIOP) was calculated as the ratio of relative fluorescence units (RFU) between the sample and SEQ ID NO: 26 and is shown in Table 10.1 (32° C. heat treatment) and Table 10.2 (34° C. heat treatment).

TABLE 10.1
RNA Polymerase Activity of Variants Relative to SEQ ID NO: 26

| | | Activity FIOP |
|---|---|---|
| | Amino Acid | after 32° C. heat |
| | Differences | treatment |
| SEQ ID | (Relative to | (Relative to SEQ |
| NO: (nt/aa) | SEQ ID NO: 26) | ID NO: 26) ¹ |
| 251/252 | V622E | +++ |
| 253/254 | L831R | +++ |
| 255/256 | S598E | +++ |
| 257/258 | K419N | +++ |
| 259/260 | L198S | +++ |
| 261/262 | V588A | +++ |
| 263/264 | I21L | +++ |
| 265/266 | R579Q/N704D | +++ |
| 267/268 | M190S | +++ |
| 269/270 | M197V | +++ |
| 271/272 | R57V | +++ |
| 273/274 | F189I | +++ |
| 275/276 | K187A | +++ |
| 277/278 | A195E | +++ |
| 279/280 | A195T | +++ |
| 281/282 | K187V | +++ |
| 283/284 | V181P | +++ |
| 285/286 | Q191P | ++ |
| 287/288 | L198V | ++ |
| 289/290 | V588R | ++ |
| 291/292 | V622T | ++ |
| 293/294 | A188G | ++ |
| 295/296 | F189L | ++ |
| 297/298 | K419E | ++ |
| 299/300 | L164I | ++ |
| 301/302 | F169V | ++ |
| 303/304 | F189V | ++ |
| 305/306 | V184S | ++ |
| 307/308 | K171G | ++ |
| 309/310 | I21E | ++ |
| 311/312 | K186Q | ++ |
| 313/314 | G527E | ++ |
| 315/316 | V184P | ++ |
| 317/318 | R57G | ++ |
| 319/320 | L177V | ++ |
| 321/322 | L66D | ++ |
| 323/324 | K78I/A565V | ++ |
| 325/326 | K419M | ++ |
| 327/328 | M190A | ++ |
| 329/330 | N172I | ++ |
| 331/332 | M197W | ++ |
| 333/334 | I161V | ++ |
| 335/336 | V193L | ++ |
| 337/338 | V588N | + |
| 339/340 | L593A | + |
| 341/342 | N668A | + |
| 343/344 | A195H | + |
| 345/346 | F18C | + |
| 347/348 | K67R | + |
| 349/350 | V181R | + |
| 351/352 | K170R | + |
| 353/354 | T286V | + |
| 355/356 | M61E | + |
| 357/358 | K419V | + |
| 359/360 | K60V | + |
| 361/362 | H183C | + |
| 363/364 | G456Y | + |
| 365/366 | K179P | + |
| 367/368 | E194R | + |
| 369/370 | K468R | + |
| 371/372 | V193I | + |
| 373/374 | K720A | + |
| 375/376 | S534E | + |
| 377/378 | L601S | + |
| 379/380 | A56L | + |
| 381/382 | Q191C | + |
| 383/384 | A195R | + |
| 385/386 | A122G | + |
| 387/388 | K60M | + |
| 389/390 | L84V | + |
| 391/392 | Y418V | + |
| 393/394 | V181T | + |
| 395/396 | H34M/A526V | + |
| 397/398 | E701R | + |
| 399/400 | N530T | + |
| 401/402 | K171Y | + |
| 403/404 | E194C | + |
| 405/406 | R59H | + |
| 407/408 | A260Y | + |
| 409/410 | T82F | + |
| 411/412 | N413D | + |
| 413/414 | T605R | + |
| 415/416 | A56I | + |
| 417/418 | G54Q | + |
| 419/420 | R59I | + |
| 421/422 | E256L | + |

¹ Levels of increased activity were determined relative to the reference polypeptide of SEQ ID NO: 26 and defined as follows: “+” 1.34 to 1.96-fold increased activity; “++” >1.96-fold increased activity; “+++” >2.71-fold increased activity.

TABLE 10.2
RNA Polymerase Activity of Variants Relative to SEQ ID NO: 26

| | | Activity FIOP |
|---|---|---|
| | | after 34° C. heat |
| SEQ ID | Amino Acid | treatment |
| NO: | Differences | (Relative to SEQ |
| (nt/aa) | (Relative to SEQ ID NO: 26) | ID NO: 26) ¹ |
| 423/424 | V337I/G456E/V574Y/L601V/E614Q/V694G/K720P | +++ |
| 425/426 | M197V/K200T/Y418E/I550L/V574P/E614Q/N690D/V694G | +++ |
| 427/428 | M197V/K200T/V337I/A347T/G456E/1550L/G563A/K720P | +++ |
| 429/430 | G456E/G563A/V574P/V694G/K720P | +++ |
| 431/432 | K171E/M197V/K200T/G456T/V574Y/V694G | +++ |
| 433/434 | M197V/A347T/Y418E/G456E/V574Y/N690D | +++ |
| 435/436 | K200T/Y418E/G456E/H531S/V574Y/E614Q | +++ |
| 437/438 | Y418E/V574P | +++ |
| 439/440 | I11E/A77T/K200T/V574P | +++ |
| 441/442 | I11E/K200T/A347T/G456T/V694G/K720P | +++ |
| 443/444 | I11E/K200T/G456E/V574Y | +++ |
| 445/446 | K171E/K200T/H531S/S582A/L601V/E614Q/K720P | ++ |
| 447/448 | G456E/H531S/V574P/N690D | ++ |
| 449/450 | I13G/V337I/G456T/1550L | ++ |
| 451/452 | I11E/K200T/V337I/G456E | ++ |
| 453/454 | A77T/K171E/A347T/G456T | ++ |
| 455/456 | I13G/V337I/G527R/I550L/G563A/V574P/L601V | ++ |
| 457/458 | M197V/K200T/H531S/I550L/V694G | ++ |
| 459/460 | A77T/M197V/K200T/G456E/1550L | ++ |
| 461/462 | A77T/M197V/G456T/H531S/V574Y/E614Q/N690D | ++ |
| 463/464 | A77T/K200T/A347T/V574Y | ++ |
| 465/466 | I13G/K200T/A347T/G456T/K720P | ++ |
| 467/468 | I13G/A77T/H531S/V574P/K720P | ++ |
| 469/470 | L601V/E614Q/V694G | ++ |
| 471/472 | I13G/Y418E/G456T/V694G/K720P | ++ |
| 473/474 | K15E/A77T/K200T/V337I/G456E/I550L/V574Y/L601V/E614Q/ | ++ |
| | N690D/K720P | |
| 475/476 | I13G/I550L/N690D | ++ |
| 477/478 | A77T/G456T/I550L | ++ |
| 479/480 | A77T/V337I/A347T/I550L/V574Y | ++ |
| 481/482 | K200T/A347T/G456E/V694G | + |
| 483/484 | M197V/V337I/A347T/G456T/H531S/V574Y | + |
| 485/486 | I13G/G456E/V528A | + |
| 487/488 | K200T/V337I/G456E/N690D | + |
| 489/490 | M197V/V337I/G527R/V574Y/L601V | + |
| 491/492 | M197V/G456E/R579L/E614Q | + |
| 493/494 | I13G/K720P | + |
| 495/496 | M197V/K200T/Y418E/V574P/V694G | + |
| 497/498 | M197V/K200T/L601V | + |
| 499/500 | M197V/A347T/Y418E/V574Y | + |
| 501/502 | A347T/L601V/V694G | + |
| 503/504 | I550L/N690D | + |
| 505/506 | K200T/Y418E/I550L | + |
| 507/508 | K200T/A347T | + |
| 509/510 | A77T/K171E/M197V | + |
| 511/512 | A77T/H531S/V574P | + |
| 513/514 | A77T/K171E/K720P | + |
| 515/516 | M197V/G527R | + |
| 517/518 | K200T | + |
| 519/520 | M197V/K200T/Y418E/L601V | + |
| 521/522 | I11E/H531S/S582A | + |
| 523/524 | I13G/M197V/K200T/Y418E/V694G | + |
| 525/526 | I13G/A77T/K200N/Y418E/G456T | + |
| 527/528 | A77T/G456T/S582A | + |
| 529/530 | I11E/N690D | + |
| 531/532 | I11E/K200T | + |
| 533/534 | I11E/G456E/H531S/T616A | + |
| 535/536 | A77T/V574Y | + |
| 537/538 | K200T/H531S/N690D | + |
| 539/540 | V337I/Y418E/H531S/V574Y/N690D | + |

¹ Levels of increased activity were determined relative to the reference polypeptide of SEQ ID NO: 26 and defined as follows: “+” 1.32 to 2.54-fold increased activity; “++” >2.54-fold increased activity; “+++” >4.02-fold increased activity.

### Example 11

### Improvements Over SEQ ID NO: 424

[0563] The RNA polymerase of SEQ ID NO: 424 was selected as the parent protein for this round of directed evolution. Libraries of engineered genes were produced using well-established techniques (e.g., saturation mutagenesis, recombination of previously identified beneficial mutations). The polypeptides encoded by each gene were produced in HTP as described in Example 5. Lysis buffer (50 mM sodium phosphate, pH 7.5, 0.1% Triton X-100, 2 mM MgSO₄, 0.5 mg/mL lysozyme, 0.5 mg/mL PMBS, 1 mM DTT, 600 μL) was added to the deep-well plate containing cell paste in each well. The cells were shaken on a bench-top shaker to resuspend. Resuspended cells (100 μL) were transferred to a 96-well hard-shell PCR plate and incubated at 38° C. for 30 minutes. The plate was then centrifuged for 15 min at 4,000 rpm and 4° C. The clarified supernatant liquids were transferred into a 384-well polypropylene source microplate. In vitro transcription reactions (1 μL reaction volume) were set up in 384-well hard-shell PCR plates with the following reaction conditions: 10% lysate loading, 30 mM Tris-HCl, pH 8.0, 26.9 mM MgCl₂, 3 mM DTT, 50 ng/μL DNA template (6kb-GGG), 5 mM ATP, 5 mM CTP, 5 mM GTP, 5 mM UTP, 1 U/μL RNase inhibitor, 2 U/mL inorganic pyrophosphatase. The IVT reactions were incubated at 37° C. for 60 minutes, then quenched with 5 mM EDTA (9 volume equivalents).

[0564] The IVT yield was quantified using the Quant-It™ RNA assay kit, broad range (Invitrogen, Q10213). Sample (3 μL) was added to working solution (60 μL) in a 384-well solid black polystyrene microplate. Fluorescence was measured at room temperature using a SpectraMax M5 fluorescent plate reader, using excitation and emission maxima of 644 nm and 673 nm, respectively.

[0565] Residual activity after heat treatment relative to SEQ ID NO: 424 (activity FIOP) was calculated as the ratio of relative fluorescence units (RFU) between the sample and SEQ ID NO: 424 and is shown in Table 11.1.

TABLE 11.1
RNA Polymerase Activity of Variants Relative to SEQ ID NO: 424

| | | Activity FIOP |
|---|---|---|
| | | after 38° C. heat |
| | Amino Acid | treatment |
| SEQ ID | Differences | (Relative to |
| NO: | (Relative to | SEQ ID NO: |
| (nt/aa) | SEQ ID NO: 424) | 424) ¹ |
| 541/542 | L541Q/V622E/D723G | +++ |
| 543/544 | L541Q/V588M/L865R | +++ |
| 545/546 | M839F | +++ |
| 547/548 | A195H/A347T/H531S/I550L/V588M | +++ |
| 549/550 | K419E/D723G | +++ |
| 551/552 | N172I/V184P/I550L/V588M | +++ |
| 553/554 | V184P/A195H/A347T/Y418E/I550L/V588R | +++ |
| 555/556 | K171G/V184P/A347T/H531S/I550L | +++ |
| 557/558 | K171G/V184P/A347T/Y418E/H531S/ | +++ |
| | I550L/V588M | |
| 559/560 | F169V/L541Q/V588M/L865R | +++ |
| 561/562 | S841D | +++ |
| 563/564 | M839F/S841D | +++ |
| 565/566 | K171G/A347T/Y418E/I550L | +++ |
| 567/568 | K171G/V184P/A347T/Y418E/V588M | +++ |
| 569/570 | A195H/G563A/V588A | +++ |
| 571/572 | K187V/A195T/H531S/I550L/V588A | +++ |
| 573/574 | A347T/I550L/V588M | +++ |
| 575/576 | L541Q/L865R | +++ |
| 577/578 | A347T/H531S/G563A/V588R | +++ |
| 579/580 | K419N/L541Q/L865R | +++ |
| 581/582 | K187A/A347T/Y418E/H531S/I550L | +++ |
| 583/584 | F169V/K419N | +++ |
| 585/586 | K187V/A347T/H531S/V588M | +++ |
| 587/588 | K186Q/A347T/I550L/V588R | +++ |
| 589/590 | K419N/D723G | +++ |
| 591/592 | G563A/V588M | +++ |
| 593/594 | V184P/Y418E/I550L/V588M | +++ |
| 595/596 | D723G | +++ |
| 597/598 | N172I/Y418E/I550L/V588M | +++ |
| 599/600 | K171G/K186Q/Y418E/I550L/V588M | +++ |
| 601/602 | A347T/I550L/G563A | +++ |
| 603/604 | V622E | +++ |
| 605/606 | L541Q/D723G | ++ |
| 607/608 | K419N/L541Q/M839F/S841D | ++ |
| 609/610 | K171G/Y418E/H531S/I550L | ++ |
| 611/612 | K171G/H531S/V588A | ++ |
| 613/614 | K186Q/A347T/V588M | ++ |
| 615/616 | H531S/I550L/G563A | ++ |
| 617/618 | K171G/K186Q/H531S/I550L | ++ |
| 619/620 | G563A/V588R | ++ |
| 621/622 | K187V/I550L | ++ |
| 623/624 | K171G/Y418E/H531S/G563A/V588A | ++ |
| 625/626 | A195E/I550L | ++ |
| 627/628 | A347T/Y418E/I550L/V588R | ++ |
| 629/630 | K171G/K187V/V588M | ++ |
| 631/632 | K187A/A347T/H531S/I550L | ++ |
| 633/634 | V184P/H531S/I550L | ++ |
| 635/636 | K171G/V184P/Y418E/G563A/V588R | ++ |
| 637/638 | A195E/V588M | ++ |
| 639/640 | F169V/V622E/D723G | ++ |
| 641/642 | K187V/V588M | ++ |
| 643/644 | V184P/I550L/V588R | ++ |
| 645/646 | F169V/F189I/V622E | ++ |
| 647/648 | K187A/Y418E/I550L | ++ |
| 649/650 | V588M | ++ |
| 651/652 | H531S/G563A/V588R | ++ |
| 653/654 | Y418E/G563A/V588M | ++ |
| 655/656 | H531S/V588M | ++ |
| 657/658 | N172I/Y418E/I550L/V588R | ++ |
| 659/660 | N172I/V184P/H531S/I550L | ++ |
| 661/662 | H531S/V588A | ++ |
| 663/664 | Q191P/H531S/V588M | ++ |
| 665/666 | A347T/Y418E/I550L | ++ |
| 667/668 | G563A | ++ |
| 669/670 | K187V/Y418E/I550L | ++ |
| 671/672 | N172I/M197V/A347T/V588M | ++ |
| 673/674 | N172I/V184P/A347T/Y418E/H531S/G563A | ++ |
| 675/676 | K171G/A195T/A347T/Y418E/V588A | ++ |
| 677/678 | K171G/V588M | ++ |
| 679/680 | K171G/K187A/I550L | ++ |
| 681/682 | K171G/V184P/A347T/Y418E/G563A | ++ |
| 683/684 | V588A | ++ |
| 685/686 | A347T/H531S/V588M | ++ |
| 687/688 | N172I/K186Q/K187A/H531S/G563A/V588A | ++ |
| 689/690 | I550L | ++ |
| 691/692 | H531S/I550L | ++ |
| 693/694 | N172I/V588M | ++ |
| 695/696 | A195H/Y418E/I550L | ++ |
| 697/698 | A195H/A347T/Y418E/H531S/G563A | ++ |
| 699/700 | K171G/A195E/I550L | ++ |
| 701/702 | V181G/Y418E/G563A | + |
| 703/704 | V184P/A347T/G563A/R579C | + |
| 705/706 | K200T/A347T/Y418E | + |
| 707/708 | N172I/A195T/I550L | + |
| 709/710 | M197V/A347T/Y418E/G563A | + |
| 711/712 | K171G/G563A | + |
| 713/714 | H531S/G563A | + |
| 715/716 | Q191P/Y418E/H531S/I550L | + |
| 717/718 | N172I/A195H/H531S/V588A | + |
| 719/720 | A347T/H531S/G563A | + |
| 721/722 | F169V/V181P/L198S/D723G/L865R | + |
| 723/724 | K171G/Y418E/V588M | + |
| 725/726 | V184P/Y418E/V588R | + |
| 727/728 | L541Q | + |
| 729/730 | Y418E/I550L | + |
| 731/732 | N172I/A347T/H531S/V588R | + |
| 733/734 | N172I/K187V/I550L | + |
| 735/736 | F169V/V181P/M190I/K419N | + |
| 737/738 | D723G/S841D | + |
| 739/740 | A347T/Y418E/G563A | + |
| 741/742 | K186Q/M197V/K200T/I550L | + |
| 743/744 | A347T/I550L | + |
| 745/746 | N172I/K200T/V588A | + |
| 747/748 | K186Q/G563A | + |
| 749/750 | N172I/K186Q/A347T/H531S/V588R | + |
| 751/752 | N172I/V184P/Y418E/V588M | + |
| 753/754 | K171G/A347T/Y418E/G563A | + |
| 755/756 | V184P/K200T | + |
| 757/758 | N172I/A347T/Y418E/V588R | + |
| 759/760 | L198S/K419N/L541Q | + |
| 761/762 | K171G/K187V/Y418E/G563A | + |
| 763/764 | K171G/V184P/V588R | + |
| 765/766 | V184P/A347T/V588R | + |
| 767/768 | N172I/H531S/G563A | + |
| 769/770 | V184P/A195E | + |
| 771/772 | K186Q/A347T | + |
| 773/774 | H531S/V588R | + |
| 775/776 | Y418E/H531S/I550L | + |
| 777/778 | V622T | + |
| 779/780 | F169V/K419N/L541Q | + |
| 781/782 | V184P/M197V/Y418E/H531S | + |
| 783/784 | F169V/L541Q | + |
| 785/786 | F169V/M197V/L198S | + |
| 787/788 | F169V/K419M | + |
| 789/790 | V184P/Y418E | + |
| 791/792 | K171G/K187V/H531S | + |
| 793/794 | K171G/V184P/A347T/H531S | + |
| 795/796 | V588R | + |
| 797/798 | V184P | + |
| 799/800 | M197V/A347T/H531S | + |
| 801/802 | K419N | + |
| 803/804 | M197V | + |
| 805/806 | A195H/Y418E | + |
| 807/808 | K171G/A347T/H531S | + |
| 809/810 | K171G/K186Q/A347T/Y418E/G563A | + |
| 811/812 | V184P/A347T/Y418E | + |
| 813/814 | K171G/K186Q/A347T/Y418E | + |
| 815/816 | K186Q/A347T/Y418E/H531S | + |
| 817/818 | N172I/V184P/A347T/Y418E | + |
| 819/820 | V184P/A195T/A347T/Y418E | + |
| 821/822 | K171G/Y418E/H531S | + |
| 823/824 | K419V/V622T | + |
| 825/826 | A347T/Y418E/V588M | + |
| 827/828 | K171G/H531S | + |
| 829/830 | N172I/M197V/K200T/H531S | + |
| 831/832 | A347T | + |
| 833/834 | N172I/K186Q/K200T/A347T/Y418E/G563A | + |
| 835/836 | V184P/K200T/Y418E | + |
| 837/838 | K171G/A195E/H531S | + |
| 839/840 | V184P/M197V/A347T | + |
| 841/842 | K200T/A347T | + |
| 843/844 | K171G | + |
| 845/846 | N172I | + |
| 847/848 | K171G/A347T/Y418E | + |
| 849/850 | L198S/K419N | + |
| 851/852 | A347T/H531S | + |
| 853/854 | K200T | + |
| 855/856 | H531S | + |
| 857/858 | K171G/V184P | + |
| 859/860 | F169V | + |
| 861/862 | F189L/Y418E/K419N/L541Q | + |

¹ Levels of increased activity were determined relative to the reference polypeptide of SEQ ID NO: 424 and defined as follows: “+” 1.20 to 2.73-fold increased activity; “++” >2.73-fold increased activity; “+++” >5.44-fold increased activity.

### Example 12

### Improvements Over SEQ ID NO: 548

[0566] SEQ ID NO: 548 was selected as the parent protein for this round of directed evolution. Libraries of engineered genes were produced using well-established techniques (e.g., saturation mutagenesis, recombination of previously identified beneficial mutations). The polypeptides encoded by each gene were produced in HTP as described in Example 5. Lysis buffer (50 mM sodium phosphate, pH 7.5, 0.01% Tween-20, 0.5 mg/mL lysozyme, 0.5 mg/mL PMBS, 600 μL) was added to the deep-well plate containing cell paste in each well. The cells were shaken on a bench-top shaker to resuspend.

[0567] Resuspended cells (100 μL) were transferred to a 96-well hard-shell PCR plate and incubated at 46° C. for 30 minutes. The plate was then centrifuged for 15 min at 4,000 rpm and 4° C. The clarified supernatant liquids were transferred into a 384-well polypropylene source microplate. In vitro transcription reactions (1 μL reaction volume) were set up in 384-well hard-shell PCR plates with the following reaction conditions: 10% lysate loading, 30 mM Tris-HCl, pH 8.0, 26.9 mM MgCl₂, 3 mM DTT, 50 ng/μL DNA template (6kb-GGG), 5 mM ATP, 5 mM CTP, 5 mM GTP, 5 mM UTP, 1 U/μL RNase inhibitor, 2 U/mL inorganic pyrophosphatase. The IVT reactions were incubated at 37° C. for 60 minutes, then quenched with 5 mM EDTA (9 volume equivalents).

[0568] The IVT yield was quantified using the Quant-It™ RNA assay kit, broad range (Invitrogen, Q10213). Sample (3 μL) was added to working solution (60 μL) in a 384-well solid black polystyrene microplate. Fluorescence was measured at room temperature using a SpectraMax M5 fluorescent plate reader, using excitation and emission maxima of 644 nm and 673 nm, respectively.

[0569] Residual activity after heat treatment relative to SEQ ID NO: 548 (activity FIOP) was calculated as the ratio of relative fluorescence units (RFU) between the sample and SEQ ID NO: 548 and is shown in Table 12.1.

TABLE 12.1
RNA Polymerase Activity of Variants Relative to SEQ ID NO: 548

| | | Activity |
|---|---|---|
| | | FIOP after |
| | | 46° C. heat |
| | | treatment |
| SEQ ID | | (Relative to |
| NO: | Amino Acid Differences | SEQ ID NO: |
| (nt/aa) | (Relative to SEQ ID NO: 548) | 548) ¹ |
| 863/864 | V184P/Y418E/K419E/V622E/D723G/L865R | +++ |
| 865/866 | K419M/D723G/M839F/S841D/L865R | +++ |
| 867/868 | K419V/M839F | +++ |
| 869/870 | V477G | +++ |
| 871/872 | F832R | +++ |
| 873/874 | Y418E/K419N/M839F/S841D | +++ |
| 875/876 | Y418E/K419M/D723A/M839F | +++ |
| 877/878 | V184P/K419E/D723G/M839F | +++ |
| 879/880 | K419N/M839F | +++ |
| 881/882 | V184P/Y418E/K419V/M839F | +++ |
| 883/884 | Y418E/M839F | +++ |
| 885/886 | K419M/L865R | +++ |
| 887/888 | V622E/D723G | +++ |
| 889/890 | K419N/D723G | +++ |
| 891/892 | Y418E/K419E/D723G | ++ |
| 893/894 | K419E/L865R | ++ |
| 895/896 | K419E/M839F/S841D/L865R | ++ |
| 897/898 | V622E/M839F | ++ |
| 899/900 | M839F | ++ |
| 901/902 | K171G/M839F/S841D | ++ |
| 903/904 | K171G/K419M/M839F/S841D | ++ |
| 905/906 | K419N/M839F/L865R | ++ |
| 907/908 | V184P/Y418E/V622E/M839F/L865R | ++ |
| 909/910 | K419N/V622E/M839F/S841D | ++ |
| 911/912 | V184P/Y418E/K419N/V622E/M839F/L865R | ++ |
| 913/914 | K419E/M839F | ++ |
| 915/916 | V184P/K419N/V622E/D723G | ++ |
| 917/918 | Y418E/K419E/V622E | ++ |
| 919/920 | R180E | ++ |
| 921/922 | Y185N | ++ |
| 923/924 | V184P/K419M/V622E | ++ |
| 925/926 | I496V | ++ |
| 927/928 | V184P/V622E/L865R | ++ |
| 929/930 | Y185D | ++ |
| 931/932 | K171G/V184P/Y418E/K419N/M839F/S841D | ++ |
| 933/934 | K171G/V184P/Y418E/K419V/V622E/M839F | + |
| 935/936 | K60E | + |
| 937/938 | K419V/V622E/M839F | + |
| 939/940 | K171G/V184P/K419V/V622E/M839F/S841D | + |
| 941/942 | V184P/K419N/V622E | + |
| 943/944 | Y418E/D723G/S841D | + |
| 945/946 | M839F/S841D | + |
| 947/948 | P483Q | + |
| 949/950 | L865K | + |
| 951/952 | Y418E/D723G/S841D/L865R | + |
| 953/954 | K419N | + |
| 955/956 | R307H | + |
| 957/958 | K419M/S841D/L865R | + |
| 959/960 | K419E | + |
| 961/962 | Y185A | + |
| 963/964 | F169V/Y418E/K419V/M839F | + |
| 965/966 | K419E/S841D | + |
| 967/968 | A420V | + |
| 969/970 | N495G | + |
| 971/972 | R180K | + |
| 973/974 | A416G | + |
| 975/976 | A857V | + |
| 977/978 | C499S | + |
| 979/980 | R180G | + |
| 981/982 | R41S | + |
| 983/984 | T30Y | + |
| 985/986 | N495A | + |
| 987/988 | N495R | + |
| 989/990 | A75R | + |
| 991/992 | P483G | + |
| 993/994 | A420H | + |
| 995/996 | A416S | + |
| 997/998 | I26Q | + |
| 999/1000 | K670R | + |
| 1001/1002 | R180V | + |
| 1003/1004 | A269V | + |

¹ Levels of increased activity were determined relative to the reference polypeptide of SEQ ID NO: 548 and defined as follows: “+” 1.12 to 3.03-fold increased activity; “++” >3.03-fold increased activity; “+++” >4.54-fold increased activity.

### Example 13

### Improvements Over SEQ ID NO: 896

[0570] The RNA polymerase of SEQ ID NO: 896 was selected as the parent protein for this round of directed evolution. Libraries of engineered genes were produced using well-established techniques (e.g., saturation mutagenesis, recombination of previously identified beneficial mutations). The polypeptides encoded by each gene were produced in HTP as described in Example 5. Lysis buffer (50 mM sodium phosphate, pH 7.5, 0.01% Tween-20, 0.5 mg/mL lysozyme, 0.5 mg/mL PMBS, 600 μL) was added to the deep-well plate containing cell paste in each well. The cells were shaken on a bench-top shaker to resuspend. Resuspended cells (100 μL) were transferred to a 96-well hard-shell PCR plate and incubated at 50° C. for 30 minutes. The plate was then centrifuged for 15 min at 4,000 rpm and 4° C. The clarified supernatant liquids were transferred into a 384-well polypropylene source microplate. In vitro transcription reactions (1 μL reaction volume) were set up in 384-well hard-shell PCR plates with the following reaction conditions: 10% lysate loading, 30 mM Tris-HCl, pH 8.0, 26.9 mM Mgc₂, 50 ng/μL DNA template (6kb-GGG), 5 mM ATP, 5 mM CTP, 5 mM GTP, 5 mM UTP, 1 U/μL RNase inhibitor, 2 U/mL inorganic pyrophosphatase. The IVT reactions were incubated at 37 aC for 60 minutes, then quenched with 5 mM EDTA (9 volume equivalents).

[0571] The IVT yield was quantified using the Quant-It™ RNA assay kit, broad range (Invitrogen, Q10213). Sample (3 μL) was added to working solution (60 μL) in a 384-well solid black polystyrene microplate. Fluorescence was measured at room temperature using a SpectraMax M5 fluorescent plate reader, using excitation and emission maxima of 644 nm and 673 nm, respectively.

[0572] Residual activity after heat treatment relative to SEQ ID NO: 896 (activity FIOP) was calculated as the ratio of relative fluorescence units (RFU) between the sample and SEQ ID NO: 896 and is shown in Table 13.1.

TABLE 13.1
RNA Polymerase Activity of Variants Relative to SEQ ID NO: 896

| | | Activity FIOP |
|---|---|---|
| | | after 50° C. heat |
| | | treatment |
| SEQ ID NO: | | (Relative to SEQ |
| (nt/aa) | Amino Acid Differences (Relative to SEQ ID NO: 896) | ID NO: 896) ¹ |
| 1005/1006 | Q246A/V399M/C517R/K607Y/E782V/F856I/N876K | +++ |
| 1007/1008 | C517R/S640P/K670N/P720E/H779R/E782V | +++ |
| 1009/1010 | Q246A/Q751R/H779R/E782V | +++ |
| 1011/1012 | S404L/K607Y/F856I/N876K | +++ |
| 1013/1014 | Q246A/C517R/P664K/Q751R/H779R | +++ |
| 1015/1016 | S640P/P664R/H779R/E782V | +++ |
| 1017/1018 | V399M/C517R/P664K/F856I/N876K | +++ |
| 1019/1020 | Q246A/I379S/V399M/C517R/Q751R | +++ |
| 1021/1022 | S404L/C517R/S640P/P664K/Q751R/Q793L/N876K | +++ |
| 1023/1024 | C517Y/S640P/K670N/P720R/Q751R/H779R/E782V | +++ |
| 1025/1026 | C517R/N876K | +++ |
| 1027/1028 | S135R/K340E | +++ |
| 1029/1030 | Q246A/V399M/S640P/P720E/H779R/E782V/Q793L/F856I/N876K | +++ |
| 1031/1032 | K340E | +++ |
| 1033/1034 | Q246A/K340E | +++ |
| 1035/1036 | P664K/P720R/H779R/E782V/Q793L/F856I | ++ |
| 1037/1038 | V399M/S404L/C517R/K670N/H779R/E782V/N876K | ++ |
| 1039/1040 | I379S/C517R/S640P | ++ |
| 1041/1042 | A136E/Q246A/K340L | ++ |
| 1043/1044 | S404L/Q751R/H779R/E782V | ++ |
| 1045/1046 | S404L/C517R/S640P/P664K/P720E/Q793L | ++ |
| 1047/1048 | I379S/C517Y/S640P/H779R/E782V/Q793L/F856I/N876K | ++ |
| 1049/1050 | V399M/S404L/P664K/K670N/P720E/Q751R/H779R/E782V | ++ |
| 1051/1052 | K340L | ++ |
| 1053/1054 | S640P/Q793L | ++ |
| 1055/1056 | A136E/K340E/I379S | ++ |
| 1057/1058 | K15N/Q246A/Y535C/K607Y/P664K | ++ |
| 1059/1060 | C517R/P664K/P720E | ++ |
| 1061/1062 | C517R/K607Y/F856I | ++ |
| 1063/1064 | C517R/P664R/P720Q/H779R | ++ |
| 1065/1066 | S135R/A416V | ++ |
| 1067/1068 | C517R/P664W/P720E/H779R/E782V/F856I | ++ |
| 1069/1070 | S135R/A136E | ++ |
| 1071/1072 | F856I | ++ |
| 1073/1074 | S135R/A136E/K340L/D375Y/I379S | ++ |
| 1075/1076 | K340L/V399M | ++ |
| 1077/1078 | V399M/P664K/P720R/Q751R/Q793L/G810R/F856I | ++ |
| 1079/1080 | Q246A/S404L/V645P/P664W/P720R/E782V/F856I/N876K | ++ |
| 1081/1082 | I379S | + |
| 1083/1084 | Q246A/C517R/K607Y | + |
| 1085/1086 | Q246A/P664R | + |
| 1087/1088 | C517R | + |
| 1089/1090 | H7N/S135R/A136E/K340L/I379S/A416V | + |
| 1091/1092 | Q246A/C517Y/Q751R/F856I | + |
| 1093/1094 | C517Y/K670N/P720E/Q751R/H779R/E782V/F856I | + |
| 1095/1096 | S135R/A136E/K340E | + |
| 1097/1098 | S640P/P664W/Q751R/F856I/N876K | + |
| 1099/1100 | V399M/S404L/C517Y/H779R/E782V | + |
| 1101/1102 | S640P/H779R/E782G/F856I | + |
| 1103/1104 | A136E/Q246A | + |
| 1105/1106 | V399M/S404L/C517R | + |
| 1107/1108 | Q246A/K340E/A416V | + |
| 1109/1110 | A136E/Q246A/K340E | + |
| 1111/1112 | C517R/P664K/Q751R/F856I | + |
| 1113/1114 | S404L/S640P/P664W | + |
| 1115/1116 | Q246A/C517Y/Q751R/H779R/E782G/F856I | + |
| 1117/1118 | V399M/C517R/P664K/F856I | + |
| 1119/1120 | C517R/P664R/P720Q | + |
| 1121/1122 | S404L/C517R/P664K/P720R/E782V | + |
| 1123/1124 | S135R/R364H | + |
| 1125/1126 | C517R/K607Y/S640P/P664R/P720E/H779R/E782G/F856I | + |
| 1127/1128 | A136E/R364H/V399M/S404L | + |
| 1129/1130 | A136E/K340E | + |
| 1131/1132 | V399M/S404L/C517R/P720Q/N876K | + |
| 1133/1134 | S404L/A416V/C517Y/S640P/V645P/P720Q/Q751R/H779R/E782V | + |
| 1135/1136 | Q246A/A416V | + |
| 1137/1138 | A136E | + |
| 1139/1140 | A136E/K340L/V399M | + |
| 1141/1142 | A416V | + |
| 1143/1144 | S135R/H195N/Q246A/K340L/I379S | + |
| 1145/1146 | Q246A/K340L/R364H | + |
| 1147/1148 | K340L/I379S/V399M | + |
| 1149/1150 | V399M/S404L/A416V/C517R/K607Y | + |
| 1151/1152 | S404L/C517R/P664R/P720E | + |
| 1153/1154 | C517R/S640P/Q751R/L756Q | + |
| 1155/1156 | C517R/K607Y/S640P/V645P/P664R/P720Q/Q751R/H779R | + |

¹ Levels of increased activity were determined relative to the reference polypeptide of SEQ ID NO: 896 and defined as follows: “+” 1.25 to 2.23-fold increased activity; “++” >2.23-fold increased activity; “+++” >5.86-fold increased activity.

### Example 14

### Improvements Over SEQ ID NO: 1030

[0573] The RNA polymerase of SEQ ID NO: 1030 was selected as the parent protein for this round of directed evolution. Libraries of engineered genes were produced using well-established techniques (e.g., saturation mutagenesis, recombination of previously identified beneficial mutations). The polypeptides encoded by each gene were produced in HTP as described in Example 5. Lysis buffer (50 mM sodium phosphate, pH 7.5, 0.01% Tween-20, 0.5 mg/mL lysozyme, 0.5 mg/mL PMBS, 600 μL) was added to the deep-well plate containing cell paste in each well. The cells were shaken on a bench-top shaker to resuspend. Resuspended cells (100 μL) were transferred to a 96-well hard-shell PCR plate and incubated in a thermocycler at 58° C. for 30 minutes. The plate was then centrifuged for 15 min at 4,000 rpm and 4° C. The clarified supernatant liquids were transferred into a 384-well polypropylene source microplate.

[0574] In vitro transcription reactions (1 μL reaction volume) were set up in 384-well hard-shell PCR plates with the following reaction conditions: 10% lysate loading, 30 mM Tris-HCl, pH 8.0, 26.9 mM MgCl₂, 50 ng/μL DNA template (6kb-GGG), 5 mM ATP, 5 mM CTP, 5 mM GTP, 5 mM UTP, 1 U/μL RNase inhibitor, 2 U/mL inorganic pyrophosphatase. The IVT reactions were incubated at 37° C. for 60 minutes, then quenched with 5 mM EDTA (9 volume equivalents).

[0575] The IVT yield was quantified using the Quant-It™ RNA assay kit, broad range (Invitrogen, Q10213). Sample (3 μL) was added to working solution (60 μL) in a 384-well solid black polystyrene microplate. Fluorescence was measured at room temperature using a SpectraMax M5 fluorescent plate reader, using excitation and emission maxima of 644 nm and 673 nm, respectively.

[0576] Residual activity after heat treatment relative to SEQ ID NO: 1030 (activity FIOP) was calculated as the ratio of relative fluorescence units (RFU) between the sample and SEQ ID NO: 1030 and is shown in Table 14.1.

TABLE 14.1
RNA Polymerase Activity of Variants Relative to SEQ ID NO: 1030

| | | Activity FIOP |
|---|---|---|
| | | after 58° C. heat |
| | | treatment |
| SEQ ID NO: | | (Relative to SEQ |
| (nt/aa) | Amino Acid Differences (Relative to SEQ ID NO: 1030) | ID NO: 1030) ¹ |
| 1157/1158 | K60E/S135R/Y185A/A420V/P483Q/C499S/F832R/A857V | +++ |
| 1159/1160 | R41S/K60E/S135R/R180K/Y185A/A420V/C499S/F832R | +++ |
| 1161/1162 | S135R/A136E/Y185N/A416G/A420V | +++ |
| 1163/1164 | S135R/A136E/Y185A/R307H/A420V/F832R/A857V | +++ |
| 1165/1166 | S135R/A136E/R180E/Y185A/R307H/V477G/F832R | +++ |
| 1167/1168 | K60E/S135R/R180K/Y185A/A420V/F832R | +++ |
| 1169/1170 | K60E/S135R/A136E/R180K/Y185A/F832R | +++ |
| 1171/1172 | R41S/R180E/Y185A/F832R/A857V | +++ |
| 1173/1174 | Y185D/R307H/A416G/F832R/A857V | +++ |
| 1175/1176 | R41S/G104S/R180K/Y185A/R307H/A857V | +++ |
| 1177/1178 | R41S/S135R/A136E/R180K/Y185A/A420V/V477G/F832R/A857V | +++ |
| 1179/1180 | R41S/S135R/Y185A/A420V/V477G/F832R | +++ |
| 1181/1182 | R41S/S135R/R180K/Y185A/A416G/V477G/F832R | ++ |
| 1183/1184 | D794N | ++ |
| 1185/1186 | R41S/K60E/A136E/Y185A/A416G/A420V/V477G | ++ |
| 1187/1188 | R41S/S135R/A136E/Y185D/V477G/A857V | ++ |
| 1189/1190 | Y185N/V477G/F832R | ++ |
| 1191/1192 | K60E/S135R/A136E/R180K/A416G/A420V/V477G/A709V/F832R | ++ |
| 1193/1194 | S135R/A136E/R180K/Y185A/A416G/A420V/F832R | ++ |
| 1195/1196 | S135R/A136E/Y185N/A416G/A420V/F832R | ++ |
| 1197/1198 | R41S/S135R/A136E/Y185D/R307H/A420V/P483Q | ++ |
| 1199/1200 | R41S/A136E/R180K/Y185A/R307H/A416G/A420V/P483Q/F832R/ | ++ |
| | A857V | |
| 1201/1202 | R41S/Y185A/A420V/P483Q/F832R | ++ |
| 1203/1204 | R41S/Y185D/A420V/D794N | ++ |
| 1205/1206 | Y185N/A416G/A420V/F832R | ++ |
| 1207/1208 | S135R/R180G/Y185A/A420V/V477G/N495G/D794N/F832R | ++ |
| 1209/1210 | S135R/A136E/Y185A/A416G/A420V/D794N | ++ |
| 1211/1212 | R41S/K60E/Y185N/A416G | ++ |
| 1213/1214 | R41S/A136E/R180G/R307H/A416G/A420V/F832R/A857V | ++ |
| 1215/1216 | R180K/Y185D/A416G/A420V/F832R | + |
| 1217/1218 | R41S/R180E/Y185A/A420V/V477G/I496V/A857V | + |
| 1219/1220 | R41S/K60E/S135R/R180E/Y185A/A420V/P483Q/I496V | + |
| 1221/1222 | R41S/R180K/Y185A/R307H/A416G/A420V/F832R/A857V | + |
| 1223/1224 | R41S/A136E/Y185A/A416G/A420V/V477G/A857V | + |
| 1225/1226 | S135R/A136E/R180K/Y185A/A416G/F832R | + |
| 1227/1228 | R41S/K60E/S135R/A136E/R180K/Y185A/A416G/A420V/I496V/ | + |
| | F832R/A857V | |
| 1229/1230 | R41S/S135R/A136E/Y185A/V477G | + |
| 1231/1232 | R41S/S135R/R180G/V477G | + |
| 1233/1234 | R41S/R180K/Y185A/A416G/A420V/F832R | + |
| 1235/1236 | K60E/Y185A/V477G/A857V | + |
| 1237/1238 | R41S/F832R | + |
| 1239/1240 | R41S/R180E/Y185A/V477G/P483Q/D794N/A857V | + |
| 1241/1242 | R41S/A136E/A416G/A420V/P483Q/F832R | + |
| 1243/1244 | R41S/Y185A/A416G/A420V/F832R | + |
| 1245/1246 | R41S/A136E/R180E/Y185A/A420V/V477G/A857V | + |
| 1247/1248 | R307H/D794N | + |
| 1249/1250 | K60E/S135R/A136E/Y185A/A420V/A857V | + |
| 1251/1252 | K60E/S135R/A136E/Y185A/A416G | + |
| 1253/1254 | R180K/R307H/A420V/F832R | + |
| 1255/1256 | A136E/R180E/Y185D/A416G | + |
| 1257/1258 | R41S/K60E/R180E/Y185A | + |
| 1259/1260 | R41S/R180K/Y185A/V477G/D794N | + |
| 1261/1262 | R41S/Y185N/D794N/A857V | + |
| 1263/1264 | R41S/A136E | + |
| 1265/1266 | R41S/K60E/Y185N/A857V | + |
| 1267/1268 | Y185A/A416G/A420V/F832R | + |
| 1269/1270 | K60E/S135R/R180K/Y185A/D794N | + |
| 1271/1272 | S135R/A136E/R180K/A416G/A857V | + |

¹ Levels of increased activity were determined relative to the reference polypeptide of SEQ ID NO: 1030 and defined as follows: “+” 1.10 to 1.71-fold increased activity; “++” >1.71-fold increased activity; “+++” >7.60-fold increased activity.

### Example 15 Improvements Over SEQ ID NO: 1030 in Co-Transcriptional Capping Activity

[0577] The RNA polymerase of SEQ ID NO: 1030 was selected as the parent protein for this round of directed evolution. Libraries of engineered genes were produced using well-established techniques (e.g., saturation mutagenesis, recombination of previously identified beneficial mutations). The polypeptides encoded by each gene were produced in HTP as described in Example 5. Lysis buffer (50 mM sodium phosphate, pH 7.5, 0.01% Tween-20, 0.5 mg/mL lysozyme, 0.5 mg/mL PMBS, 600 μL) was added to the deep-well plate containing cell paste in each well. The cells were shaken on a bench-top shaker to resuspend. Resuspended cells (100 μL) were transferred to a 96-well hard-shell PCR plate and incubated at 35° C. (Table 15.1) or 45° C. (Table 15.2) for 30 minutes. The plate was then centrifuged for 15 min at 4,000 rpm and 4° C. The clarified supernatant liquids were transferred into a 384-well polypropylene source microplate. In vitro transcription reactions (1 μL reaction volume) were set up in 384-well hard-shell PCR plates with the following reaction conditions: 10% lysate loading, 30 mM Tris-HCl, pH 8.0, 26.9 mM MgCl₂, 1 uM DNA template (SEQ ID NOs: 2019/2020), 5 mM ATP, 5 mM CTP, 5 mM GTP, 1 mM UTP, 0.2 uM ChromaTide™ Alexa Fluor™ 488-5-UTP (Invitrogen C11403), 4 mM ARCA (TriLink N-7003), 1 U/μL RNase inhibitor, 2 U/mL inorganic pyrophosphatase. The IVT reactions were incubated at 37° C. for 60 minutes, then quenched with 5 mM EDTA (9 volume equivalents).

[0578] For analysis of the reaction samples, capillary electrophoresis was performed using an ABI 3500x1 Genetic Analyzer (ThermoFisher). Quenched reactions (2 μL) were transferred to a new 96-well MicroAmp Optical PCR plate or 384-well MicroAmp Optical PCR plate containing 18 μL Hi-Di™ Formamide (ThermoFisher) containing an appropriate size standard (LIZ or Alexa633). The ABI3500×1 was configured with POP6 polymer, 50 cm capillaries and a 55° C. oven temperature. Pre-run settings were 18 KV for 50 sec. Injection was 10 KV for 2 sec, and the run settings were 19 KV for 620 sec.

[0579] Fluorescently-labeled RNA products were identified by their sizes relative to the sizing ladder.

[0580] Co-transcriptional capping activity relative to SEQ ID NO: 1030 (activity FIOP) was calculated as the ratio of fluorescently labeled and capped product area (SEQ ID NO: 2024) between the sample of interest and SEQ ID NO: 1030 in the capillary electrophoresis assay. These results are shown in Table 15.1 (35° C. heat treatment) and Table 15.2 (45° C. heat treatment).

TABLE 15.1
RNA Polymerase Activity of Variants Relative to SEQ ID NO: 1030

| | | Activity FIOP |
|---|---|---|
| | | (Relative to |
| SEQ ID NO: | | SEQ ID NO: |
| (nt/aa) | Amino Acid Differences (Relative to SEQ ID NO: 1030) | 1030) ¹ |
| 1273/1274 | C132L/A246Q/M399V/P640S/E720P/R779H/V782E/L793Q/I856F/ | +++ |
| | K876N | |
| 1275/1276 | T134H/M399V/P640S/E720P/R779H/V782E/L793Q/I856F/K876N | +++ |
| 1277/1278 | C132I/A246Q/M399V/P640S/E720P/R779H/V782E/L793Q/I856F/ | +++ |
| | K876N | |
| 1279/1280 | T134H/A246Q/P640S/E720P/R779H/V782E/L793Q/I856F/K876N | +++ |
| 1281/1282 | A246Q/M399V/P640S/D655Q/E720P/R779H/V782E/L793Q/I856F/ | +++ |
| | K876N | |
| 1283/1284 | A246Q/E387A/M399V/P640S/E720P/R779H/V782E/L793Q/I856F/ | +++ |
| | K876N | |
| 1285/1286 | A246Q/R370K/M399V/P640S/E720P/R779H/V782E/L793Q/I856F/ | +++ |
| | K876N | |
| 1287/1288 | A246Q/A357R/M399V/P640S/E720P/R779H/V782E/L793Q/I856F/ | +++ |
| | K876N | |
| 1289/1290 | A246Q/M399V/G635S/P640S/E720P/R779H/V782E/L793Q/I856F/ | +++ |
| | K876N | |
| 1291/1292 | A246Q/V327I/M399V/P640S/E720P/R779H/V782E/L793Q/I856F/ | +++ |
| | K876N | |
| 1293/1294 | A246Q/A296N/M399V/P640S/E720P/R779H/V782E/L793Q/I856F/ | +++ |
| | K876N | |
| 1295/1296 | A246Q/M399V/P640S/E720R/R779H/V782E/L793Q/I856F/K876N | +++ |
| 1297/1298 | A246Q/L309K/M399V/P640S/E720P/R779H/V782E/L793Q/I856F/ | +++ |
| | K876N | |
| 1299/1300 | A246Q/M399V/P640S/E720P/D723G/R779H/V782E/L793Q/I856F/ | +++ |
| | K876N | |
| 1085/1086 | M399V/P640S/P664R/E720P/R779H/V782E/L793Q/I856F/K876N | +++ |
| 1301/1302 | A246Q/E378P/M399V/P640S/E720P/R779H/V782E/L793Q/I856F/ | +++ |
| | K876N | |
| 1303/1304 | A246Q/M399V/P640S/A691S/E720P/R779H/V782E/L793Q/I856F/ | +++ |
| | K876N | |
| 1305/1306 | L133Q/A246Q/I379S/M399V/P640S/E720P/R779H/V782E/L793Q/ | +++ |
| | I856F/K876N | |
| 1307/1308 | A246Q/A310K/M399V/P640S/E720P/R779H/V782E/L793Q/I856F/ | +++ |
| | K876N | |
| 1309/1310 | A246Q/M399V/D462E/P640S/E720P/R779H/V782E/L793Q/I856F/ | +++ |
| | K876N | |
| 1311/1312 | A246Q/M399V/A502S/P640S/E720P/R779H/V782E/L793Q/I856F/ | +++ |
| | K876N | |
| 1313/1314 | A246Q/M399V/E629A/P640S/E720P/R779H/V782E/L793Q/I856F/ | +++ |
| | K876N | |
| 1315/1316 | A246Q/M399V/C499S/P640S/E720P/R779H/V782E/L793Q/I856F/ | +++ |
| | K876N | |
| 1317/1318 | A246Q/M399V/S582A/P640S/E720P/R779H/V782E/L793Q/I856F/ | +++ |
| | K876N | |
| 1319/1320 | M399V/P640S/E720P/R779H/V782E/L793Q/I856F/K876N | ++ |
| 1321/1322 | A246Q/M399V/Y418H/P640S/E720P/R779H/V782E/L793Q/I856F/ | ++ |
| | K876N | |
| 1323/1324 | A246Q/M399V/V489I/P640S/E720P/R779H/V782E/L793Q/I856F/ | ++ |
| | K876N | |
| 1325/1326 | A246Q/S389A/M399V/P640S/E720P/R779H/V782E/L793Q/I856F/ | ++ |
| | K876N | |
| 1327/1328 | A246Q/M399V/T494E/P640S/E720P/R779H/V782E/L793Q/I856F/ | ++ |
| | K876N | |
| 1329/1330 | A246Q/K394R/M399V/P640S/E720P/R779H/V782E/L793Q/I856F/ | ++ |
| | K876N | |
| 1331/1332 | M399V/P640S/E720P/Q751R/R779H/V782E/L793Q/I856F/K876N | ++ |
| 1333/1334 | A246Q/M399V/E498A/P640S/E720P/R779H/V782E/L793Q/I856F/ | ++ |
| | K876N | |
| 1335/1336 | A246Q/M399V/T616V/P640S/E720P/R779H/V782E/L793Q/I856F/ | ++ |
| | K876N | |
| 1337/1338 | A246Q/M399V/L403I/P640S/E720P/R779H/V782E/L793Q/I856F/ | ++ |
| | K876N | |
| 1339/1340 | A246Q/M399V/T613S/P640S/E720P/R779H/V782E/L793Q/I856F/ | ++ |
| | K876N | |
| 1341/1342 | A246Q/Q352K/M399V/P640S/E720P/R779H/V782E/L793Q/I856F/ | ++ |
| | K876N | |
| 1343/1344 | A246Q/M399V/I529Q/P640S/E720P/R779H/V782E/L793Q/I856F/ | ++ |
| | K876N | |
| 1345/1346 | C223A/A246Q/M399V/P640S/E720P/R779H/V782E/L793Q/I856F/ | ++ |
| | K876N | |
| 1347/1348 | A246Q/I379E/M399V/P640S/E720P/R779H/V782E/L793Q/I856F/ | ++ |
| | K876N | |
| 1349/1350 | A246Q/M399V/E573T/P640S/E720P/R779H/V782E/L793Q/I856F/ | ++ |
| | K876N | |
| 1351/1352 | A246Q/R336K/M399V/P640S/E720P/R779H/V782E/L793Q/I856F/ | ++ |
| | K876N | |
| 1353/1354 | A246Q/M399V/Q484E/P640S/E720P/R779H/V782E/L793Q/I856F/ | ++ |
| | K876N | |
| 1355/1356 | A246Q/M399V/P640S/D672L/E720P/R779H/V782E/L793Q/I856F/ | ++ |
| | K876N | |
| 1357/1358 | A246Q/K386R/M399V/P640S/E720P/R779H/V782E/L793Q/I856F/ | ++ |
| | K876N | |
| 1081/1082 | A246Q/I379S/M399V/P640S/E720P/R779H/V782E/L793Q/I856F/ | ++ |
| | K876N | |
| 1359/1360 | A246Q/M399V/P640S/E720P/V725I/R779H/V782E/L793Q/I856F/ | ++ |
| | K876N | |
| 1135/1136 | M399V/A416V/P640S/E720P/R779H/V782E/L793Q/I856F/K876N | ++ |
| 1361/1362 | A246Q/M399V/S598D/P640S/E720P/R779H/V782E/L793Q/I856F/ | ++ |
| | K876N | |
| 1363/1364 | A246Q/M399V/N530H/P640S/E720P/R779H/V782E/L793Q/I856F/ | ++ |
| | K876N | |
| 1365/1366 | A246Q/M399V/D491E/P640S/E720P/R779H/V782E/L793Q/I856F/ | ++ |
| | 8K76N | |
| 1367/1368 | A246Q/G365E/M399V/P640S/E720P/R779H/V782E/L793Q/I856F/ | ++ |
| | K876N | |
| 1369/1370 | A246Q/M399V/P640S/E720P/T724E/R779H/V782E/L793Q/I856F/ | ++ |
| | K876N | |
| 1371/1372 | A246Q/M399V/E461K/P640S/E720P/R779H/V782E/L793Q/I856F/ | ++ |
| | K876N | |
| 1373/1374 | A246Q/M399V/R615K/P640S/E720P/R779H/V782E/L793Q/I856F/ | ++ |
| | K876N | |
| 1375/1376 | A246Q/M362I/M399V/P640S/E720P/R779H/V782E/L793Q/I856F/ | ++ |
| | K876N | |
| 1377/1378 | A246Q/V359I/M399V/P640S/E720P/R779H/V782E/L793Q/I856F/ | ++ |
| | K876N | |
| 1379/1380 | A246Q/M399V/N633T/P640S/E720P/R779H/V782E/L793Q/I856F/ | ++ |
| | K876N | |
| 1381/1382 | A246Q/Q302A/M399V/P640S/E720P/R779H/V782E/L793Q/I856F/ | ++ |
| | K876N | |
| 1383/1384 | A246Q/I324Y/M399V/P640S/E720P/R779H/V782E/L793Q/I856F/ | ++ |
| | K876N | |
| 1385/1386 | L133Q/A246Q/M399V/P640S/E720P/R779H/V782E/L793Q/I856F/ | ++ |
| | K876N | |
| 1387/1388 | A246Q/K299R/M399V/P640S/E720P/R779H/V782E/L793Q/I856F/ | + |
| | K876N | |
| 1389/1390 | A246Q/M399V/P640S/L675T/E720P/R779H/V782E/L793Q/I856F/ | + |
| | K876N | |
| 1391/1392 | A246Q/M399V/A416V/P640S/E720P/R779H/V782E/L793Q/I856F/ | + |
| | K876N | |
| 1393/1394 | A246Q/M399V/M405L/P640S/E720P/R779H/V782E/L793Q/I856F/ | + |
| | K876N | |
| 1395/1396 | A246Q/M399V/L593A/P640S/E720P/R779H/V782E/L793Q/I856F/ | + |
| | K876N | |
| 1397/1398 | A246Q/P640S/E720P/R779H/V782E/L793Q/I856F/K876N | + |
| 1399/1400 | A246Q/M399V/K564R/P640S/E720P/R779H/V782E/L793Q/I856F/ | + |
| | K876N | |
| 1401/1402 | A246Q/M399V/K590Q/P640S/E720P/R779H/V782E/L793Q/I856F/ | + |
| | K876N | |
| 1403/1404 | A246Q/M399V/C517Q/P640S/E720P/R779H/V782E/L793Q/I856F/ | + |
| | K876N | |
| 1405/1406 | A246Q/M399V/V622A/P640S/E720P/R779H/V782E/L793Q/I856F/ | + |
| | K876N | |
| 1407/1408 | R364H/M399V/P640S/E720P/R779H/V782E/L793Q/I856F/K876N | + |
| 1409/1410 | A246Q/M399V/W626Q/P640S/E720P/R779H/V782E/L793Q/I856F/ | + |
| | K876N | |
| 1411/1412 | A246Q/T376M/M399V/P640S/E720P/R779H/V782E/L793Q/I856F/ | + |
| | K876N | |
| 1413/1414 | A246Q/M399V/Q625G/P640S/E720P/R779H/V782E/L793Q/I856F/ | + |
| | K876N | |
| 1415/1416 | A246Q/I379S/M399V/A416V/P640S/E720P/R779H/V782E/L793Q/ | + |
| | I856F/K876N | |
| 1417/1418 | A246Q/Q350K/M399V/P640S/E720P/R779H/V782E/L793Q/I856F/ | + |
| | K876N | |
| 1419/1420 | A246Q/M399V/T599N/P640S/E720P/R779H/V782E/L793Q/I856F/ | + |
| | K876N | |
| 1421/1422 | A246Q/M399V/T600E/P640S/E720P/R779H/V782E/L793Q/I856F/ | + |
| | K876N | |
| 1423/1424 | A246Q/M399V/P640S/S659E/E720P/R779H/V782E/L793Q/I856F/ | + |
| | K876N | |
| 1425/1426 | A246Q/M399V/Q425Y/P640S/E720P/R779H/V782E/L793Q/I856F/ | + |
| | K876N | |
| 1427/1428 | A246Q/M399V/P640S/N668Y/E720P/R779H/V782E/L793Q/I856F/ | + |
| | K876N | |
| 1429/1430 | A246Q/M399V/P640S/E720P/C730Q/R779H/V782E/L793Q/I856F/ | + |
| | K876N | |
| 1431/1432 | A246Q/M399V/Q591A/P640S/E720P/R779H/V782E/L793Q/I856F/ | + |
| | K876N | |
| 1433/1434 | A246Q/D343A/M399V/P640S/E720P/R779H/V782E/L793Q/I856F/ | + |
| | K876N | |
| 1435/1436 | A246Q/M399V/P640S/N668W/E720P/R779H/V782E/L793Q/I856F/ | + |
| | K876N | |
| 1437/1438 | A246Q/M367L/M399V/P640S/E720P/R779H/V782E/L793Q/I856F/ | + |
| | K876N | |
| 1439/1440 | A246Q/M399V/P640S/E720P/R779H/V782E/L793Q/C846Y/I856F/ | + |
| | K876N | |
| 1441/1442 | A246Q/M399V/P640S/E720P/R779H/V782E/L793Q/C846V/I856F/ | + |
| | K876N | |
| 1443/1444 | A246Q/M399V/I561V/P640S/E720P/R779H/V782E/L793Q/I856F/ | + |
| | K876N | |
| 1445/1446 | A246Q/L372E/M399V/P640S/E720P/R779H/V782E/L793Q/I856F/ | + |
| | K876N | |
| 1447/1448 | A246Q/M399V/P640S/N690E/E720P/R779H/V782E/L793Q/I856F/ | + |
| | K876N | |
| 1449/1450 | A246Q/M399V/P640S/E720P/C730L/R779H/V782E/L793Q/I856F/ | + |
| | K876N | |
| 1451/1452 | A246Q/M399V/Q455K/P640S/E720P/R779H/V782E/L793Q/I856F/ | + |
| | K876N | |
| 1453/1454 | A246Q/M399V/C537V/P640S/E720P/R779H/V782E/L793Q/I856F/ | + |
| | K876N | |
| 1455/1456 | A246Q/M399V/D583K/P640S/E720P/R779H/V782E/L793Q/I856F/ | + |
| | K876N | |
| 1457/1458 | A246Q/M399V/C517R/P640S/E720R/R779H/V782E/L793Q/I856F/ | + |
| | K876N | |
| 1459/1460 | A246Q/A369M/M399V/P640S/E720P/R779H/V782E/L793Q/I856F/ | + |
| | K876N | |
| 1071/1072 | A246Q/M399V/P640S/E720P/R779H/V782E/L793Q/K876N | + |
| 1461/1462 | A246Q/M399V/P437S/P640S/E720P/R779H/V782E/L793Q/I856F/ | + |
| | K876N | |
| 1075/1076 | A246Q/K340L/P640S/E720P/R779H/V782E/L793Q/I856F/K876N | + |
| 1463/1464 | A246Q/M399V/M623L/P640S/E720P/R779H/V782E/L793Q/I856F/ | + |
| | K876N | |
| 1465/1466 | A246Q/E378K/M399V/P640S/E720P/R779H/V782E/L793Q/I856F/ | + |
| | K876N | |
| 1467/1468 | A246Q/M399V/F464Y/P640S/E720P/R779H/V782E/L793Q/I856F/ | + |
| | K876N | |
| 1469/1470 | A246Q/K382T/M399V/P640S/E720P/R779H/V782E/L793Q/I856F/ | + |
| | K876N | |
| 1471/1472 | A246Q/M399V/C517R/P640S/E720P/R779H/V782E/L793Q/I856F/ | + |
| | K876N | |
| 1473/1474 | A246Q/M399V/R579G/P640S/E720P/R779H/V782E/L793Q/I856F/ | + |
| | K876N | |
| 1475/1476 | A246Q/M399V/Y618L/P640S/E720P/R779H/V782E/L793Q/I856F/ | + |
| | K876N | |
| 1477/1478 | A246Q/M399V/C517G/P640S/E720P/R779H/V782E/L793Q/I856F/ | + |
| | K876N | |
| 1479/1480 | A246Q/M399V/S514L/P640S/E720P/R779H/V782E/L793Q/I856F/ | + |
| | K876N | |
| 1481/1482 | A246Q/M399V/K607E/P640S/E720P/R779H/V782E/L793Q/I856F | + |
| | K876N | |
| 1033/1034 | K340E/M399V/P640S/E720P/R779H/V782E/L793Q/I856F/K876N | + |
| 1483/1484 | A246Q/M399V/P640S/N676Q/E720P/R779H/V782E/L793Q/I856F/ | + |
| | K876N | |
| 1485/1486 | A246Q/M399V/P640S/E720P/Q751R/R779H/V782G/L793Q/I856F/ | + |
| | K876N | |
| 1487/1488 | A246Q/M399V/P640S/P664R/E720P/R779H/V782E/L793Q/I856F/ | + |
| | K876N | |
| 1489/1490 | A136E/M399V/P640S/E720P/R779H/V782E/L793Q/I856F/K876N | + |
| 1025/1026 | A246Q/M399V/C517R/P640S/E720P/R779H/V782E/L793Q/I856F | + |
| 1491/1492 | A246Q/M399V/S410E/P640S/E720P/R779H/V782E/L793Q/I856F/ | + |
| | K876N | |
| 1493/1494 | A246Q/R313M/M399V/P640S/E720P/R779H/V782E/L793Q/I856F/ | + |
| | K876N | |
| 1495/1496 | A246Q/R364H/M399V/P640S/E720P/R779H/V782E/L793Q/I856F/ | + |
| | K876N | |
| 1497/1498 | S135R/A246Q/M399V/P640S/E720P/R779H/V782E/L793Q/I856F/ | + |
| | K876N | |
| 1499/1500 | A246Q/M399V/K608N/P640S/E720P/R779H/V782E/L793Q/I856F/ | + |
| | K876N | |

¹ Levels of increased activity were determined relative to the reference polypeptide of SEQ ID NO: 1030 and defined as follows: “+” 1.20 to 2.75-fold increased activity; “++” >2.75-fold increased activity; “+++” >4.00-fold increased activity.

TABLE 15.2
RNA Polymerase Activity of Variants Relative to SEQ ID NO: 1030

| | | Activity FIOP |
|---|---|---|
| | | (Relative to |
| SEQ ID NO: | | SEQ ID NO: |
| (nt/aa) | Amino Acid Differences (Relative to SEQ ID NO: 1030) | 1030) ¹ |
| 1501/1502 | P664R | +++ |
| 1503/1504 | Q352K/A357R/V359I/E378P/N633T/D672L | +++ |
| 1505/1506 | Q352K/N633T | +++ |
| 1507/1508 | A357R/R370K/E387A/K394R/Q625G/V725I | +++ |
| 1509/1510 | Q352K/E387A/E629A | +++ |
| 1511/1512 | A357R | +++ |
| 1513/1514 | A310K/A357R/V359I/E387A/S389A/V489I/I561V/Q625G | +++ |
| 1515/1516 | A310K/A357R | +++ |
| 1517/1518 | A310K/Q352K/A357R/V359I/V725I | +++ |
| 1519/1520 | Q352K/A357R/M362I/I561V/V725I | +++ |
| 1521/1522 | A357R/V359I/R370K | +++ |
| 1523/1524 | Q352K/E378P/L403I/I561V | +++ |
| 1525/1526 | E378P/R579G/Q625G/N633T/V636A | +++ |
| 1527/1528 | A357R/V359I/E378P/K394R/L403I/V725I | +++ |
| 1529/1530 | E387A/S389A/V489I/R579G/Q625G | +++ |
| 1531/1532 | Q352K/E378P | +++ |
| 1533/1534 | A357R/E378P/K394R | +++ |
| 1535/1536 | A357R/Q625G | +++ |
| 1537/1538 | Q352K/M362I/E387A/I561V | +++ |
| 1539/1540 | A310K/A357R/V359I/E387A/D672L/V725I | +++ |
| 1541/1542 | L658V | +++ |
| 1543/1544 | A310K/Q352K/V359I/I561V/R579G/Q625G/A691S/V725I | +++ |
| 1545/1546 | A310K/A357R/L403I | +++ |
| 1547/1548 | A310K/Q352K/L403I/R579G/E629A | ++ |
| 1549/1550 | A310K/Q352K/E378P/V489I/R579G/E629A/N633T | ++ |
| 1551/1552 | Q625G | ++ |
| 1553/1554 | A310K/Q352K/E378P/K394R/L403I/A691S/V725I | ++ |
| 1555/1556 | A310K/A357R/V359I/L403I | ++ |
| 1557/1558 | A310K/Q352K/V359I/L403I/R579G/Q625G | ++ |
| 1559/1560 | A310K/Q352K/R370K/R579G/Q625G | ++ |
| 1561/1562 | L312T | ++ |
| 1563/1564 | A310K/Q352K/Q625G | ++ |
| 1565/1566 | A310K/Q352K/Q625G/V725I | ++ |
| 1567/1568 | A310K/A357R/K394R | ++ |
| 1569/1570 | A310K/Q352K | ++ |
| 1571/1572 | V725I | ++ |
| 1573/1574 | Q352K/V359I | ++ |
| 1575/1576 | L658K | ++ |
| 1577/1578 | L312P | ++ |
| 1579/1580 | S308G | ++ |
| 1581/1582 | A310K/E387A/D672L | ++ |
| 1583/1584 | A310K/V359I/R370K/Q625G | ++ |
| 1585/1586 | E378P/I561V | ++ |
| 1587/1588 | R370K | ++ |
| 1589/1590 | V359I/V725I | ++ |
| 1591/1592 | L312V | ++ |
| 1593/1594 | H237R | ++ |
| 1595/1596 | E378P | ++ |
| 1597/1598 | Q352K | ++ |
| 1599/1600 | A310H | ++ |
| 1601/1602 | R370K/A691S/T770I | ++ |
| 1603/1604 | A310K/A357R/V359I/V489I/D672L | ++ |
| 1605/1606 | A357R/V359I/R579G/A691S | ++ |
| 1607/1608 | S308P | ++ |
| 1609/1610 | A310K/Q352K/R579G | ++ |
| 1611/1612 | Q352K/R370K/Q625G | ++ |
| 1613/1614 | L312G | ++ |
| 1615/1616 | Q625G/D672L | + |
| 1617/1618 | A310K/A357R/V359I/K394R/V489I/I561V/Q625G/V725I | + |
| 1619/1620 | Q625G/V725I | + |
| 1621/1622 | A310K/Q625G | + |
| 1623/1624 | V657L | + |
| 1625/1626 | Q352K/V359I/K394R/R579G/D672L | + |
| 1627/1628 | A311M | + |
| 1629/1630 | V359I/R370K/R579G | + |
| 1631/1632 | K649L | + |
| 1633/1634 | V489I | + |
| 1635/1636 | I561V | + |
| 1637/1638 | R370K/E378P/V489I/A691S/V725I | + |
| 1639/1640 | K394R/V489I/R579G/Q625G | + |
| 1641/1642 | E98G | + |
| 1643/1644 | C132W | + |
| 1645/1646 | A310K/I561V/R579G/D672L | + |
| 1647/1648 | L312Q | + |
| 1649/1650 | H237S | + |
| 1651/1652 | L312R | + |
| 1653/1654 | L309S | + |
| 1655/1656 | L403I/E629A | + |
| 1657/1658 | Y315T | + |
| 1659/1660 | I662V | + |
| 1661/1662 | E650A | + |
| 1663/1664 | T108R | + |
| 1665/1666 | V359I/Q625G | + |
| 1667/1668 | A310F | + |
| 1669/1670 | A665G | + |
| 1671/1672 | A310K/K394R/V489I/R579G/N633T/A691S | + |
| 1673/1674 | M362I/K394R/I561V/Q625G | + |
| 1675/1676 | L312S | + |
| 1677/1678 | A310K/E378P/A691S | + |
| 1679/1680 | F653W | + |
| 1681/1682 | R307G | + |
| 1683/1684 | A310K/Q352K/R370K/K394R/Q625G/V725I | + |
| 1685/1686 | L309K | + |
| 1687/1688 | Q663L | + |
| 1689/1690 | A310K/R370K/Q625G | + |
| 1691/1692 | Q352K/K394R | + |
| 1693/1694 | S308V | + |
| 1695/1696 | Q352K/M362I/D672L | + |
| 1697/1698 | A101R | + |
| 1699/1700 | S308W | + |
| 1701/1702 | I561V/R579G/E629A/D672L/V725I | + |
| 1703/1704 | A311F | + |
| 1705/1706 | Q352K/Q625G | + |
| 1707/1708 | L658R | + |
| 1709/1710 | S135G | + |
| 1711/1712 | N668R | + |
| 1713/1714 | A311G | + |
| 1715/1716 | T108K | + |
| 1717/1718 | A145G | + |
| 1719/1720 | L309R | + |
| 1721/1722 | I126M | + |
| 1723/1724 | E98A | + |
| 1725/1726 | H237L | + |
| 1727/1728 | A310L | + |

¹ Levels of increased activity were determined relative to the reference polypeptide of SEQ ID NO: 1030 and defined as follows: “+” 1.13 to 1.70-fold increased activity; “++” >1.70-fold increased activity; “+++” >2.45-fold increased activity.

### Example 16

### Improvements Over SEQ ID NO: 1036 in Co-Transcriptional Capping Activity

[0581] SEQ ID NO: 1036 was selected as the parent protein for this round of directed evolution. Libraries of engineered genes were produced using well-established techniques (e.g., saturation mutagenesis, recombination of previously identified beneficial mutations). The polypeptides encoded by each gene were produced in HTP as described in Example 5. Lysis buffer (50 mM sodium phosphate, pH 7.5, 0.01% Tween-20, 0.5 mg/mL lysozyme, 0.5 mg/mL PMBS, 600 μL) was added to the deep-well plate containing cell paste in each well. The cells were shaken on a bench-top shaker to resuspend. Resuspended cells (100 μL) were transferred to a 96-well hard-shell PCR plate and incubated at 45° C. for 30 minutes. The plate was then centrifuged for 15 min at 4,000 rpm and 4° C. The clarified supernatant liquids were transferred into a 384-well polypropylene source microplate. In vitro transcription reactions (1 μL reaction volume) were set up in 384-well hard-shell PCR plates with the following reaction conditions: 10% lysate loading, 30 mM Tris-HCl, pH 8.0, 26.9 mM MgCl₂, 1 uM DNA template (SEQ ID NOs 2025/2026), 5 mM ATP, 5 mM CTP, 5 mM GTP, 1 mM UTP, 0.2 uM ChromaTide™ Alexa Fluor™ 488-5-UTP (Invitrogen, C11403), 1 mM CleanCap AG (TriLink), 1 U/μL RNase inhibitor, 2 U/mL inorganic pyrophosphatase. The IVT reactions were incubated at 37° C. for 60 minutes, then quenched with 5 mM EDTA (9 volume equivalents).

[0582] For analysis of the reaction samples, capillary electrophoresis was performed using an ABI 3500x1 Genetic Analyzer (ThermoFisher). Quenched reactions (2 μL) were transferred to a new 96-well MicroAmp Optical PCR plate or 384-well MicroAmp Optical PCR plate containing 18 μL Hi-Di™ Formamide (ThermoFisher) containing an appropriate size standard (LIZ or Alexa633). The ABI3500×1 was configured with POP6 polymer, 50 cm capillaries and a 55° C. oven temperature. Pre-run settings were 18 KV for 50 sec. Injection was 10 KV for 2 sec, and the run settings were 19 KV for 620 sec. Fluorescently labeled RNA products were identified by their sizes relative to the sizing ladder.

[0583] Co-transcriptional capping activity relative to SEQ ID NO: 1036 (activity FIOP) was calculated as the ratio of fluorescently labeled and capped product area (SEQ ID NO 2030) between the sample of interest and SEQ ID NO: 1036 in the capillary electrophoresis assay. These results are shown in Table 16.1.

TABLE 16.1
RNA Polymerase Activity of Variants Relative to SEQ ID NO: 1036

| | | Activity FIOP |
|---|---|---|
| | | (Relative to |
| SEQ ID NO: | | SEQ ID NO: |
| (nt/aa) | Amino Acid Differences (Relative to SEQ ID NO: 1036) | 1036) ¹ |
| 1729/1730 | T139R/L309R/A310K/A357R/E387A | +++ |
| 1731/1732 | S135G/T139R/A357R/V359I/E387A/D655E/L658R | +++ |
| 1733/1734 | T139R/N633T | +++ |
| 1735/1736 | A145S/H237R/T250R/E378P/S648A/K649L | +++ |
| 1737/1738 | T139R/A310K/E387A/N633T/D655E/L658K | +++ |
| 1739/1740 | V144I/H237R/S648A/K649L | +++ |
| 1741/1742 | T250R/Q352K/V359I/S648A/K649L | +++ |
| 1743/1744 | H237R/E378P/S648A/K649L | ++ |
| 1745/1746 | A145S/S648A/K649L | ++ |
| 1747/1748 | S135G/T139R/Q352K/D655E/L658R | ++ |
| 1749/1750 | S135G/T139R/A151R | ++ |
| 1751/1752 | A310K/D655E/L658K | ++ |
| 1753/1754 | S135G/T139R/A310F | ++ |
| 1755/1756 | I126M/H237R/S648A/K649L | ++ |
| 1757/1758 | S135G/A310F/D655E/L658K | ++ |
| 1759/1760 | V144I/A145S/V359I/N633T/S648A/K649L | ++ |
| 1761/1762 | A151R/A310F/D655E/L658R | ++ |
| 1763/1764 | H237R/T250R/S308G/E378P/N633T/S648A/K649L/Q663L | ++ |
| 1765/1766 | T250R/A310F/N633T | + |
| 1767/1768 | S308G/A310E/N633T/D655E/V725I | + |
| 1769/1770 | H237R/T250R | + |
| 1771/1772 | A357R/N633T/S648A/K649L | + |
| 1773/1774 | A310F/Q352K/N633T/S648A | + |
| 1775/1776 | S308G/D655E/L658R | + |
| 1777/1778 | H237R/N633T | + |
| 1779/1780 | T139R/S308G/A310K | + |
| 1781/1782 | T139R/S308G/D655E/L658K/V725I | + |
| 1783/1784 | A145S/T250R/S308G/A310K | + |
| 1785/1786 | T139R/A357R/D655E/L658R | + |
| 1787/1788 | N633T/D655E/L658K/V725I | + |
| 1789/1790 | T250R/A310H | + |
| 1791/1792 | H237R/T250R/E650P | + |
| 1793/1794 | T139R/A151R/S308G/A310E/Q352K/V359I/N633T | + |
| 1795/1796 | A310F/A357R/V359I/N633T/L658K | + |
| 1797/1798 | H237R/L309R/A310F | + |
| 1799/I800 | H237R/S308G/A310H/N633T | + |

¹ Levels of increased activity were determined relative to the reference polypeptide of SEQ ID NO: 1036 and defined as follows: “+” 1.47 to 2.02-fold increased activity; “++” >2.02-fold increased activity; “+++” >4.41-fold increased activity.

### Example 17

### Improvements Over SEQ ID NO: 1742 in Co-Transcriptional Capping Activity

[0584] SEQ ID NO: 1742 was selected as the parent protein for this round of directed evolution. Libraries of engineered genes were produced using well-established techniques (e.g., saturation mutagenesis, recombination of previously identified beneficial mutations). The polypeptides encoded by each gene were produced in HTP as described in Example 5 and HTP-purified as described in Example 6. The purified and desalted protein samples were transferred into a 384-well polypropylene source microplate. In vitro transcription reactions (1 μL reaction volume) were set up in 384-well hard-shell PCR plates with the following reaction conditions: 50% purified protein loading, 30 mM Tris-HCl, pH 8.0, 26.9 mM MgCl₂, 1 uM DNA template (SEQ ID NOs 2025/2026), 5 mM ATP, 5 mM CTP, 5 mM GTP, 1 mM UTP, 0.2 uM ChromaTide™ Alexa Fluor™ 488-5-UTP (Invitrogen, C11403), 0.5 mM CleanCap® Reagent AG (TriLink, N-7113), 1 U/μL RNase inhibitor, 2 U/mL inorganic pyrophosphatase.. The IVT reactions were incubated at 37° C. for 60 minutes, then quenched with 5 mM EDTA (9 volume equivalents).

[0585] For analysis of the reaction samples, capillary electrophoresis was performed using an ABI 3500x1 Genetic Analyzer (ThermoFisher). Quenched reactions (2 μL) were transferred to a new 96-well MicroAmp Optical PCR plate or 384-well MicroAmp Optical PCR plate containing 18 μL Hi-Di™ Formamide (ThermoFisher) containing an appropriate size standard (LIZ or Alexa633). The ABI3500×1 was configured with POP6 polymer, 50 cm capillaries and a 55° C. oven temperature. Pre-run settings were 18 KV for 50 sec. Injection was 10 KV for 2 sec, and the run settings were 19 KV for 620 sec. Fluorescently labeled RNA products were identified by their sizes relative to the sizing ladder.

[0586] Co-transcriptional capping activity relative to SEQ ID NO: 1742 (activity FIOP) was calculated as the ratio of fluorescently labeled and capped product area (SEQ ID NO: 2030) between the sample of interest and SEQ ID NO: 1742 in the capillary electrophoresis assay. These results are shown in Table 17.1.

TABLE 17.1
RNA Polymerase Activity of Variants Relative to SEQ ID NO: 1742

| | | Activity FIOP |
|---|---|---|
| | | (Relative to |
| SEQ ID NO: | | SEQ ID NO: |
| (nt/aa) | Amino Acid Differences (Relative to SEQ ID NO: 1742) | 1742) ¹ |
| 1801/1802 | T139R/T140S/N633T/S659K/I662V/Q663G/W743H/V782M/G784A/ | +++ |
| | L793F | |
| 1803/1804 | T129V/C132L/R150K/E206V/A207V/S209P/A357R/Q425W/L541M/ | +++ |
| | A778V | |
| 1805/1806 | A101R/T129V/C132L/R150K/E206V/S209E/A357R/Q425W/A778V | +++ |
| 1807/1808 | C132V/R150K/E206V/A207V/A311V/A357R/A778V | +++ |
| 1809/1810 | T140R/E206G/S210M/N633T/S659K/V782A | +++ |
| 1811/1812 | T140R/E206G/S659K/Q663G/V782M/G784A/Q855R | +++ |
| 1813/1814 | T139R/T140R/V144L/E206G/S210M/N633T/I662V/V782M/G784A/ | +++ |
| | G795A | |
| 1815/1816 | T139A/E206G/S210M/N633T/S659K/I662V/Q663G/G784A | +++ |
| 1817/1818 | T139R/N633T/S659K/Q663G/V782A/G784A | +++ |
| 1819/1820 | T140R/E206G/S210G/Q663G | +++ |
| 1821/1822 | E206V/A207V/S209P/A357R/Q425W/A778V | +++ |
| 1823/1824 | T139R/T140R/V144L/I662V/V782M | ++ |
| 1825/1826 | T129V/C132L/R150K/E206V/A207V/S209E/Q425W/F543W | ++ |
| 1827/1828 | T139A/T140S/E206G/S210M/N633T/S659K/V782M | ++ |
| 1829/1830 | A101R/C132L/R150K/E206G/S209E/A357R/Q425W/L541M | ++ |
| 1831/1832 | T139A/E206G/S210M/I662V | ++ |
| 1833/1834 | A207V/S209P/A357R/Q425W/A778V | ++ |
| 1835/1836 | C132V/Q425W/L541M/A778V | ++ |
| 1837/1838 | R150K/E206V/A207V/Q425W | ++ |
| 1839/1840 | C132L/E206V/A207V/A778V | ++ |
| 1841/1842 | T139R/S659K/I662V/V782M/G784A | ++ |
| 1843/1844 | T140R/I662V/V782M | ++ |
| 1845/1846 | E206G/S210M/N633T/S659G | ++ |
| 1847/1848 | T139R/S210R/N633T/I662V/V782M | ++ |
| 1849/1850 | T139A/E206G/S210M/S659K/Q663G | ++ |
| 1851/1852 | T129V/C132I/R150K/G204E/A207V/A357R | ++ |
| 1853/1854 | T139R/V144L/S659G/I662V/V782M | ++ |
| 1855/1856 | T129V/C132S/R150K/E206V/A207V/S209P/S235L/A357R/A778V | ++ |
| 1857/1858 | E206G/S210R/N633T/G795A | + |
| 1859/1860 | A778V | + |
| 1861/1862 | I662V/Q663G/V782M | + |
| 1863/1864 | C132V/E206V/A207V/S209E/A357R/Q425W/L541M/A778V | + |
| 1865/1866 | T129V/C132I/A207V/S235L/Q425W/A778V | + |
| 1867/1868 | C132I/R150K/E206G | + |
| 1869/1870 | T140S/E206G/S210M/I662V/Q663G | + |
| 1871/1872 | Q425W/L541M/A778V | + |
| 1873/1874 | T139R/E206G/S659K/Q663G/V782M/G795A | + |
| 1875/1876 | A101R/C132L/R150K/Q425W/L541M/A778V | + |
| 1877/1878 | T139R/V144L/S659G/V782M | + |
| 1879/1880 | T140R | + |
| 1881/1882 | S659G | + |
| 1883/1884 | R150K/E206V/S209P/S235L/A357R/F543W/A778V | + |
| 1885/1886 | A101R/C132I/E206G/S209E/F543W/A778V | + |
| 1887/1888 | C132I/G204E/E206V/A357R/A778V | + |
| 1889/1890 | T129V/C132L/R150K/E206G/A207V/S209E/F543W | + |
| 1891/1892 | T139L/V144L/S659K/I662V/Q663G/V782A/L793F | + |
| 1893/1894 | A357R/A778V | + |
| 1895/1896 | T139L/T140S/E206G/S210M/N633T/S659K/Q663G | + |
| 1897/1898 | T129V/C132S/S235T/A357R/L541M | + |
| 1899/1900 | T129V/C132V/A311V/A357R/L541M | + |
| 1901/1902 | A101R/T129V/C132L/E206V/S209E/A778V | + |
| 1903/1904 | A101R/C132L/E206V/S209E | + |
| 1905/1906 | T140S/S659K/Q663G | + |
| 1907/1908 | E206G/S210R/N633T/I662V/Q663G | + |
| 1909/1910 | T140R/V144L/S659K/Q663G/W743H | + |
| 1911/1912 | T139R/T140R/N633T/S659K/I662V | + |

¹ Levels of increased activity were determined relative to the reference polypeptide of SEQ ID NO: 1742 and defined as follows: “+” 1.61 to 1.94-fold increased activity; “++” >1.94-fold increased activity; “+++” >2.95-fold increased activity.

### Example 18

### Improvements Over RNA Polymerase of SEQ ID NO: 1838

[0587] SEQ ID NO: 1838 was selected as the parent protein for this round of directed evolution. Libraries of engineered genes were produced using well-established techniques (e.g., saturation mutagenesis, recombination of previously identified beneficial mutations). The polypeptides encoded by each gene were produced in HTP as described in Example 5. Lysis buffer (50 mM sodium phosphate, pH 7.5, 0.01% Tween-20, 0.5 mg/mL lysozyme, 0.5 mg/mL PMBS, 600 μL) was added to the deep-well plate containing cell paste in each well. The cells were shaken on a bench-top shaker to resuspend. Resuspended cells (100 μL) were transferred to a 96-well hard-shell PCR plate and incubated at 53° C. for 60 minutes. The plate was then centrifuged for 15 min at 4,000 rpm and 4° C. The clarified supernatant liquids were transferred into a 384-well polypropylene source microplate. In vitro transcription reactions (1 μL reaction volume) were set up in 384-well hard-shell PCR plates with the following reaction conditions: 10% lysate loading, 30 mM Tris-HCl, pH 8.0, 26.9 mM MgCl₂, 50 ng/μL DNA template (6kb-GGG), 5 mM ATP, 5 mM CTP, 5 mM GTP, 5 mM UTP, 1 U/μL RNase inhibitor, 2 U/mL inorganic pyrophosphatase. The IVT reactions were incubated at 37° C. for 60 minutes, then quenched with 5 mM EDTA (9 volume equivalents).

[0588] The IVT yield was quantified using the Quant-It™ RNA assay kit, broad range (Invitrogen, Q10213). Sample (3 μL) was added to working solution (60 μL) in a 384-well solid black polystyrene microplate. Fluorescence was measured at room temperature using a SpectraMax M5 fluorescent plate reader, using excitation and emission maxima of 644 nm and 673 nm, respectively.

[0589] Residual activity after heat treatment relative to SEQ ID NO: 1838 (activity FIOP) was calculated as the ratio of relative fluorescence units (RFU) between the sample and SEQ ID NO: 1838 in the and is shown in Table 18.1.

TABLE 18.1
RNA Polymerase Activity of Variants Relative to SEQ ID NO: 1838

| | | Activity FIOP |
|---|---|---|
| | | after 53° C. heat |
| | | treatment |
| SEQ ID NO: | Amino Acid Differences | (Relative to SEQ |
| (nt/aa) | (Relative to SEQ ID NO: 1838) | ID NO: 1838) ¹ |
| 1913/1914 | N473K | +++ |
| 1915/1916 | V696C | +++ |
| 1917/1918 | L450T | +++ |
| 1919/1920 | A397G/N771D | +++ |
| 1921/1922 | A397E | +++ |
| 1923/1924 | R402L | +++ |
| 1925/1926 | E378D | +++ |
| 1927/1928 | K396R | +++ |
| 1929/1930 | K396M | +++ |
| 1931/1932 | D841N | +++ |
| 1933/1934 | T289L | ++ |
| 1935/1936 | A388M | ++ |
| 1937/1938 | S514R | ++ |
| 1939/1940 | T474L | ++ |
| 1941/1942 | E406S | ++ |
| 1943/1944 | A357R | ++ |
| 1945/1946 | K170N/T474M | ++ |
| 1947/1948 | A397I | ++ |
| 1949/1950 | N473R | ++ |
| 1951/1952 | Q761K | ++ |
| 1953/1954 | Q855A | ++ |
| 1955/1956 | D841S | ++ |
| 1957/1958 | T289F | ++ |
| 1959/1960 | M367E | ++ |
| 1961/1962 | S708K | ++ |
| 1963/1964 | F407W | ++ |
| 1965/1966 | I324L | + |
| 1967/1968 | A345S | + |
| 1969/1970 | D478C | + |
| 1971/1972 | D513S | + |
| 1973/1974 | S404R | + |
| 1975/1976 | S514C | + |
| 1977/1978 | A390E | + |
| 1979/1980 | R398D | + |
| 1981/1982 | A715S | + |
| 1983/1984 | A709V | + |
| 1985/1986 | V399I | + |
| 1987/1988 | V327I | + |
| 1989/1990 | M438F | + |
| 1991/1992 | S410G | + |
| 1993/1994 | K396S | + |
| 1995/1996 | A76T | + |
| 1997/1998 | S389E | + |
| 1999/2000 | C517N | + |
| 2001/2002 | M274A | + |
| 2003/2004 | S693K | + |
| 2005/2006 | S410K | + |
| 2007/2008 | F553L | + |
| 2009/2010 | S389C | + |
| 2011/2012 | R401L | + |
| 2013/2014 | T289V | + |
| 2015/2016 | H470G | + |
| 2017/2018 | L450V | + |

¹ Levels of increased activity were determined relative to the reference polypeptide of SEQ ID NO: 1838 and defined as follows: “+” 1.30 to 1.91-fold increased activity; “++” >1.91-fold increased activity; “+++” >2.81-fold increased activity.

[0590] While the invention has been described with reference to the specific embodiments, various changes can be made and equivalents can be substituted to adapt to a particular situation, material, composition of matter, process, process step or steps, thereby achieving benefits of the invention without departing from the scope of what is claimed.

[0591] For all purposes, each and every publication and patent document cited in this disclosure is incorporated herein by reference as if each such publication or document was specifically and individually indicated to be incorporated herein by reference. Citation of publications and patent documents is not intended as an indication that any such document is pertinent prior art, nor does it constitute an admission as to its contents or date.

1. An engineered RNA polymerase, or a functional fragment thereof, comprising an amino acid sequence comprising residues 8 to 890 of SEQ ID NO: 2 or comprising SEQ ID NO: 2, or an amino acid sequence having at least 70%, 75%, 80%, 81%, 82%, 83%, 84%, 85%, 86%, 87%, 88%, 89%, 90%, 91%, 92%, 93%, 94%, 95%, 96%, 97%, 98%, 99%, or more sequence identity to a reference sequence corresponding to residues 8 to 890 of SEQ ID NO: 2, 4, 26, 424,548, 896, 1030, 1036, 1742, or 1838, or to a reference sequence corresponding to SEQ ID NO: 2, 4, 26, 424,548, 896, 1030, 1036, 1742, or 1838, wherein the amino acid sequence comprises one or more substitutions relative to the reference sequence corresponding to residues 8 to 890 of SEQ ID NO: 2, 4, 26, 424,548, 896, 1030, 1036, 1742, or 1838, or relative to the reference sequence corresponding to SEQ ID NO: 2, 4, 26, 424,548, 896, 1030, 1036, 1742, or 1838.

2. The engineered RNA polymerase of claim 1, comprising an amino acid sequence having at least 70%, 75%, 80%, 81%, 82%, 83%, 84%, 85%, 86%, 87%, 88%, 89%, 90%, 91%, 92%, 93%, 94%, 95%, 96%, 97%, 98%, 99%, or more sequence identity to the reference sequence corresponding to residues 8 to 890 of SEQ ID NO: 2, or to the reference sequence corresponding to SEQ ID NO: 2, wherein the amino acid sequence comprises one or more substitutions relative to the reference sequence corresponding to residues 8 to 890 of SEQ ID NO: 2, or relative to the reference sequence corresponding to SEQ ID NO: 2.

3. The engineered RNA polymerase of claim 1, comprising an amino acid sequence having at least 70%, 75%, 80%, 81%, 82%, 83%, 84%, 85%, 86%, 87%, 88%, 89%, 90%, 91%, 92%, 93%, 94%, 95%, 96%, 97%, 98%, 99%, or more sequence identity to the reference sequence corresponding to residues 8 to 890 of SEQ ID NO: 4, 26, 424,548, 896, 1030, 1036, 1742, or 1838, or relative to the reference sequence corresponding to SEQ ID NO: 4, 26, 424,548, 896, 1030, 1036, 1742, or 1838, wherein the amino acid sequence comprises one or more substitutions relative to the reference sequence corresponding to residues 8 to 890 of SEQ ID NO: 2, or relative to the reference sequence corresponding to SEQ ID NO: 2.

4. The engineered RNA polymerase of claim 1, comprising an amino acid sequence having at least 70%, 75%, 80%, 81%, 82%, 83%, 84%, 85%, 86%, 87%, 88%, 89%, 90%, 91%, 92%, 93%, 94%, 95%, 96%, 97%, 98%, 99% or more sequence identity to a reference sequence corresponding to residues 8 to 890 of an even numbered SEQ ID NO. of SEQ ID NOs: 4-2018, or to a reference sequence corresponding to an even numbered SEQ ID NO. of SEQ ID NOs: 4-2018, wherein the amino acid sequence comprises one or more substitutions relative to the reference sequence corresponding to residues 8 to 890 of SEQ ID NO: 2, or relative to the reference sequence corresponding to SEQ ID NO: 2.

5. The engineered RNA polymerase of claim 1, wherein the amino acid sequence of the engineered RNA polymerase comprises at least a substitution at amino acid position 7, 11, 12, 13, 15, 18, 21, 23, 25, 26, 30, 34, 41, 45, 54, 56, 57, 59, 60, 61, 64, 66, 67, 71, 74, 75, 76, 77, 78, 82, 84, 98, 101,104, 108, 122, 126, 129, 132, 133, 134, 135, 136, 139, 140, 144, 145, 150, 151, 160, 161, 164, 167, 168, 169, 170, 171, 172, 177, 178, 179, 180, 181, 182, 183, 184, 185, 186, 187, 188, 189, 190, 191, 192, 193, 194, 195, 197, 198, 200, 202, 204, 206, 207, 209, 210, 223, 235, 237, 246, 250, 254, 256, 260, 269, 274, 278, 286, 289, 296, 299, 302, 307, 308, 309, 310, 311, 312, 313, 315, 319, 324, 327, 336, 337, 340, 343, 345, 347, 350, 352, 357, 359, 362, 364, 365, 367, 369, 370, 372, 375, 376, 378, 379, 382, 386, 387, 388, 389, 390, 394, 396, 397, 397, 398, 399, 401, 402, 403, 404, 405, 406, 407, 410, 413, 416, 418, 419, 420, 425, 437, 438, 450, 455, 456, 461, 462, 464, 468, 470, 473, 474, 477, 478, 483, 484, 489, 491, 494, 495, 496, 498, 499, 502, 505, 511, 513, 514, 517, 526, 527, 528, 529, 530, 531, 534, 535, 537, 541, 543, 550, 553, 561, 563, 564, 573, 574, 579, 582, 583, 588, 590, 591, 593, 598, 599, 600, 601, 605, 607, 608, 612, 613, 614, 615, 616, 618, 622, 623, 625, 626, 629, 633, 635, 636, 640, 645, 648, 649, 650, 653, 655, 657, 658, 659, 662, 663, 664, 665, 668, 670, 672, 675, 676, 686, 690, 691, 693, 694, 696, 701, 704, 708, 709, 715, 720, 723, 724, 725, 730, 743, 747, 751, 756, 761, 770, 771, 778, 779, 782, 784, 793, 794, 795, 796, 800, 808, 810, 831, 832, 839, 841, 845, 846, 852, 855, 856, 857, 858, 865, 876, 884, or 887, or combinations thereof, wherein the amino acid positions are relative to the reference sequence corresponding to residues 8 to 890 of SEQ ID NO: 2, or relative to the reference sequence corresponding to SEQ ID NO: 2.

6. The engineered RNA polymerase of claim 5, wherein the amino acid sequence of the engineered RNA polymerase comprises at least a substitution or an amino acid residue 7N, I1E, 12E, 13G, 15E/N, 18C/V, 21E/L, 23I/T, 25V, 26Q, 30Y, 34M, 41A/S, 45T, 54Q, 56I/L, 57A/G/V, 59H/I/L, /M/V, 61C/E/K, 64D/H, 66D, 67Q/R, 71E, 74R, 75R, 76E/T, 77L/T, 78I/N, 78Q, 82F/L, 84V, 98A/G, 101R, 104S, 108K/R, 122G, 126M, 129V, 132I/L/S/V/W, 133Q, 134H, 135G/R, 136E, 139A/L/R, 140R/S, 144I/L, 145G/S, 150K, 151R, 160C, 161V, 164I/R, 167D/S, 168I/T, 169V, 170N/R, 171E/G/Y, 1721, 177V, 178S, 179D/P, 180E/G/K/V, 181G/P/R/T, 182F, 183A/C, 184P/S/T, 185A/D/N, 186A/C/G/N/Q, 187A/N/V, 188G, 189I/K/L/Q/V, 190A/I/S, 191C/P, 192T, 193G/I/L, 194C/R, 195D/E/H/N/R/T, 197Q/V/W, 198S/V, 200E/L/N/T, 202V, 204E, 206G/V, 207V, 209E/P, 210G/M4/R, 223A, 235L/T, 237L/R/S, 246A, 250R, 254M/T, 256L, 260Y, 269V, 274A, 278M, 286V, 289F/L/V, 296N/V, 299R, 302A, 307G/H, 308G/P/V/W, 309K/R/S, 310E/F/H/K/L, 311F/G/M/V, 312G/P/Q/R/S/T/V, 313M, 315T, 319D, 324L/Y, 327I/L, 336K, 337I, 340E/L/T, 343A, 345S, 347T, 350K, 352K, 357R, 359I, 362I, 364H, 365E, 367E/L, 369M, 370K, 372E, 375Y, 376M, 378D/K/P, 379E/S, 382T, 386R, 387A, 388M, 389A/C/E, 390E, 394R, 396M/R/S, 397E/G, 3971, 398D, 399I/M, 401L, 402L, 403I, 404L/R/Y, 405L, 406S, 407W, 410E/G/K, 413D, 416G/S/V, 418E/H/V, 419E/M/N/V, 420H/V, 425W/Y, 437S, 438F, 450T/V, 455K, 456E/T/Y, 461K, 462E, 464L/Y, 468R, 470G, 473K/R, 474L/M, 477E/G, 478C, 483G/Q, 484E, 4891, 491E, 494E, 495A/G/R, 496V, 498A, 499S, 502S, 505T, 511G, 513S, 514C/L/R, 517G/N/Q/R/Y, 526V, 527E/M/R, 528A, 529Q/T, 530H/T, 531S, 534E, 535C/T, 537S/V, 541M/Q, 543W, 550L, 553L, 561V, 563A, 564R, 573T, 574P/Y, 579C/G/L/Q, 582A, 583K, 588A/H/M/N/R, 590Q, 591A, 593A, 598D/E, 599N, 600E, 601M/S/V, 605R, 607E/P/R/Y, 608N, 612K, 613S, 614Q, 615K, 616A/V, 618L, 622A/E/T, 623L, 625G, 626Q, 629A, 633T, 635S, 636A, 640P, 645P/V, 648A/V, 649L, 650A/P, 653W, 655E/Q, 657I/L, 658K/R/V, 659E/G/K, 662V, 663G/L, 664K/R/W, 665G, 668A/R/S/W/Y, 670N/R, 672L, 675T, 676Q, 686Q, 690D/E, 691S, 693K, 694E/G, 696C/F, 701R, 704D, 708K, 709V, 715S, 720A/E/P/Q/R, 723A/G, 724E, 725I, 730L/Q, 743H, 747R, 751R, 756Q, 761K, 7701, 771D, 778V, 779R, 782A/G/M/V, 784A, 793F/L, 794N, 795A, 796N, 800M, 808A, 810R, 831R, 832R, 839F, 841D/N, 845E, 846N/V/Y, 852L, 855A/R, 8561, 857V, 858K, 865K/R, 876K, 884K, or 887Y, or combinations thereof, wherein the amino acid positions are relative to the reference sequence corresponding to residues 8 to 890 of SEQ ID NO: 2, or relative to the reference sequence corresponding to SEQ ID NO: 2.

7. The engineered RNA polymerase of claim 1, wherein the amino acid sequence of the engineered RNA polymerase comprises at least a substitution at amino acid position 136, 150, 195, 206, 207, 246, 250, 337, 340, 347, 352, 359, 399, 419, 425, 456, 531, 550, 574, 588, 601, 614, 616, 640, 645, 648, 649, 694, 720, 779, 782, 793, 796, 800, 839, 841, 841, 856, 865, 876, or 884, or combinations thereof, wherein the amino acid positions are relative to the reference sequence corresponding to residues 8 to 890 of SEQ ID NO: 2, or relative to the reference sequence corresponding to SEQ ID NO: 2.

8. The engineered RNA polymerase of claim 7, wherein the amino acid sequence of the engineered RNA polymerase comprises at least a substitution or amino acid residue 136E, 150K, 195H, 206V, 207V, 246Q, 250R, 3371, 340E, 347T, 352K, 3591, 399V, 419E, 425W, 456E, 531S, 550L, 574Y, 588M, 601V, 614Q, 616V, 640S, 645V, 648A, 649L, 694G, 720P, 779H, 782E, 793Q, 796N, 800M, 839F, 841S, 841D, 856F, 865R, 876N, or 884K, or combinations thereof, wherein the positions are relative to the reference sequence corresponding to residues 8 to 890 of SEQ ID NO: 2, or relative to the reference sequence corresponding to SEQ ID NO: 2.

9. The engineered RNA polymerase of claim 1, wherein the amino acid sequence of the engineered RNA polymerase comprises at least a substitution set at amino acid position(s) 796/800/841/884, 394/846, 394/808/846, 404/846, or 394/796/845/846, wherein the amino acid positions are relative to the reference sequence corresponding to residues 8 to 890 of SEQ ID NO: 2, or relative to the reference sequence corresponding to SEQ ID NO: 2.

10. (canceled)

11. (canceled)

12. (canceled)

13. (canceled)

14. (canceled)

15. (canceled)

16. (canceled)

17. The engineered RNA polymerase of claim 1, comprising an amino acid sequence having at least 70%, 75%, 80%, 81%, 82%, 83%, 84%, 85%, 86%, 87%, 88%, 89%, 90%, 91%, 92%, 93%, 94%, 95%, 96%, 97%, 98%, 99%, or more sequence identity to the reference sequence corresponding to residues 8 to 890 of SEQ ID NO: 4, 26, 424,548, 896, 1030, 1036, 1742, or 1838, or to the reference sequence corresponding to SEQ ID NO: 4, 26, 424,548, 896, 1030, 1036, 1742, or 1838, wherein the amino acid sequence comprises one or more substitutions relative to the reference sequence corresponding to residues 8 to 890 of SEQ ID NO: 4, 26, 424,548, 896, 1030, 1036, 1742, or 1838, or relative to the reference sequence corresponding to SEQ ID NO: 4, 26, 424,548, 896, 1030, 1036, 1742, or 1838.

18. The engineered RNA polymerase of claim 1, comprising an amino acid sequence having at least 70%, 75%, 80%, 81%, 82%, 83%, 84%, 85%, 86%, 87%, 88%, 89%, 90%, 91%, 92%, 93%, 94%, 95%, 96%, 97%, 98%, 99%, or more sequence identity to the reference sequence corresponding to residues 8 to 890 of SEQ ID NO: 4-2018, or to the reference sequence corresponding to SEQ ID NO: 4-2018, wherein the amino acid sequence comprises one or more substitutions relative to the reference sequence corresponding to residues 8 to 890 of SEQ ID NO: 4, 26, 424,548, 896, 1030, 1036, 1742, or 1838, or relative to the reference sequence corresponding to SEQ ID NO: 4, 26, 424,548, 896, 1030, 1036, 1742, or 1838.

19. The engineered RNA polymerase of claim 17, wherein the amino acid sequence of the engineered RNA polymerase comprises at least a substitution at amino acid position 7, 11, 12, 13, 15, 18, 21, 23, 25, 26, 30, 34, 41, 45, 54, 56, 57, 59, 60, 61, 64, 66, 67, 71, 74, 75, 76, 77, 78, 82, 84, 98, 101,104, 108, 122, 126, 129, 132, 133, 134, 135, 136, 139, 140, 144, 145, 150, 151, 160, 161, 164, 167, 168, 169, 170, 171, 172, 177, 178, 179, 180, 181, 182, 183, 184, 185, 186, 187, 188, 189, 190, 191, 192, 193, 194, 195, 197, 198, 200, 202, 204, 206, 207, 209, 210, 223, 235, 237, 246, 250, 254, 256, 260, 269, 274, 278, 286, 289, 296, 299, 302, 307, 308, 309, 310, 311, 312, 313, 315, 319, 324, 327, 336, 337, 340, 343, 345, 347, 350, 352, 357, 359, 362, 364, 365, 367, 369, 370, 372, 375, 376, 378, 379, 382, 386, 387, 388, 389, 390, 394, 396, 397, 397, 398, 399, 401, 402, 403, 404, 405, 406, 407, 410, 413, 416, 418, 419, 420, 425, 437, 438, 450, 455, 456, 461, 462, 464, 468, 470, 473, 474, 477, 478, 483, 484, 489, 491, 494, 495, 496, 498, 499, 502, 505, 511, 513, 514, 517, 526, 527, 528, 529, 530, 531, 534, 535, 537, 541, 543, 550, 553, 561, 563, 564, 573, 574, 579, 582, 583, 588, 590, 591, 593, 598, 599, 600, 601, 605, 607, 608, 612, 613, 614, 615, 616, 618, 622, 623, 625, 626, 629, 633, 635, 636, 640, 645, 648, 649, 650, 653, 655, 657, 658, 659, 662, 663, 664, 665, 668, 670, 672, 675, 676, 686, 690, 691, 693, 694, 696, 701, 704, 708, 709, 715, 720, 723, 724, 725, 730, 743, 747, 751, 756, 761, 770, 771, 778, 779, 782, 784, 793, 794, 795, 796, 800, 808, 810, 831, 832, 839, 841, 845, 846, 852, 855, 856, 857, 858, 865, 876, 884, or 887, or combinations thereof, wherein the amino acid positions are relative to the reference sequence corresponding to residues 8 to 890 of SEQ ID NO: 4, 26, 424,548, 896, 1030, 1036, 1742, or 1838, or relative to the reference sequence corresponding to SEQ ID NO: 4, 26, 424,548, 896, 1030, 1036, 1742, or 1838.

20. The engineered RNA polymerase of claim 19, wherein the amino acid sequence of the engineered RNA polymerase comprises at least a substitution or an amino acid residue 7N, 11 E, 12E, 13G, 15E/N, 18C/V, 21E/L, 231/T, 25V, 26Q, 30Y, 34M, 41A/S, 45T, 54Q, 561/L, 57A/G/V, 59H/I/L, 60E/M/V, 61C/E/K, 64D/H, 66D, 67Q/R, 71E, 74R, 75R, 76E/T, 77L/T, 781/N, 78Q, 82F/L, 84V, 98A/G, 101R, 104S, 108K/R, 122G, 126M, 129V, 1321/L/S/V/W, 133Q, 134H, 135G/R, 136E, 139A/L/R, 140R/S, 1441/L, 145G/S, 150K, 151R, 160C, 161V, 1641/R, 167D/S, 1681/T, 169V, 170N/R, 171E/G/Y, 1721, 177V, 178S, 179D/P, 180E/G/K/V, 181G/P/R/T, 182F, 183A/C, 184P/S/T, 185A/D/N, 186A/C/G/N/Q, 187A/N/V, 188G, 1891/K/L/Q/V, 190A/I/S, 191C/P, 192T, 193G/I/L, 194C/R, 195D/E/H/N/R/T, 197Q/V/W, 198S/V, 200E/L/N/T, 202V, 204E, 206G/V, 207V, 209E/P, 210G/M4/R, 223A, 235L/T, 237L/R/S, 246A/Q, 250R, 254M/T, 256L, 260Y, 269V, 274A, 278M, 286V, 289F/L/V, 296N/V, 299R, 302A, 307G/H, 308G/P/V/W, 309K/R/S, 310E/F/H/K/L, 311F/G/M/V, 312G/P/Q/R/S/T/V, 313M, 315T, 319D, 324L/Y, 327I/L, 336K, 337I, 340E/L/T, 343A, 345S, 347T, 350K, 352K, 357R, 359I, 362I, 364H, 365E, 367E/L, 369M, 370K, 372E, 375Y, 376M, 378D/K/P, 379E/S, 382T, 386R, 387A, 388M, 389A/C/E, 390E, 394R, 396M/R/S, 397E/G, 3971, 398D, 3991/M/V, 401L, 402L, 403I, 404L/R/Y, 405L, 406S, 407W, 410E/G/K, 413D, 416G/S/V, 418E/H/V, 419E/M/N/V, 420H/V, 425W/Y, 437S, 438F, 450T/V, 455K, 456E/T/Y, 461K, 462E, 464L/Y, 468R, 470G, 473K/R, 474L/M, 477E/G, 478C, 483G/Q, 484E, 4891, 491E, 494E, 495A/G/R, 496V, 498A, 499S, 502S, 505T, 511G, 513S, 514C/L/R, 517G/N/Q/R/Y, 526V, 527E/M/R, 528A, 529Q/T, 530H/T, 531S, 534E, 535C/T, 537S/V, 541M/Q, 543W, 550L, 553L, 561V, 563A, 564R, 573T, 574P/Y, 579C/G/L/Q, 582A, 583K, 588A/H/M/N/R, 590Q, 591A, 593A, 598D/E, 599N, 600E, 601M/S/V, 605R, 607E/P/R/Y, 608N, 612K, 613S, 614Q, 615K, 616A/V, 618L, 622A/E/T, 623L, 625G, 626Q, 629A, 633T, 635S, 636A, 640S/P, 645P/V, 648A/V, 649L, 650A/P, 653W, 655E/Q, 657I/L, 658K/R/V, 659E/G/K, 662V, 663G/L, 664K/R/W, 665G, 668A/R/S/W/Y, 670N/R, 672L, 675T, 676Q, 686Q, 690D/E, 691S, 693K, 694E/G, 696C/F, 701R, 704D, 708K, 709V, 715S, 720A/E/P/Q/R, 723A/G, 724E, 725I, 730L/Q, 743H, 747R, 751R, 756Q, 761K, 7701, 771D, 778V, 779H1R, 782A/E/G/M/V, 784A, 793F/L/Q, 794N, 795A, 796N, 800M, 808A, 810R, 831R, 832R, 839F, 841D/N/S, 845E, 846N/V/Y, 852L, 855A/R, 856F/I, 857V, 858K, 865K/R, 876K/N, 884E/K, or 887Y, or combinations thereof, wherein the amino acid positions are relative to the reference sequence corresponding to residues 8 to 890 of SEQ ID NO: 4, 26, 424,548, 896, 1030, 1036, 1742, or 1838, or relative to the reference sequence corresponding to SEQ ID NO: 4, 26, 424, 548, 896, 1030, 1036, 1742, or 1838.

21. The engineered RNA polymerase of claim 17, wherein the amino acid sequence of the engineered RNA polymerase comprises at least a substitution at amino acid position 136, 150, 195, 206, 207, 246, 250, 337, 340, 347, 352, 359, 399, 419, 425, 456, 531, 550, 574, 588, 601, 614, 616, 640, 645, 648, 649, 694, 720, 779, 782, 793, 796, 800, 839, 841, 841, 856, 865, 876, or 884, or combinations thereof, wherein the amino acid positions are relative to the reference sequence corresponding to residues 8 to 890 of SEQ ID NO: 4, 26, 424,548, 896, 1030, 1036, 1742, or 1838, or relative to the reference sequence corresponding to SEQ ID NO: 4, 26, 424,548, 896, 1030, 1036, 1742, or 1838.

22. The engineered RNA polymerase of claim 21, wherein the amino acid sequence of the engineered RNA polymerase comprises at least a substitution or an amino acid residue 136E, 150K, 195H, 206V, 207V, 246Q, 250R, 3371, 340E, 347T, 352K, 3591, 399V, 419E, 425W, 456E, 531S, 550L, 574Y, 588M, 601V, 614Q, 616V, 640S, 645V, 648A, 649L, 694G, 720P, 779H, 782E, 793Q, 796N, 800M, 839F, 841S, 841D, 856F, 865R, 876N, or 884K, or combinations thereof, wherein the amino acid positions are relative to the reference sequence corresponding to residues 8 to 890 of SEQ ID NO: 4, 26, 424,548, 896, 1030, 1036, 1742, or 1838, or relative to the reference sequence corresponding to SEQ ID NO: 4, 26, 424,548, 896, 1030, 1036, 1742, or 1838.

23. The engineered RNA polymerase of claim 17, comprising an amino acid sequence having at least 70%, 75%, 80%, 81%, 82%, 83%, 84%, 85%, 86%, 87%, 88%, 89%, 90%, 91%, 92%, 93%, 94%, 95%, 96%, 97%, 98%, 99%, or more sequence identity to the reference sequence corresponding to residues 8 to 890 of SEQ ID NO: 4, or to the reference sequence corresponding to SEQ ID NO: 4, wherein the amino acid sequence comprises one or more substitutions relative to the reference sequence corresponding to residues 8 to 890 of SEQ ID NO: 4, or relative to the reference sequence corresponding to SEQ ID NO: 4.

24. The engineered RNA polymerase of claim 18, comprising an amino acid sequence having at least 70%, 75%, 80%, 81%, 82%, 83%, 84%, 85%, 86%, 87%, 88%, 89%, 90%, 91%, 92%, 93%, 94%, 95%, 96%, 97%, 98%, 99%, or more sequence identity to a reference sequence corresponding to residues 8 to 890 of an even-numbered SEQ ID NO. of SEQ ID NOs: 14-250, or to a reference sequence corresponding to an even-numbered SEQ ID NO. of SEQ ID NOs: 14-250, wherein the amino acid sequence comprises one or more substitutions relative to the reference sequence corresponding to residues 8 to 890 of SEQ ID NO: 4, or relative to the reference sequence corresponding to SEQ ID NO: 4.

25. The engineered RNA polymerase of claim 24, wherein the amino acid sequence of the engineered RNA polymerase comprises at least a substitution or substitution set at amino acid positions(s) 839/841, 884/887, 694, 588, 541, 852, 645, 582, 657, 574, 456, 563, 865, 720, 528, 601, 690, 614, 550, 187, 57, 168,531, 347, 18, 527, 197, 76/537, 171, 418, 579, 696, 77, 337, 11, 200, 186, 64/296, 724, 198, 13, 529, 419, 593, 164, 535, 464, 607, 59, 23, 747, 169, 71, 160, 195, 78, 612, 537, 74, 167, 192, 64, 648, 193, 12, 254, 182, 189, 511, 278, 45, 67, 25, 41, 183, 202, 858, 76, 82, 82/178, 340, 179, 61, 505, 784, 686, 477, 327, 184, 319, or 668, wherein the amino acid positions are relative to the reference sequence corresponding to residues 8 to 890 of SEQ ID NO: 4, or relative to the reference sequence corresponding to SEQ ID NO: 4.

26. (canceled)

27. The engineered RNA polymerase of claim 17, comprising an amino acid sequence having at least 70%, 75%, 80%, 81%, 82%, 83%, 84%, 85%, 86%, 87%, 88%, 89%, 90%, 91%, 92%, 93%, 94%, 95%, 96%, 97%, 98%, 99%, or more sequence identity to the reference sequence corresponding to residues 8 to 890 of SEQ ID NO: 26, or to the reference sequence corresponding to SEQ ID NO: 26, wherein the amino acid sequence comprises one or more substitutions relative to the reference sequence corresponding to residues 8 to 890 of SEQ ID NO: 26, or relative to the reference sequence corresponding to SEQ ID NO: 26.

28. The engineered RNA polymerase of claim 18, comprising an amino acid sequence having at least 70%, 75%, 80%, 81%, 82%, 83%, 84%, 85%, 86%, 87%, 88%, 89%, 90%, 91%, 92%, 93%, 94%, 95%, 96%, 97%, 98%, 99%, or more sequence identity to a reference sequence corresponding to residues 8 to 890 of an even-numbered SEQ ID NO. of SEQ ID NOs: 252-540, or to a reference sequence corresponding to an even-numbered SEQ ID NO. of SEQ ID NOs: 252-540, wherein the amino acid sequence comprises one or more substitutions relative to the reference sequence corresponding to residues 8 to 890 of SEQ ID NO: 26, or relative to the reference sequence corresponding to SEQ ID NO: 26.

29. The engineered RNA polymerase of claim 27, wherein the amino acid sequence of the engineered RNA polymerase comprises at least a substitution or substitution set at amino acid positions(s) 622, 831, 598, 419, 198, 588, 21, 579/704, 190, 197, 57, 189, 187, 195, 181, 191, 188, 164, 169, 184, 171, 186, 527, 177, 66, 78/565, 172, 161, 193, 593, 668, 18, 67,170, 286, 61, 60, 183, 456, 179, 194, 468, 720, 534, 601, 56, 122, 84, 418, 34/526, 701, 530, 59, 260, 82,413, 605, 54, or 256, wherein the amino acid positions are relative to the reference sequence corresponding to residues 8 to 890 of SEQ ID NO: 26, or relative to the reference sequence corresponding to SEQ ID NO: 26.

30. (canceled)

31. The engineered RNA polymerase of claim 27, wherein the amino acid sequence of the engineered RNA polymerase comprises at least a substitution or substitution set at amino acid positions(s) 337/456/574/601/614/694/720, 197/200/418/550/574/614/690/694, 197/200/337/347/456/550/563/720, 456/563/574/694/720, 171/197/200/456/574/694, 197/347/418/456/574/690, 200/418/456/531/574/614, 418/574, 11/77/200/574, 11/200/347/456/694/720, 11/200/456/574, 171/200/531/582/601/614/720, 456/531/574/690, 13/337/456/550, 11/200/337/456, 77/171/347/456, 13/337/527/550/563/574/601, 197/200/531/550/694, 77/197/200/456/550, 77/197/456/531/574/614/690, 77/200/347/574, 13/200/347/456/720, 13/77/531/574/720, 601/614/694, 13/418/456/694/720, 15/77/200/337/456/550/574/601/614/690/720, 13/550/690, 77/456/550, 77/337/347/550/574, 200/347/456/694, 197/337/347/456/531/574, 13/456/528, 200/337/456/690, 197/337/527/574/601, 197/456/579/614, 13/720, 197/200/418/574/694, 197/200/601, 197/347/418/574, 347/601/694, 550/690, 200/418/550, 200/347, 77/171/197, 77/531/574, 77/171/720, 197/527, 200, 197/200/418/601, 11/531/582, 13/197/200/418/694, 13/77/200/418/456, 77/456/582, 11/690, 11/200, 11/456/531/616, 77/574, 200/531/690, or 337/418/531/574/690, wherein the amino acid positions are relative to the reference sequence corresponding to residues 8 to 890 of SEQ ID NO: 26, or relative to the reference sequence corresponding to SEQ ID NO: 26.

32. (canceled)

33. The engineered RNA polymerase of claim 17, comprising an amino acid sequence having at least 70%, 75%, 80%, 81%, 82%, 83%, 84%, 85%, 86%, 87%, 88%, 89%, 90%, 91%, 92%, 93%, 94%, 95%, 96%, 97%, 98%, 99%, or more sequence identity to the reference sequence corresponding to residues 8 to 890 of SEQ ID NO: 424, or to the reference sequence corresponding to SEQ ID NO: 424, wherein the amino acid sequence comprises one or more substitutions relative to the reference sequence corresponding to residues 8 to 890 of SEQ ID NO: 44, or relative to the reference sequence corresponding to SEQ ID NO: 424.

34. The engineered RNA polymerase of claim 18, comprising an amino acid sequence having at least 70%, 75%, 80%, 81%, 82%, 83%, 84%, 85%, 86%, 87%, 88%, 89%, 90%, 91%, 92%, 93%, 94%, 95%, 96%, 97%, 98%, 99%, or more sequence identity to the reference sequence corresponding to residues 8 to 890 of an even-numbered SEQ ID NO. of SEQ ID NOs: 542-862, or to the reference sequence corresponding to an even-numbered SEQ ID NO. of SEQ ID NOs: 542-862, wherein the amino acid sequence comprises one or more substitutions relative to the reference sequence corresponding to residues 8 to 890 of SEQ ID NO: 424, or relative to the reference sequence corresponding to SEQ ID NO: 424.

35. The engineered RNA polymerase of claim 33, wherein the amino acid sequence of the engineered RNA polymerase comprises at least a substitution or substitution set at amino acid positions(s) 541/622/723, 541/588/865, 839, 195/347/531/550/588, 419/723, 172/184/550/588, 184/195/347/418/550/588, 171/184/347/531/550, 171/184/347/418/531/550/588, 169/541/588/865, 841, 839/841, 171/347/418/550, 171/184/347/418/588, 195/563/588, 187/195/531/550/588, 347/550/588, 541/865, 347/531/563/588, 419/541/865, 187/347/418/531/550, 169/419, 187/347/531/588, 186/347/550/588, 563/588, 184/418/550/588, 723, 172/418/550/588, 171/186/418/550/588, 347/550/563, 622, 541/723, 419/541/839/841, 171/418/531/550, 171/531/588, 186/347/588, 531/550/563, 171/186/531/550, 187/550, 171/418/531/563/588, 195/550, 347/418/550/588, 171/187/588, 187/347/531/550, 184/531/550, 171/184/418/563/588, 195/588, 169/622/723, 187/588, 184/550/588, 169/189/622, 187/418/550, 588, 531/563/588, 418/563/588, 531/588, 172/184/531/550, 191/531/588, 347/418/550, 563, 172/197/347/588, 172/184/347/418/531/563, 171/195/347/418/588, 171/588, 171/187/550, 171/184/347/418/563, 347/531/588, 172/186/187/531/563/588, 550, 531/550, 172/588, 195/418/550, 195/347/418/531/563, 171/195/550, 181/418/563, 184/347/563/579, 200/347/418, 172/195/550, 197/347/418/563, 171/563, 531/563, 191/418/531/550, 172/195/531/588, 347/531/563, 169/181/198/723/865, 171/418/588, 184/418/588, 541, 418/550, 172/347/531/588, 172/187/550, 169/181/190/419, 723/841, 347/418/563, 186/197/200/550, 347/550, 172/200/588, 186/563, 172/186/347/531/588, 172/184/418/588, 171/347/418/563, 184/200, 172/347/418/588, 198/419/541, 171/187/418/563, 171/184/588, 184/347/588, 172/531/563, 184/195, 186/347, 418/531/550, 169/419/541, 184/197/418/531, 169/541, 169/197/198, 169/419, 184/418, 171/187/531, 171/184/347/531, 184, 197/347/531, 419, 197, 195/418, 171/347/531, 171/186/347/418/563, 184/347/418, 171/186/347/418, 186/347/418/531, 172/184/347/418, 184/195/347/418, 171/418/531, 419/622, 347/418/588, 171/531, 172/197/200/531, 347, 172/186/200/347/418/563, 184/200/418, 171/195/531, 184/197/347, 200/347, 171, 172, 171/347/418, 198/419, 347/531, 200, 531, 171/184, 169, or 189/418/419/541, wherein the amino acid positions are relative to the reference sequence corresponding to residues 8 to 890 of SEQ ID NO:
424, or relative to the reference sequence corresponding to SEQ ID NO: 424.

36. (canceled)

37. The engineered RNA polymerase of claim 17, comprising an amino acid sequence having at least 70%, 75%, 80%, 81%, 82%, 83%, 84%, 85%, 86%, 87%, 88%, 89%, 90%, 91%, 92%, 93%, 94%, 95%, 96%, 97%, 98%, 99%, or more sequence identity to the reference sequence corresponding to residues 8 to 890 of SEQ ID NO: 548, or to the reference sequence corresponding to SEQ ID NO: 548, wherein the amino acid sequence comprises one or more substitutions relative to the reference sequence corresponding to residues 8 to 890 of SEQ ID NO: 548, or relative to the reference sequence corresponding to SEQ ID NO: 548.

38. The engineered RNA polymerase of claim 18, comprising an amino acid sequence having at least 70%, 75%, 80%, 81%, 82%, 83%, 84%, 85%, 86%, 87%, 88%, 89%, 90%, 91%, 92%, 93%, 94%, 95%, 96%, 97%, 98%, 99%, or more sequence identity to the reference sequence corresponding to residues 8 to 890 of an even-numbered SEQ ID NO. of SEQ ID NOs: 864-1004, or to the reference sequence corresponding to an even-numbered SEQ ID NO. of SEQ ID NOs: 864-1004, wherein the amino acid sequence comprises one or more substitutions relative to the reference sequence corresponding to residues 8 to 890 of SEQ ID NO: 548, or relative to the reference sequence corresponding to SEQ ID NO: 548.

39. The engineered RNA polymerase of claim 37, wherein the amino acid sequence of the engineered RNA polymerase comprises at least a substitution or substitution set at amino acid positions(s) 184/418/419/622/723/865, 419/723/839/841/865, 419/839, 477, 832, 418/419/839/841, 418/419/723/839, 184/419/723/839, 184/418/419/839, 418/839, 419/865, 622/723, 419/723, 418/419/723, 419/839/841/865, 622/839, 839, 171/839/841, 171/419/839/841, 419/839/865, 184/418/622/839/865, 419/622/839/841, 184/418/419/622/839/865, 184/419/622/723, 418/419/622, 180, 185, 184/419/622, 496, 184/622/865, 171/184/418/419/839/841, 171/184/418/419/622/839, 60, 419/622/839, 171/184/419/622/839/841, 418/723/841, 839/841, 483, 865, 418/723/841/865, 419, 307, 419/841/865, 169/418/419/839, 419/841, 420, 495, 416, 857, 499, 41, 30, 75, 26, 670, or 269, wherein the amino acid positions are relative to the reference sequence corresponding to residues 8 to 890 of SEQ ID NO: 548, or relative to the reference sequence corresponding to SEQ ID NO: 548.

40. (canceled)

41. The engineered RNA polymerase of 17, comprising an amino acid sequence having at least 70%, 75%, 80%, 81%, 82%, 83%, 84%, 85%, 86%, 87%, 88%, 89%, 90%, 91%, 92%, 93%, 94%, 95%, 96%, 97%, 98%, 99%, or more sequence identity to the reference sequence corresponding to residues 8 to 890 of SEQ ID NO: 896, or to the reference sequence corresponding to SEQ ID NO: 896, wherein the amino acid sequence comprises one or more substitutions relative to the reference sequence corresponding to residues 8 to 890 of SEQ ID NO: 896, or relative to the reference sequence corresponding to SEQ ID NO: 896.

42. The engineered RNA polymerase of claim 18, comprising an amino acid sequence having at least 70%, 75%, 80%, 81%, 82%, 83%, 84%, 85%, 86%, 87%, 88%, 89%, 90%, 91%, 92%, 93%, 94%, 95%, 96%, 97%, 98%, 99%, or more sequence identity to the reference sequence corresponding to residues 8 to 890 of an even-numbered SEQ ID NO. of SEQ ID NOs: 1006-1156, or to the reference sequence corresponding to an even-numbered SEQ ID NO. of SEQ ID NOs: 1006-1156, wherein the amino acid sequence comprises one or more substitutions relative to the reference sequence corresponding to residues 8 to 890 of SEQ ID NO: 896, or relative to the reference sequence corresponding to SEQ ID NO: 896.

43. The engineered RNA polymerase of claim 41, wherein the amino acid sequence of the engineered RNA polymerase comprises at least a substitution or substitution set at amino acid positions(s) 246/399/517/607/782/856/876, 517/640/670/720/779/782, 246/751/779/782, 404/607/856/876, 246/517/664/751/779, 640/664/779/782, 399/517/664/856/876, 246/379/399/517/751, 404/517/640/664/751/793/876, 517/640/670/720/751/779/782, 517/876, 135/340, 246/399/640/720/779/782/793/856/876, 340, 246/340, 664/720/779/782/793/856, 399/404/517/670/779/782/876, 379/517/640, 136/246/340, 404/751/779/782, 404/517/640/664/720/793, 379/517/640/779/782/793/856/876, 399/404/664/670/720/751/779/782, 640/793, 136/340/379, 15/246/535/607/664, 517/664/720, 517/607/856, 517/664/720/779, 135/416, 517/664/720/779/782/856, 135/136, 856, 135/136/340/375/379, 340/399, 399/664/720/751/793/810/856, 246/404/645/664/720/782/856/876, 379, 246/517/607, 246/664, 517, 7/135/136/340/379/416, 246/517/751/856, 517/670/720/751/779/782/856, 135/136/340, 640/664/751/856/876, 399/404/517/779/782, 640/779/782/856, 136/246, 399/404/517, 246/340/416, 517/664/751/856, 404/640/664, 246/517/751/779/782/856, 399/517/664/856, 404/517/664/720/782, 135/364, 517/607/640/664/720/779/782/856, 136/364/399/404, 136/340, 399/404/517/720/876, 404/416/517/640/645/720/751/779/782, 246/416, 136, 136/340/399, 416, 135/195/246/340/379, 246/340/364, 340/379/399, 399/404/416/517/607, 404/517/664/720, 517/640/751/756, or 517/607/640/645/664/720/751/779, wherein the amino acid positions are relative to the reference sequence corresponding to residues 8 to 890 of SEQ ID NO: 896, or relative to the reference sequence corresponding to SEQ ID NO: 896.

44. (canceled)

45. The engineered RNA polymerase of claim 17, comprising an amino acid sequence having at least 70%, 75%, 80%, 81%, 82%, 83%, 84%, 85%, 86%, 87%, 88%, 89%, 90%, 91%, 92%, 93%, 94%, 95%, 96%, 97%, 98%, 99%, or more sequence identity to the reference sequence corresponding to residues 8 to 890 of SEQ ID NO: 1030, or to the reference sequence corresponding to SEQ ID NO: 1030, wherein the amino acid sequence comprises one or more substitutions relative to the reference sequence corresponding to residues 8 to 890 of SEQ ID NO: 1030, or relative to the reference sequence corresponding to SEQ ID NO: 1030.

46. The engineered RNA polymerase of claim 18, comprising an amino acid sequence having at least 70%, 75%, 80%, 81%, 82%, 83%, 84%, 85%, 86%, 87%, 88%, 89%, 90%, 91%, 92%, 93%, 94%, 95%, 96%, 97%, 98%, 99%, or more sequence identity to the reference sequence corresponding to residues 8 to 890 of an even-numbered SEQ ID NO. of SEQ ID NOs: 1158-1728, or to the reference sequence corresponding to an even-numbered SEQ ID NO. of SEQ ID NOs: 1158-1728, wherein the amino acid sequence comprises one or more substitutions relative to the reference sequence corresponding to residues 8 to 890 of SEQ ID NO: 1030, or relative to the reference sequence corresponding to SEQ ID NO: 1030.

47. The engineered RNA polymerase of claim 45, wherein the amino acid sequence of the engineered RNA polymerase comprises at least a substitution or substitution set at amino acid positions(s) 60/135/185/420/483/499/832/857, 41/60/135/180/185/420/499/832, 135/136/185/416/420, 135/136/185/307/420/832/857, 135/136/180/185/307/477/832, 60/135/180/185/420/832, 60/135/136/180/185/832, 41/180/185/832/857, 185/307/416/832/857, 41/104/180/185/307/857, 41/135/136/180/185/420/477/832/857, 41/135/185/420/477/832, 41/135/180/185/416/477/832, 794, 41/60/136/185/416/420/477, 41/135/136/185/477/857, 185/477/832, 60/135/136/180/416/420/477/709/832, 135/136/180/185/416/420/832, 135/136/185/416/420/832, 41/135/136/185/307/420/483, 41/136/180/185/307/416/420/483/832/857, 41/185/420/483/832, 41/185/420/794, 185/416/420/832, 135/180/185/420/477/495/794/832, 135/136/185/416/420/794, 41/60/185/416, 41/136/180/307/416/420/832/857, 180/185/416/420/832, 41/180/185/420/477/496/857, 41/60/135/180/185/420/483/496, 41/180/185/307/416/420/832/857, 41/136/185/416/420/477/857, 135/136/180/185/416/832, 41/60/135/136/180/185/416/420/496/832/857, 41/135/136/185/477, 41/135/180/477, 41/180/185/416/420/832, 60/185/477/857, 41/832, 41/180/185/477/483/794/857, 41/136/416/420/483/832, 41/185/416/420/832, 41/136/180/185/420/477/857, 307/794, 60/135/136/185/420/857, 60/135/136/185/416, 180/307/420/832, 136/180/185/416, 41/60/180/185, 41/180/185/477/794, 41/185/794/857, 41/136, 41/60/185/857, 60/135/180/185/794, or 135/136/180/416/857, wherein the amino acid positions are relative to the reference sequence corresponding to residues 8 to 890 of SEQ ID NO: 1030, or relative to the reference sequence corresponding to SEQ ID NO: 1030.

48. (canceled)

49. The engineered RNA polymerase of claim 45, wherein the amino acid sequence of the engineered RNA polymerase comprises at least a substitution or substitution set at amino acid positions(s) 132/246/399/640/720/779/782/793/856/876, 134/399/640/720/779/782/793/856/876, 134/246/640/720/779/782/793/856/876, 246/399/640/655/720/779/782/793/856/876, 246/387/399/640/720/779/782/793/856/876, 246/370/399/640/720/779/782/793/856/876, 246/357/399/640/720/779/782/793/856/876, 246/399/635/640/720/779/782/793/856/876, 246/327/399/640/720/779/782/793/856/876, 246/296/399/640/720/779/782/793/856/876, 246/399/640/720/779/782/793/856/876, 246/309/399/640/720/779/782/793/856/876, 246/399/640/720/723/779/782/793/856/876, 399/640/664/720/779/782/793/856/876, 246/378/399/640/720/779/782/793/856/876, 246/399/640/691/720/779/782/793/856/876, 133/246/379/399/640/720/779/782/793/856/876, 246/310/399/640/720/779/782/793/856/876, 246/399/462/640/720/779/782/793/856/876, 246/399/502/640/720/779/782/793/856/876, 246/399/629/640/720/779/782/793/856/876, 246/399/499/640/720/779/782/793/856/876, 246/399/582/640/720/779/782/793/856/876, 399/640/720/779/782/793/856/876, 246/399/418/640/720/779/782/793/856/876, 246/399/489/640/720/779/782/793/856/876, 246/389/399/640/720/779/782/793/856/876, 246/399/494/640/720/779/782/793/856/876, 246/394/399/640/720/779/782/793/856/876, 399/640/720/751/779/782/793/856/876, 246/399/498/640/720/779/782/793/856/876, 246/399/616/640/720/779/782/793/856/876, 246/399/403/640/720/779/782/793/856/876, 246/399/613/640/720/779/782/793/856/876, 246/352/399/640/720/779/782/793/856/876, 246/399/529/640/720/779/782/793/856/876, 223/246/399/640/720/779/782/793/856/876, 246/379/399/640/720/779/782/793/856/876, 246/399/573/640/720/779/782/793/856/876, 246/336/399/640/720/779/782/793/856/876, 246/399/484/640/720/779/782/793/856/876, 246/399/640/672/720/779/782/793/856/876, 246/386/399/640/720/779/782/793/856/876, 246/399/640/720/725/779/782/793/856/876, 399/416/640/720/779/782/793/856/876, 246/399/598/640/720/779/782/793/856/876, 246/399/530/640/720/779/782/793/856/876, 246/399/491/640/720/779/782/793/856/876, 246/365/399/640/720/779/782/793/856/876, 246/399/640/720/724/779/782/793/856/876, 246/399/461/640/720/779/782/793/856/876, 246/399/615/640/720/779/782/793/856/876, 246/362/399/640/720/779/782/793/856/876, 246/359/399/640/720/779/782/793/856/876, 246/399/633/640/720/779/782/793/856/876, 246/302/399/640/720/779/782/793/856/876, 246/324/399/640/720/779/782/793/856/876, 133/246/399/640/720/779/782/793/856/876, 246/299/399/640/720/779/782/793/856/876, 246/399/640/675/720/779/782/793/856/876, 246/399/416/640/720/779/782/793/856/876, 246/399/405/640/720/779/782/793/856/876, 246/399/593/640/720/779/782/793/856/876, 246/640/720/779/782/793/856/876, 246/399/564/640/720/779/782/793/856/876, 246/399/590/640/720/779/782/793/856/876, 246/399/517/640/720/779/782/793/856/876, 246/399/622/640/720/779/782/793/856/876, 364/399/640/720/779/782/793/856/876, 246/399/626/640/720/779/782/793/856/876, 246/376/399/640/720/779/782/793/856/876, 246/399/625/640/720/779/782/793/856/876, 246/379/399/416/640/720/779/782/793/856/876, 246/350/399/640/720/779/782/793/856/876, 246/399/599/640/720/779/782/793/856/876, 246/399/600/640/720/779/782/793/856/876, 246/399/640/659/720/779/782/793/856/876, 246/399/425/640/720/779/782/793/856/876, 246/399/640/668/720/779/782/793/856/876, 246/399/640/720/730/779/782/793/856/876, 246/399/591/640/720/779/782/793/856/876, 246/343/399/640/720/779/782/793/856/876, 246/367/399/640/720/779/782/793/856/876, 246/399/640/720/779/782/793/846/856/876, 246/399/561/640/720/779/782/793/856/876, 246/372/399/640/720/779/782/793/856/876, 246/399/640/690/720/779/782/793/856/876, 246/399/455/640/720/779/782/793/856/876, 246/399/537/640/720/779/782/793/856/876, 246/399/583/640/720/779/782/793/856/876, 246/369/399/640/720/779/782/793/856/876, 246/399/640/720/779/782/793/876, 246/399/437/640/720/779/782/793/856/876, 246/340/640/720/779/782/793/856/876, 246/399/623/640/720/779/782/793/856/876, 246/399/464/640/720/779/782/793/856/876, 246/382/399/640/720/779/782/793/856/876, 246/399/579/640/720/779/782/793/856/876, 246/399/618/640/720/779/782/793/856/876, 246/399/514/640/720/779/782/793/856/876, 246/399/607/640/720/779/782/793/856/876, 340/399/640/720/779/782/793/856/876, 246/399/640/676/720/779/782/793/856/876, 246/399/640/720/751/779/782/793/856/876, 246/399/640/664/720/779/782/793/856/876, 136/399/640/720/779/782/793/856/876, 246/399/517/640/720/779/782/793/856, 246/399/410/640/720/779/782/793/856/876, 246/313/399/640/720/779/782/793/856/876, 246/364/399/640/720/779/782/793/856/876, 135/246/399/640/720/779/782/793/856/876, or 246/399/608/640/720/779/782/793/856/876, wherein the amino acid positions are relative to the reference sequence corresponding to residues 8 to 890 of SEQ ID NO: 1030, or relative to the reference sequence corresponding to SEQ ID NO: 1030.

50. (canceled)

51. The engineered RNA polymerase of claim 45, wherein the amino acid sequence of the engineered RNA polymerase comprises at least a substitution or substitution set at amino acid positions(s) 664, 352/357/359/378/633/672, 352/633, 357/370/387/394/625/725, 352/387/629, 357, 310/357/359/387/389/489/561/625, 310/357, 310/352/357/359/725, 352/357/362/561/725, 357/359/370, 352/378/403/561, 378/579/625/633/636, 357/359/378/394/403/725, 387/389/489/579/625, 352/378, 357/378/394, 357/625, 352/362/387/561, 310/357/359/387/672/725, 658, 310/352/359/561/579/625/691/725, 310/357/403, 310/352/403/579/629, 310/352/378/489/579/629/633, 625, 310/352/378/394/403/691/725, 310/357/359/403, 310/352/359/403/579/625, 310/352/370/579/625, 312, 310/352/625, 310/352/625/725, 310/357/394, 310/352, 725, 352/359, 308, 310/387/672, 310/359/370/625, 378/561, 370, 359/725, 237, 378, 352, 310, 370/691/770, 310/357/359/489/672, 357/359/579/691, 310/352/579, 352/370/625, 625/672, 310/357/359/394/489/561/625/725, 625/725, 310/625, 657, 352/359/394/579/672, 311, 359/370/579, 649, 489, 561, 370/378/489/691/725, 394/489/579/625, 98, 132,310/561/579/672, 309, 403/629, 315, 662, 650, 108, 359/625, 665, 310/394/489/579/633/691, 362/394/561/625, 310/378/691, 653, 307, 310/352/370/394/625/725, 663, 310/370/625, 352/394, 352/362/672, 101, 561/579/629/672/725, 352/625, 135, 668, 145, or 126, wherein the amino acid positions are relative to the reference sequence corresponding to residues 8 to 890 of SEQ ID NO: 1030, or relative to the reference sequence corresponding to SEQ ID NO: 1030.

52. (canceled)

53. The engineered RNA polymerase of claim 17, comprising an amino acid sequence having at least 70%, 75%, 80%, 81%, 82%, 83%, 84%, 85%, 86%, 87%, 88%, 89%, 90%, 91%, 92%, 93%, 94%, 95%, 96%, 97%, 98%, 99%, or more sequence identity to the reference sequence corresponding to residues 8 to 890 of SEQ ID NO: 1036, or to the reference sequence corresponding to SEQ ID NO: 1036, wherein the amino acid sequence comprises one or more substitutions relative to the reference sequence corresponding to residues 8 to 890 of SEQ ID NO: 1036, or relative to the reference sequence corresponding to SEQ ID NO: 1036.

54. The engineered RNA polymerase of claim 18, comprising an amino acid sequence having at least 70%, 75%, 80%, 81%, 82%, 83%, 84%, 85%, 86%, 87%, 88%, 89%, 90%, 91%, 92%, 93%, 94%, 95%, 96%, 97%, 98%, 99%, or more sequence identity to the reference sequence corresponding to residues 8 to 890 of an even-numbered SEQ ID NO. of SEQ ID NOs: 1730-1800, or to the reference sequence corresponding to an even-numbered SEQ ID NO. of SEQ ID NOs: 1730-1800, wherein the amino acid sequence comprises one or more substitutions relative to the reference sequence corresponding to residues 8 to 890 of SEQ ID NO: 1036, or relative to the reference sequence corresponding to SEQ ID NO: 1036.

55. The engineered RNA polymerase of claim 53, wherein the amino acid sequence of the engineered RNA polymerase comprises at least a substitution or substitution set at amino acid positions(s) 139/309/310/357/387, 135/139/357/359/387/655/658, 139/633, 145/237/250/378/648/649, 139/310/387/633/655/658, 144/237/648/649, 250/352/359/648/649, 237/378/648/649, 145/648/649, 135/139/352/655/658, 135/139/151, 310/655/658, 135/139/310, 126/237/648/649, 135/310/655/658, 144/145/359/633/648/649, 151/310/655/658, 237/250/308/378/633/648/649/663, 250/310/633, 308/310/633/655/725, 237/250, 357/633/648/649, 310/352/633/648, 308/655/658, 237/633, 139/308/310, 139/308/655/658/725, 145/250/308/310, 139/357/655/658, 633/655/658/725, 250/310, 237/250/650, 139/151/308/310/352/359/633, 310/357/359/633/658, 237/309/310, or 237/308/310/633, wherein the amino acid positions are relative to the reference sequence corresponding to residues 8 to 890 of SEQ ID NO: 1036, or relative to the reference sequence corresponding to SEQ ID NO: 1036.

56. (canceled)

57. The engineered RNA polymerase of claim 17, comprising an amino acid sequence having at least 70%, 75%, 80%, 81%, 82%, 83%, 84%, 85%, 86%, 87%, 88%, 89%, 90%, 91%, 92%, 93%, 94%, 95%, 96%, 97%, 98%, 99%, or more sequence identity to the reference sequence corresponding to residues 8 to 890 of SEQ ID NO: 1742, or to the reference sequence corresponding to SEQ ID NO: 1742, wherein the amino acid sequence comprises one or more substitutions relative to the reference sequence corresponding to residues 8 to 890 of SEQ ID NO: 1742, or relative to the reference sequence corresponding to SEQ ID NO: 1742.

58. The engineered RNA polymerase of claim 18, comprising an amino acid sequence having at least 70%, 75%, 80%, 81%, 82%, 83%, 84%, 85%, 86%, 87%, 88%, 89%, 90%, 91%, 92%, 93%, 94%, 95%, 96%, 97%, 98%, 99%, or more sequence identity to the reference sequence corresponding to residues 8 to 890 of an even-numbered SEQ ID NO. of SEQ ID NOs: 1802-1912, or to the reference sequence corresponding to an even-numbered SEQ ID NO. of SEQ ID NOs: 1802-1912, wherein the amino acid sequence comprises one or more substitutions relative to the reference sequence corresponding to residues 8 to 890 of SEQ ID NO: 1742, or relative to the reference sequence corresponding to SEQ ID NO: 1742.

59. The engineered RNA polymerase of claim 57, wherein the amino acid sequence of the engineered RNA polymerase comprises at least a substitution or substitution set at amino acid positions(s) 139/140/633/659/662/663/743/782/784/793, 129/132/150/206/207/209/357/425/541/778, 101/129/132/150/206/209/357/425/778, 132/150/206/207/311/357/778, 140/206/210/633/659/782, 140/206/659/663/782/784/855, 139/140/144/206/210/633/662/782/784/795, 139/206/210/633/659/662/663/784, 139/633/659/663/782/784, 140/206/210/663, 206/207/209/357/425/778, 139/140/144/662/782, 129/132/150/206/207/209/425/543, 139/140/206/210/633/659/782, 101/132/150/206/209/357/425/541, 139/206/210/662, 207/209/357/425/778, 132/425/541/778, 150/206/207/425, 132/206/207/778, 139/659/662/782/784, 140/662/782, 206/210/633/659, 139/210/633/662/782, 139/206/210/659/663, 129/132/150/204/207/357, 139/144/659/662/782, 129/132/150/206/207/209/235/357/778, 206/210/633/795, 778, 662/663/782, 132/206/207/209/357/425/541/778, 129/132/207/235/425/778, 132/150/206, 140/206/210/662/663, 425/541/778, 139/206/659/663/782/795, 101/132/150/425/541/778, 139/144/659/782, 140, 659, 150/206/209/235/357/543/778, 101/132/206/209/543/778, 132/204/206/357/778, 129/132/150/206/207/209/543, 139/144/659/662/663/782/793, 357/778, 139/140/206/210/633/659/663, 129/132/235/357/541, 129/132/311/357/541, 101/129/132/206/209/778, 101/132/206/209, 140/659/663, 206/210/633/662/663, 140/144/659/663/743, or 139/140/633/659/662, wherein the amino acid positions are relative to the reference sequence corresponding to residues 8 to 890 of SEQ ID NO: 1742, or relative to the reference sequence corresponding to SEQ ID NO: 1742.

60. (canceled)

61. The engineered RNA polymerase of claim 17, comprising an amino acid sequence having at least 70%, 75%, 80%, 81%, 82%, 83%, 84%, 85%, 86%, 87%, 88%, 89%, 90%, 91%, 92%, 93%, 94%, 95%, 96%, 97%, 98%, 99%, or more sequence identity to the reference sequence corresponding to residues 8 to 890 of SEQ ID NO: 1838, or to the reference sequence corresponding to SEQ ID NO: 1838, wherein the amino acid sequence comprises one or more substitutions relative to the reference sequence corresponding to residues 8 to 890 of SEQ ID NO: 1838, or relative to the reference sequence corresponding to SEQ ID NO: 1838.

62. The engineered RNA polymerase of claim 18, comprising an amino acid sequence having at least 70%, 75%, 80%, 81%, 82%, 83%, 84%, 85%, 86%, 87%, 88%, 89%, 90%, 91%, 92%, 93%, 94%, 95%, 96%, 97%, 98%, 99%, or more sequence identity to the reference sequence corresponding to residues 8 to 890 of an even-numbered SEQ ID NO. of SEQ ID NOs: 1914-2018, or to the reference sequence corresponding to an even-numbered SEQ ID NO. of SEQ ID NOs: 1914-2018, wherein the amino acid sequence comprises one or more substitutions relative to the reference sequence corresponding to residues 8 to 890 of SEQ ID NO: 1838, or relative to the reference sequence corresponding to SEQ ID NO: 1838.

63. The engineered RNA polymerase of claim 61, wherein the amino acid sequence of the engineered RNA polymerase comprises at least a substitution or substitution set at amino acid positions(s) 473, 696, 450, 397/771, 397, 402, 378, 396, 841, 289, 388, 514, 474, 406, 357, 170/474, 761, 855, 367, 708, 407, 324, 345, 478, 513, 404, 390, 398, 715, 709, 399, 327, 438, 410, 76, 389,517, 274, 693, 553, 401, or 470, wherein the amino acid positions are relative to the reference sequence corresponding to residues 8 to 890 of SEQ ID NO: 1838, or relative to the reference sequence corresponding to SEQ ID NO: 1838.

64. (canceled)

65. (canceled)

66. (canceled)

67. (canceled)

68. (canceled)

69. (canceled)

70. (canceled)

71. The engineered RNA polymerase of claim 1, wherein the amino acid sequence of the engineered RNA polymerase comprises residues 8 to 890 of an even numbered SEQ ID NO. of SEQ ID NOs: 2-2018, or comprises an even numbered SEQ ID NO. of SEQ ID NOs: 2-2018, optionally wherein the amino acid sequence has 1, 2, 3, 4, 5, 6, 7, 8, 9, or up to 10 substitutions.

72. (canceled)

73. (canceled)

74. The engineered RNA polymerase of claim 1, having RNA polymerase activity and at least one improved property as compared to a reference RNA polymerase, wherein the improved property is selected from i) increased activity, ii) increased thermostability, iii) increased capping activity, or iv) increased RNA product yield, or any combination of i), ii), iii) and iv), as compared to a reference RNA polymerase, and wherein the reference RNA polymerase has the sequence corresponding to residues 8 to 890 of SEQ ID NO: 2, 4, 26, 424,548, 896, 1030, 1036, 1742, or 1838, or the sequence corresponding to SEQ ID NO: 2, 4, 26, 424,548, 896, 1030, 1036, 1742, or 1838.

75. (canceled)

76. (canceled)

77. (canceled)

78. A recombinant polynucleotide encoding an engineered RNA polymerase of claim 1.

79. (canceled)

80. (canceled)

81. (canceled)

82. (canceled)

83. (canceled)

84. An expression vector comprising at least one recombinant polynucleotide of claim 78.

85. (canceled)

86. (canceled)

87. A host cell comprising an expression vector of claim 84.

88. (canceled)

89. A method of producing an engineered RNA polymerase polypeptide in a host cell comprising culturing a host cell of claim 87 under suitable culture conditions such that at least one engineered RNA polymerase is produced.

90. (canceled)

91. (canceled)

92. A composition comprising an RNA polymerase of claim 1.

93. (canceled)

94. (canceled)

95. (canceled)

96. (canceled)

97. (canceled)

98. A method of producing RNA in vitro, comprising contacting a target DNA template with an engineered RNA polymerase of claim 1 in presence of one or more nucleotide triphosphates under conditions suitable for transcription of the DNA template.

99. (canceled)

100. (canceled)

101. (canceled)

102. (canceled)

103. A kit comprising an engineered RNA polymerase of claim 1.

104. (canceled)

The application's sequence listing, which the Patent Office published only in electronic form, follows.

SEQUENCE LISTING (2030 sequences)

SEQ ID NO: 1 - DNA, 2670 bp, synthetic construct
  misc_feature 1..2670: note = Variant of RNA polymerase
  source 1..2670: mol_type = other DNA
atgcaccatcaccatcaccatatgaacacgattaacatcgctaagaacgacttctctgacatcgaactggctgctatcccgttcaacactctggctgaccattacggtgagcgtttagctcgcgaacagttggcccttgagcatgagtcttacgagatgggtgaagcacgcttccgcaagatgtttgagcgtcaacttaaagctggtgaggttgcggataacgctgccgccaagcctctcatcactaccctactccctaagatgattgcacgcatcaacgactggtttgaggaagtgaaagctaagcgcggcaagcgcccgacagccttccagttcctgcaagaaatcaagccggaagccgtagcgtacatcaccattaagaccactctggcttgcctaaccagtgcggacaatacaaccgttcaggctgtagcaagcgcaatcggtcgggccattgaggacgaggctcgcttcggtcgtatccgtgaccttgaagctaagcacttcaagaaaaacgttgaggaacaactcaacaagcgcgtagggcacgtctacaagaaagcatttatgcaagttgtcgaggctgacatgctctctaagggtctactcggtggcgaggcgtggtcttcgtggcataaggaagactctattcatgtaggagtacgctgcatcgagatgctcattgagtcaaccggaatggttagcttacaccgccaaaatgctggcgtagtaggtcaagactctgagactatcgaactcgcacctgaatacgctgaggctatcgcaacccgtgcaggtgcgctggctggcatctctccgatgttccaaccttgcgtagttcctcctaagccgtggactggcattactggtggtggctattgggctgcggggcgcaaacccctgcagttagtacgtactcgcagtctggcggcgcttcgccgctatgaagaagtgtcgatgccggaggtcatcaaagcagtcaacattgcgcagaatacagcatggcgtgtgaacaagaaagttctcgacgtagcgaatgcaatcacccaatggcagcactgtccagtcgctgatgtgcctgcgatggatcgtggcgaaatgccagctcgtccgttggacatcgataccaacgagattgcacttaaagcgtggaagaaagaagcttccgcgttctaccgcaaagacaaagcacgcgttagccgtcgtctgtcaatggagtttatgttatctcaggcgaacaagtttgcgaattataaagcaatctggtttccgcaaaacatggattggcgtgggcgcgtgtacgctgtcccgatgttcaatcctcagggcaacgatatgacgaaaggcctgctgacctttgcgcagggtaaacccattggtgaagacggcttctattggctcaagattcatggcgcaaatacagctggagtggataaagtaccgtttccacaacgcatcaaatttgttgaggataaccatacgaatattatggaatgcgcgaaagcaccgctggaaaacacttggtgggcggaacaggacagcccgttctgttttctggcgttctgctttgagtatgctggcgtcatcaatcacggtctgtcgtacaactgtagcttgcctctggcatttgatggtagttgctccggcattcaacatttctcagcgatgttacgcgacgaaattggcggcaaagctgtgaatctcctcccatctgcggaagtgcaggatatttatcgtatcgtcagcgacaaagttaacgaggtactgaaacaagatctgattaacggtacctctaccaccttggaaacggtgactgataagaagacaggcgaaattaccgaacgcacgaaatacgggaccaaagttatggcacagtggtggttagaacacggtgtgaatcgtggcgtcacgaaacgctcggttatgactttggcgtatgggagcaaagagtttggattccgcgatcaagtgctgagtgacaccattcaaccggcgatcgataacggcaaaggtgacatgtttctgaatccgaatcaggctgctggttacatggcgaaactgatctggaacgcagtgtccgtcaccgtagtcgcagcagttgaggcgatgaactggctgaaaagtgcggcgaaattacttgctgctgaagtgaaggataagaagacggatacagttctgcgtggccgctgcgcagtacattgggtgactcccgacggcttccctgtgtggcaggaatacaagaagcctattcagacgcgcttgaacctgatgttcctcggtcagttccgcttacagcctaccattaacaccaacaaagatagcgagattgatgcacacaaacaggagtctggtatcgctcctaactttgtacacagccaagacggtagccaccttcgtaagactgtagtgtgggcacacgagaagtacggaatcgaatcttttgcactgattcacgactccttcggtaccattccggctgacgctgcgaacctgttcaaagcagtgcgcgaaactatggttgacacatatgagtcttgtgatgtactggctgatttctacgaccagttcgctgaccagttgcacgagtctcaattggacaaaatgccagcacttccggctaaaggtaacttgaacctccgtgacatcttagagtcggacttcgcgttcgcg

SEQ ID NO: 2 - protein, 890 aa, synthetic construct
  REGION 1..890: note = Variant of RNA polymerase
MHHHHHHMNTINIAKNDFSDIELAAIPFNTLADHYGERLAREQLALEHESYEMGEARFRKMFERQLKAGEVADNAAAKPLITTLLPKMIARINDWFEEVKAKRGKRPTAFQFLQEIKPEAVAYITIKTTLACLTSADNTTVQAVASAIGRAIEDEARFGRIRDLEAKHFKKNVEEQLNKRVGHVYKKAFMQVVEADMLSKGLLGGEAWSSWHKEDSIHVGVRCIEMLIESTGMVSLHRQNAGVVGQDSETIELAPEYAEAIATRAGALAGISPMFQPCVVPPKPWTGITGGGYWAAGRKPLQLVRTRSLAALRRYEEVSMPEVIKAVNIAQNTAWRVNKKVLDVANAITQWQHCPVADVPAMDRGEMPARPLDIDTNEIALKAWKKEASAFYRKDKARVSRRLSMEFMLSQANKFANYKAIWFPQNMDWRGRVYAVPMFNPQGNDMTKGLLTFAQGKPIGEDGFYWLKIHGANTAGVDKVPFPQRIKFVEDNHTNIMECAKAPLENTWWAEQDSPFCFLAFCFEYAGVINHGLSYNCSLPLAFDGSCSGIQHFSAMLRDEIGGKAVNLLPSAEVQDIYRIVSDKVNEVLKQDLINGTSTTLETVTDKKTGEITERTKYGTKVMAQWWLEHGVNRGVTKRSVMTLAYGSKEFGFRDQVLSDTIQPAIDNGKGDMFLNPNQAAGYMAKLIWNAVSVTVVAAVEAMNWLKSAAKLLAAEVKDKKTDTVLRGRCAVHWVTPDGFPVWQEYKKPIQTRLNLMFLGQFRLQPTINTNKDSEIDAHKQESGIAPNFVHSQDGSHLRKTVVWAHEKYGIESFALIHDSFGTIPADAANLFKAVRETMVDTYESCDVLADFYDQFADQLHESQLDKMPALPAKGNLNLRDILESDFAFA

SEQ ID NO: 3 - DNA, 2670 bp, synthetic construct
  misc_feature 1..2670: note = Variant of RNA polymerase
  source 1..2670: mol_type = other DNA
atgcaccatcaccatcaccatatgaacacgattaacatcgctaagaacgacttctctgacatcgaactggctgctatcccgttcaacactctggctgaccattacggtgagcgtttagctcgcgaacagttggcccttgagcatgagtcttacgagatgggtgaagcacgcttccgcaagatgtttgagcgtcaacttaaagctggtgaggttgcggataacgctgccgccaagcctctcatcactaccctactccctaagatgattgcacgcatcaacgactggtttgaggaagtgaaagctaagcgcggcaagcgcccgacagccttccagttcctgcaagaaatcaagccggaagccgtagcgtacatcaccattaagaccactctggcttgcctaaccagtgcggacaatacaaccgttcaggctgtagcaagcgcaatcggtcgggccattgaggacgaggctcgcttcggtcgtatccgtgaccttgaagctaagcacttcaagaaaaacgttgaggaacaactcaacaagcgcgtagggcacgtctacaagaaagcatttatgcaagttgtcgaggctgacatgctctctaagggtctactcggtggcgaggcgtggtcttcgtggcataaggaagactctattcatgtaggagtacgctgcatcgagatgctcattgagtcaaccggaatggttagcttacaccgccaaaatgctggcgtagtaggtcaagactctgagactatcgaactcgcacctgaatacgctgaggctatcgcaacccgtgcaggtgcgctggctggcatctctccgatgttccaaccttgcgtagttcctcctaagccgtggactggcattactggtggtggctattgggctgcggggcgcaaacccctgcagttagtacgtactcgcagtctggcggcgcttcgccgctatgaagaagtgtcgatgccggaggtcatcaaagcagtcaacattgcgcagaatacagcatggcgtgtgaacaagaaagttctcgacgtagcgaatgcaatcacccaatggcagcactgtccagtcgcggatgtgcctgcgatggatcgtggcgaaatgccagctcgtccgttggacatcgataccaacgagattgcacttaaagcgtggaagaaagaagcttccgcgttctaccgcaaagacaaagcacgcgttagccgtcgtctgtcaatggagtttatgttatctcaggcgaacaagtttgcgaattataaagcaatctggtttccgcaaaacatggattggcgtgggcgcgtgtacgctgtcccgatgttcaatcctcagggcaacgatatgacgaaaggcctgctgacctttgcgcagggtaaacccattggtgaagacggcttctattggctcaagattcatggcgcaaatacagctggagtggataaagtaccgtttccacaacgcatcaaatttgttgaggataaccatacgaatattatggaatgcgcgaaagcaccgctggaaaacacttggtgggcggaacaggactcgccgttctgttttctggcgttctgctttgagtatgctggcgtcatcaatcacggtctgtcgtacaactgtagcttgcctctggcatttgatggtagttgctccggcattcaacatttctcagcgatgttacgcgacgaaattggcggcaaagctgtgaatctcctcccatctgcggaagtgcaggatatttatcgtatcgtcagcgacaaagttaacgaggtactgaaacaagatctgattaacggtacctctaccaccttggaaacggtgactgataagaagacaggcgaaattaccgaacgcacgaaatacgggaccaaagttatggcacagtggtggttagaacacggtgtgaatcgtggcgtcacgaaacgctcggttatgactttggcgtatgggagcaaagagtttggattccgcgatcaagtgctgagtgacaccattcaaccggcgatcgataacggcaaaggtgacatgtttctgaatccgaatcaggctgctggttacatggcgaaactgatctggaacgcagtgtccgtcaccgtagtcgcagcagttgaggcgatgaactggctgaaaagtgcggcgaaattacttgctgctgaagtgaaggataagaagacggatacagttctgcgtggccgctgcgcagtacattgggtgactcccgacggcttccctgtgtggcaggaatacaagaagcctattcagacgcgcttgaacctgatgttcctcggtcagttccgcttacagcctaccattaacaccaacaaagatagcgagattgatgcacacaaacaggagtctggtatcgctcctaactttgtacacagccaagacggtaaccaccttcgtatgactgtagtgtgggcacacgagaagtacggaatcgaatcttttgcactgattcacgactccttcggtaccattccggctgacgctgcgaacctgttcaaagcagtgcgcgaaactatggtttcgacatatgagtcttgtgatgtactggctgatttctacgaccagttcgctgaccagttgcacgagtctcaattggacaaaatgccagcacttccggctaaaggtaacttgaacctccgtgacatcttaaaatcggacttcgcgttcgcg

SEQ ID NO: 4 - protein, 890 aa, synthetic construct
  REGION 1..890: note = Variant of RNA polymerase
MHHHHHHMNTINIAKNDFSDIELAAIPFNTLADHYGERLAREQLALEHESYEMGEARFRKMFERQLKAGEVADNAAAKPLITTLLPKMIARINDWFEEVKAKRGKRPTAFQFLQEIKPEAVAYITIKTTLACLTSADNTTVQAVASAIGRAIEDEARFGRIRDLEAKHFKKNVEEQLNKRVGHVYKKAFMQVVEADMLSKGLLGGEAWSSWHKEDSIHVGVRCIEMLIESTGMVSLHRQNAGVVGQDSETIELAPEYAEAIATRAGALAGISPMFQPCVVPPKPWTGITGGGYWAAGRKPLQLVRTRSLAALRRYEEVSMPEVIKAVNIAQNTAWRVNKKVLDVANAITQWQHCPVADVPAMDRGEMPARPLDIDTNEIALKAWKKEASAFYRKDKARVSRRLSMEFMLSQANKFANYKAIWFPQNMDWRGRVYAVPMFNPQGNDMTKGLLTFAQGKPIGEDGFYWLKIHGANTAGVDKVPFPQRIKFVEDNHTNIMECAKAPLENTWWAEQDSPFCFLAFCFEYAGVINHGLSYNCSLPLAFDGSCSGIQHFSAMLRDEIGGKAVNLLPSAEVQDIYRIVSDKVNEVLKQDLINGTSTTLETVTDKKTGEITERTKYGTKVMAQWWLEHGVNRGVTKRSVMTLAYGSKEFGFRDQVLSDTIQPAIDNGKGDMFLNPNQAAGYMAKLIWNAVSVTVVAAVEAMNWLKSAAKLLAAEVKDKKTDTVLRGRCAVHWVTPDGFPVWQEYKKPIQTRLNLMFLGQFRLQPTINTNKDSEIDAHKQESGIAPNFVHSQDGNHLRMTVVWAHEKYGIESFALIHDSFGTIPADAANLFKAVRETMVSTYESCDVLADFYDQFADQLHESQLDKMPALPAKGNLNLRDILKSDFAFA

SEQ ID NO: 5 - DNA, 2670 bp, synthetic construct
  misc_feature 1..2670: note = Variant of RNA polymerase
  source 1..2670: mol_type = other DNA
atgcaccatcaccatcaccatatgaacacgattaacatcgctaagaacgacttctctgacatcgaactggctgctatcccgttcaacactctggctgaccattacggtgagcgtttagctcgcgaacagttggcccttgagcatgagtcttacgagatgggtgaagcacgcttccgcaagatgtttgagcgtcaacttaaagctggtgaggttgcggataacgctgccgccaagcctctcatcactaccctactccctaagatgattgcacgcatcaacgactggtttgaggaagtgaaagctaagcgcggcaagcgcccgacagccttccagttcctgcaagaaatcaagccggaagccgtagcgtacatcaccattaagaccactctggcttgcctaaccagtgcggacaatacaaccgttcaggctgtagcaagcgcaatcggtcgggccattgaggacgaggctcgcttcggtcgtatccgtgaccttgaagctaagcacttcaagaaaaacgttgaggaacaactcaacaagcgcgtagggcacgtctacaagaaagcatttatgcaagttgtcgaggctgacatgctctctaagggtctactcggtggcgaggcgtggtcttcgtggcataaggaagactctattcatgtaggagtacgctgcatcgagatgctcattgagtcaaccggaatggttagcttacaccgccaaaatgctggcgtagtaggtcaagactctgagactatcgaactcgcacctgaatacgctgaggctatcgcaacccgtgcaggtgcgctggctggcatctctccgatgttccaaccttgcgtagttcctcctaagccgtggactggcattactggtggtggctattgggctgcggggcgcaaacccctgcagttagtacgtactcgcagtctggcggcgcttcgccgctatgaagaagtgtcgatgccggaggtcatcaaagcagtcaacattgcgcagaatacagcatggcgtgtgaacaagaaagttctcgacgtagcgaatgcaatcacccaatggcagcactgtccagtcgcggatgtgcctgcgatggatcgtggcgaaatgccagctcgtccgttggacatcgataccaacgagattgcacttaaagcgtggaagaaagaagcttccgcgttctaccgccgtgacaaagcacgcgttagccgccgtctgagcatggagtttatgttatctcaggcgaacaagtttgcgaattataaagcaatctggtttccgcaaaacatggattggcgtgggcgcgtgtacgctgtcccgatgttcaatcctcagggcaacgatatgacgaaaggcctgctgacctttgcgcagggtaaacccattggtgaagacggcttctattggctcaagattcatggcgcaaatacagctggagtggataaagtaccgtttccacaacgcatcaaatttgttgaggataaccatacgaatattatggaatgcgcgaaagcaccgctggaaaacacttggtgggcggaacaggactcgccgttctgttttctggcgttctgctttgagtatgctggcgtcatcaatcacggtctgtcgtacaactgtagcttgcctctggcatttgatggtagttgctccggcattcaacatttctcagcgatgttacgcgacgaaattggcggcaaagctgtgaatctcctcccatctgcggaagtgcaggatatttatcgtatcgtcagcgacaaagttaacgaggtactgaaacaagatctgattaacggtacctctaccaccttggaaacggtgactgataagaagacaggcgaaattaccgaacgcacgaaatacgggaccaaagttatggcacagtggtggttagaacacggtgtgaatcgtggcgtcacgaaacgctcggttatgactttggcgtatgggagcaaagagtttggattccgcgatcaagtgctgagtgacaccattcaaccggcgatcgataacggcaaaggtgacatgtttctgaatccgaatcaggctgctggttacatggcgaaactgatctggaacgcagtgtccgtcaccgtagtcgcagcagttgaggcgatgaactggctgaaaagtgcggcgaaattacttgctgctgaagtgaaggataagaagacggatacagttctgcgtggccgctgcgcagtacattgggtgactcccgacggcttccctgtgtggcaggaatacaagaagcctattcagacgcgcttgaacctgatgttcctcggtcagttccgcttacagcctaccattaacaccaacaaagatagcgagattgatgcacacaaacaggagtctggtatcgctcctaactttgtacacagccaagacggtagccaccttcgtaagactgtagtgtgggcacacgagaagtacggaatcgaatcttttgcactgattcacgactccttcggtaccattccggctgacgctgcgaacctgttcaaagcagtgcgcgaaactatggttgacacatatgagtcgaacgatgtactggctgatttctacgaccagttcgctgaccagttgcacgagtctcaattggacaaaatgccagcacttccggctaaaggtaacttgaacctccgtgacatcttagagtcggacttcgcgttcgcg

SEQ ID NO: 6 - protein, 890 aa, synthetic construct
  REGION 1..890: note = Variant of RNA polymerase
MHHHHHHMNTINIAKNDFSDIELAAIPFNTLADHYGERLAREQLALEHESYEMGEARFRKMFERQLKAGEVADNAAAKPLITTLLPKMIARINDWFEEVKAKRGKRPTAFQFLQEIKPEAVAYITIKTTLACLTSADNTTVQAVASAIGRAIEDEARFGRIRDLEAKHFKKNVEEQLNKRVGHVYKKAFMQVVEADMLSKGLLGGEAWSSWHKEDSIHVGVRCIEMLIESTGMVSLHRQNAGVVGQDSETIELAPEYAEAIATRAGALAGISPMFQPCVVPPKPWTGITGGGYWAAGRKPLQLVRTRSLAALRRYEEVSMPEVIKAVNIAQNTAWRVNKKVLDVANAITQWQHCPVADVPAMDRGEMPARPLDIDTNEIALKAWKKEASAFYRRDKARVSRRLSMEFMLSQANKFANYKAIWFPQNMDWRGRVYAVPMFNPQGNDMTKGLLTFAQGKPIGEDGFYWLKIHGANTAGVDKVPFPQRIKFVEDNHTNIMECAKAPLENTWWAEQDSPFCFLAFCFEYAGVINHGLSYNCSLPLAFDGSCSGIQHFSAMLRDEIGGKAVNLLPSAEVQDIYRIVSDKVNEVLKQDLINGTSTTLETVTDKKTGEITERTKYGTKVMAQWWLEHGVNRGVTKRSVMTLAYGSKEFGFRDQVLSDTIQPAIDNGKGDMFLNPNQAAGYMAKLIWNAVSVTVVAAVEAMNWLKSAAKLLAAEVKDKKTDTVLRGRCAVHWVTPDGFPVWQEYKKPIQTRLNLMFLGQFRLQPTINTNKDSEIDAHKQESGIAPNFVHSQDGSHLRKTVVWAHEKYGIESFALIHDSFGTIPADAANLFKAVRETMVDTYESNDVLADFYDQFADQLHESQLDKMPALPAKGNLNLRDILESDFAFA

SEQ ID NO: 7 - DNA, 2670 bp, synthetic construct
  misc_feature 1..2670: note = Variant of RNA polymerase
  source 1..2670: mol_type = other DNA
atgcaccatcaccatcaccatatgaacacgattaacatcgctaagaacgacttctctgacatcgaactggctgctatcccgttcaacactctggctgaccattacggtgagcgtttagctcgcgaacagttggcccttgagcatgagtcttacgagatgggtgaagcacgcttccgcaagatgtttgagcgtcaacttaaagctggtgaggttgcggataacgctgccgccaagcctctcatcactaccctactccctaagatgattgcacgcatcaacgactggtttgaggaagtgaaagctaagcgcggcaagcgcccgacagccttccagttcctgcaagaaatcaagccggaagccgtagcgtacatcaccattaagaccactctggcttgcctaaccagtgcggacaatacaaccgttcaggctgtagcaagcgcaatcggtcgggccattgaggacgaggctcgcttcggtcgtatccgtgaccttgaagctaagcacttcaagaaaaacgttgaggaacaactcaacaagcgcgtagggcacgtctacaagaaagcatttatgcaagttgtcgaggctgacatgctctctaagggtctactcggtggcgaggcgtggtcttcgtggcataaggaagactctattcatgtaggagtacgctgcatcgagatgctcattgagtcaaccggaatggttagcttacaccgccaaaatgctggcgtagtaggtcaagactctgagactatcgaactcgcacctgaatacgctgaggctatcgcaacccgtgcaggtgcgctggctggcatctctccgatgttccaaccttgcgtagttcctcctaagccgtggactggcattactggtggtggctattgggctgcggggcgcaaacccctgcagttagtacgtactcgcagtctggcggcgcttcgccgctatgaagaagtgtcgatgccggaggtcatcaaagcagtcaacattgcgcagaatacagcatggcgtgtgaacaagaaagttctcgacgtagcgaatgcaatcacccaatggcagcactgtccagtcgcggatgtgcctgcgatggatcgtggcgaaatgccagctcgtccgttggacatcgataccaacgagattgcacttaaagcgtggaagaaagaagcttccgcgttctaccgccgtgacaaagcacgcgttagccgtcgtctgtcaatggagtttatgttatctcaggcgaacaagtttgcgaattataaagcaatctggtttccgcaaaacatggattggcgtgggcgcgtgtacgctgtcccgatgttcaatcctcagggcaacgatatgacgaaaggcctgctgacctttgcgcagggtaaacccattggtgaagacggcttctattggctcaagattcatggcgcaaatacagctggagtggataaagtaccgtttccacaacgcatcaaatttgttgaggataaccatacgaatattatggaatgcgcgaaagcaccgctggaaaacacttggtgggcggaacaggactcgccgttctgttttctggcgttctgctttgagtatgctggcgtcatcaatcacggtctgtcgtacaactgtagcttgcctctggcatttgatggtagttgctccggcattcaacatttctcagcgatgttacgcgacgaaattggcggcaaagctgtgaatctcctcccatctgcggaagtgcaggatatttatcgtatcgtcagcgacaaagttaacgaggtactgaaacaagatctgattaacggtacctctaccaccttggaaacggtgactgataagaagacaggcgaaattaccgaacgcacgaaatacgggaccaaagttatggcacagtggtggttagaacacggtgtgaatcgtggcgtcacgaaacgctcggttatgactttggcgtatgggagcaaagagtttggattccgcgatcaagtgctgagtgacaccattcaaccggcgatcgataacggcaaaggtgacatgtttctgaatccgaatcaggctgctggttacatggcgaaactgatctggaacgcagtgtccgtcaccgtagtcgcagcagttgaggcgatgaactggctgaaaagtgcggcgaaattacttgctgctgaagtgaaggataagaagacggatacagttctgcgtggccgctgcgcagtacattgggtgactcccgacggcttccctgtgtggcaggaatacaagaagcctattcagacgcgcttgaacctgatgttcctcggtcagttccgcttacagcctaccattaacaccaacaaagatagcgagattgatgcacacaaacaggagtctggtatcgctcctaactttgtacacagccaagacggtagccaccttcgtaagactgtagtgtgggcacacgaggcttacggaatcgaatcttttgcactgattcacgactccttcggtaccattccggctgacgctgcgaacctgttcaaagcagtgcgcgaaactatggttgacacatatgagtcgaacgatgtactggctgatttctacgaccagttcgctgaccagttgcacgagtctcaattggacaaaatgccagcacttccggctaaaggtaacttgaacctccgcgacatcttagagtcggacttcgcgttcgcg

SEQ ID NO: 8 - protein, 890 aa, synthetic construct
  REGION 1..890: note = Variant of RNA polymerase
MHHHHHHMNTINIAKNDFSDIELAAIPFNTLADHYGERLAREQLALEHESYEMGEARFRKMFERQLKAGEVADNAAAKPLITTLLPKMIARINDWFEEVKAKRGKRPTAFQFLQEIKPEAVAYITIKTTLACLTSADNTTVQAVASAIGRAIEDEARFGRIRDLEAKHFKKNVEEQLNKRVGHVYKKAFMQVVEADMLSKGLLGGEAWSSWHKEDSIHVGVRCIEMLIESTGMVSLHRQNAGVVGQDSETIELAPEYAEAIATRAGALAGISPMFQPCVVPPKPWTGITGGGYWAAGRKPLQLVRTRSLAALRRYEEVSMPEVIKAVNIAQNTAWRVNKKVLDVANAITQWQHCPVADVPAMDRGEMPARPLDIDTNEIALKAWKKEASAFYRRDKARVSRRLSMEFMLSQANKFANYKAIWFPQNMDWRGRVYAVPMFNPQGNDMTKGLLTFAQGKPIGEDGFYWLKIHGANTAGVDKVPFPQRIKFVEDNHTNIMECAKAPLENTWWAEQDSPFCFLAFCFEYAGVINHGLSYNCSLPLAFDGSCSGIQHFSAMLRDEIGGKAVNLLPSAEVQDIYRIVSDKVNEVLKQDLINGTSTTLETVTDKKTGEITERTKYGTKVMAQWWLEHGVNRGVTKRSVMTLAYGSKEFGFRDQVLSDTIQPAIDNGKGDMFLNPNQAAGYMAKLIWNAVSVTVVAAVEAMNWLKSAAKLLAAEVKDKKTDTVLRGRCAVHWVTPDGFPVWQEYKKPIQTRLNLMFLGQFRLQPTINTNKDSEIDAHKQESGIAPNFVHSQDGSHLRKTVVWAHEAYGIESFALIHDSFGTIPADAANLFKAVRETMVDTYESNDVLADFYDQFADQLHESQLDKMPALPAKGNLNLRDILESDFAFA

SEQ ID NO: 9 - DNA, 2670 bp, synthetic construct
  misc_feature 1..2670: note = Variant of RNA polymerase
  source 1..2670: mol_type = other DNA
atgcaccatcaccatcaccatatgaacacgattaacatcgctaagaacgacttctctgacatcgaactggctgctatcccgttcaacactctggctgaccattacggtgagcgtttagctcgcgaacagttggcccttgagcatgagtcttacgagatgggtgaagcacgcttccgcaagatgtttgagcgtcaacttaaagctggtgaggttgcggataacgctgccgccaagcctctcatcactaccctactccctaagatgattgcacgcatcaacgactggtttgaggaagtgaaagctaagcgcggcaagcgcccgacagccttccagttcctgcaagaaatcaagccggaagccgtagcgtacatcaccattaagaccactctggcttgcctaaccagtgcggacaatacaaccgttcaggctgtagcaagcgcaatcggtcgggccattgaggacgaggctcgcttcggtcgtatccgtgaccttgaagctaagcacttcaagaaaaacgttgaggaacaactcaacaagcgcgtagggcacgtctacaagaaagcatttatgcaagttgtcgaggctgacatgctctctaagggtctactcggtggcgaggcgtggtcttcgtggcataaggaagactctattcatgtaggagtacgctgcatcgagatgctcattgagtcaaccggaatggttagcttacaccgccaaaatgctggcgtagtaggtcaagactctgagactatcgaactcgcacctgaatacgctgaggctatcgcaacccgtgcaggtgcgctggctggcatctctccgatgttccaaccttgcgtagttcctcctaagccgtggactggcattactggtggtggctattgggctgcggggcgcaaacccctgcagttagtacgtactcgcagtctggcggcgcttcgccgctatgaagaagtgtcgatgccggaggtcatcaaagcagtcaacattgcgcagaatacagcatggcgtgtgaacaagaaagttctcgacgtagcgaatgcaatcacccaatggcagcactgtccagtcgctgatgtgcctgcgatggatcgtggcgaaatgccagctcgtccgttggacatcgataccaacgagattgcacttaaagcgtggaagaaagaagcttccgcgttctaccgcaaggacaaagcacgcgttagccgtcgtctgtatatggagtttatgttatctcaggcgaacaagtttgcgaattataaagcaatctggtttccgcaaaacatggattggcgtgggcgcgtgtacgctgtcccgatgttcaatcctcagggcaacgatatgacgaaaggcctgctgacctttgcgcagggtaaacccattggtgaagacggcttctattggctcaagattcatggcgcaaatacagctggagtggataaagtaccgtttccacaacgcatcaaatttgttgaggataaccatacgaatattatggaatgcgcgaaagcaccgctggaaaacacttggtgggcggaacaggacagcccgttctgttttctggcgttctgctttgagtatgctggcgtcatcaatcacggtctgtcgtacaactgtagcttgcctctggcatttgatggtagttgctccggcattcaacatttctcagcgatgttacgcgacgaaattggcggcaaagctgtgaatctcctcccatctgcggaagtgcaggatatttatcgtatcgtcagcgacaaagttaacgaggtactgaaacaagatctgattaacggtacctctaccaccttggaaacggtgactgataagaagacaggcgaaattaccgaacgcacgaaatacgggaccaaagttatggcacagtggtggttagaacacggtgtgaatcgtggcgtcacgaaacgctcggttatgactttggcgtatgggagcaaagagtttggattccgcgatcaagtgctgagtgacaccattcaaccggcgatcgataacggcaaaggtgacatgtttctgaatccgaatcaggctgctggttacatggcgaaactgatctggaacgcagtgtccgtcaccgtagtcgcagcagttgaggcgatgaactggctgaaaagtgcggcgaaattacttgctgctgaagtgaaggataagaagacggatacagttctgcgtggccgctgcgcagtacattgggtgactcccgacggcttccctgtgtggcaggaatacaagaagcctattcagacgcgcttgaacctgatgttcctcggtcagttccgcttacagcctaccattaacaccaacaaagatagcgagattgatgcacacaaacaggagtctggtatcgctcctaactttgtacacagccaagacggtagccaccttcgtaagactgtagtgtgggcacacgagaagtacggaatcgaatcttttgcactgattcacgactccttcggtaccattccggctgacgctgcgaacctgttcaaagcagtgcgcgaaactatggttgacacatatgagtcgaacgatgtactggctgatttctacgaccagttcgctgaccagttgcacgagtctcaattggacaaaatgccagcacttccggctaaaggtaacttgaacctccgtgacatcttagaatcggacttcgcgttcgcg

SEQ ID NO: 10 - protein, 890 aa, synthetic construct
  REGION 1..890: note = Variant of RNA polymerase
MHHHHHHMNTINIAKNDFSDIELAAIPFNTLADHYGERLAREQLALEHESYEMGEARFRKMFERQLKAGEVADNAAAKPLITTLLPKMIARINDWFEEVKAKRGKRPTAFQFLQEIKPEAVAYITIKTTLACLTSADNTTVQAVASAIGRAIEDEARFGRIRDLEAKHFKKNVEEQLNKRVGHVYKKAFMQVVEADMLSKGLLGGEAWSSWHKEDSIHVGVRCIEMLIESTGMVSLHRQNAGVVGQDSETIELAPEYAEAIATRAGALAGISPMFQPCVVPPKPWTGITGGGYWAAGRKPLQLVRTRSLAALRRYEEVSMPEVIKAVNIAQNTAWRVNKKVLDVANAITQWQHCPVADVPAMDRGEMPARPLDIDTNEIALKAWKKEASAFYRKDKARVSRRLYMEFMLSQANKFANYKAIWFPQNMDWRGRVYAVPMFNPQGNDMTKGLLTFAQGKPIGEDGFYWLKIHGANTAGVDKVPFPQRIKFVEDNHTNIMECAKAPLENTWWAEQDSPFCFLAFCFEYAGVINHGLSYNCSLPLAFDGSCSGIQHFSAMLRDEIGGKAVNLLPSAEVQDIYRIVSDKVNEVLKQDLINGTSTTLETVTDKKTGEITERTKYGTKVMAQWWLEHGVNRGVTKRSVMTLAYGSKEFGFRDQVLSDTIQPAIDNGKGDMFLNPNQAAGYMAKLIWNAVSVTVVAAVEAMNWLKSAAKLLAAEVKDKKTDTVLRGRCAVHWVTPDGFPVWQEYKKPIQTRLNLMFLGQFRLQPTINTNKDSEIDAHKQESGIAPNFVHSQDGSHLRKTVVWAHEKYGIESFALIHDSFGTIPADAANLFKAVRETMVDTYESNDVLADFYDQFADQLHESQLDKMPALPAKGNLNLRDILESDFAFA

SEQ ID NO: 11 - DNA, 2670 bp, synthetic construct
  misc_feature 1..2670: note = Variant of RNA polymerase
  source 1..2670: mol_type = other DNA
atgcaccatcaccatcaccatatgaacacgattaacatcgctaagaacgacttctctgacatcgaactggctgctatcccgttcaacactctggctgaccattacggtgagcgtttagctcgcgaacagttggcccttgagcatgagtcttacgagatgggtgaagcacgcttccgcaagatgtttgagcgtcaacttaaagctggtgaggttgcggataacgctgccgccaagcctctcatcactaccctactccctaagatgattgcacgcatcaacgactggtttgaggaagtgaaagctaagcgcggcaagcgcccgacagccttccagttcctgcaagaaatcaagccggaagccgtagcgtacatcaccattaagaccactctggcttgcctaaccagtgcggacaatacaaccgttcaggctgtagcaagcgcaatcggtcgggccattgaggacgaggctcgcttcggtcgtatccgtgaccttgaagctaagcacttcaagaaaaacgttgaggaacaactcaacaagcgcgtagggcacgtctacaagaaagcatttatgcaagttgtcgaggctgacatgctctctaagggtctactcggtggcgaggcgtggtcttcgtggcataaggaagactctattcatgtaggagtacgctgcatcgagatgctcattgagtcaaccggaatggttagcttacaccgccaaaatgctggcgtagtaggtcaagactctgagactatcgaactcgcacctgaatacgctgaggctatcgcaacccgtgcaggtgcgctggctggcatctctccgatgttccaaccttgcgtagttcctcctaagccgtggactggcattactggtggtggctattgggctgcggggcgcaaacccctgcagttagtacgtactcgcagtctggcggcgcttcgccgctatgaagaagtgtcgatgccggaggtcatcaaagcagtcaacattgcgcagaatacagcatggcgtgtgaacaagaaagttctcgacgtagcgaatgcaatcacccaatggcagcactgtccagtcgcggatgtgcctgcgatggatcgtggcgaaatgccagctcgtccgttggacatcgataccaacgagattgcacttaaagcgtggaagaaagaagcttccgcgttctaccgccgtgacaaagcacgcgttagccgtcgtctgtcaatggagtttatgttatctcaggcgaacaagtttgcgaattataaagcaatctggtttccgcaaaacatggattggcgtgggcgcgtgtacgctgtcccgatgttcaatcctcagggcaacgatatgacgaaaggcctgctgacctttgcgcagggtaaacccattggtgaagacggcttctattggctcaagattcatggcgcaaatacagctggagtggataaagtaccgtttccacaacgcatcaaatttgttgaggataaccatacgaatattatggaatgcgcgaaagcaccgctggaaaacacttggtgggcggaacaggacagcccgttctgttttctggcgttctgctttgagtatgctggcgtcatcaatcacggtctgtcgtacaactgtagcttgcctctggcatttgatggtagttgctccggcattcaacatttctcagcgatgttacgcgacgaaattggcggcaaagctgtgaatctcctcccatctgcggaagtgcaggatatttatcgtatcgtcagcgacaaagttaacgaggtactgaaacaagatctgattaacggtacctctaccaccttggaaacggtgactgataagaagacaggcgaaattaccgaacgcacgaaatacgggaccaaagttatggcacagtggtggttagaacacggtgtgaatcgtggcgtcacgaaacgctcggttatgactttggcgtatgggagcaaagagtttggattccgcgatcaagtgctgagtgacaccattcaaccggcgatcgataacggcaaaggtgacatgtttctgaatccgaatcaggctgctggttacatggcgaaactgatctggaacgcagtgtccgtcaccgtagtcgcagcagttgaggcgatgaactggctgaaaagtgcggcgaaattacttgctgctgaagtgaaggataagaagacggatacagttctgcgtggccgctgcgcagtacattgggtgactcccgacggcttccctgtgtggcaggaatacaagaagcctattcagacgcgcttgaacctgatgttcctcggtcagttccgcttacagcctaccattaacaccaacaaagatagcgagattgatgcacacaaacaggagtctggtatcgctcctaactttgtacacagccaagacggtaaccaccttcgtaagactgtagtgtgggcacacgagaagtacggaatcgaatcttttgcactgattcacgactccttcggtaccattccggctgacgctgcgaacctgttcaaagcagtgcgcgaaactatggttgacacatatgaggaaaacgatgtactggctgatttctacgaccagttcgctgaccagttgcacgagtctcaattggacaaaatgccagcacttccggctaaaggtaacttgaacctccgtgacatcttagaatcggacttcgcgttcgcg

SEQ ID NO: 12 - protein, 890 aa, synthetic construct
  REGION 1..890: note = Variant of RNA polymerase
MHHHHHHMNTINIAKNDFSDIELAAIPFNTLADHYGERLAREQLALEHESYEMGEARFRKMFERQLKAGEVADNAAAKPLITTLLPKMIARINDWFEEVKAKRGKRPTAFQFLQEIKPEAVAYITIKTTLACLTSADNTTVQAVASAIGRAIEDEARFGRIRDLEAKHFKKNVEEQLNKRVGHVYKKAFMQVVEADMLSKGLLGGEAWSSWHKEDSIHVGVRCIEMLIESTGMVSLHRQNAGVVGQDSETIELAPEYAEAIATRAGALAGISPMFQPCVVPPKPWTGITGGGYWAAGRKPLQLVRTRSLAALRRYEEVSMPEVIKAVNIAQNTAWRVNKKVLDVANAITQWQHCPVADVPAMDRGEMPARPLDIDTNEIALKAWKKEASAFYRRDKARVSRRLSMEFMLSQANKFANYKAIWFPQNMDWRGRVYAVPMFNPQGNDMTKGLLTFAQGKPIGEDGFYWLKIHGANTAGVDKVPFPQRIKFVEDNHTNIMECAKAPLENTWWAEQDSPFCFLAFCFEYAGVINHGLSYNCSLPLAFDGSCSGIQHFSAMLRDEIGGKAVNLLPSAEVQDIYRIVSDKVNEVLKQDLINGTSTTLETVTDKKTGEITERTKYGTKVMAQWWLEHGVNRGVTKRSVMTLAYGSKEFGFRDQVLSDTIQPAIDNGKGDMFLNPNQAAGYMAKLIWNAVSVTVVAAVEAMNWLKSAAKLLAAEVKDKKTDTVLRGRCAVHWVTPDGFPVWQEYKKPIQTRLNLMFLGQFRLQPTINTNKDSEIDAHKQESGIAPNFVHSQDGNHLRKTVVWAHEKYGIESFALIHDSFGTIPADAANLFKAVRETMVDTYEENDVLADFYDQFADQLHESQLDKMPALPAKGNLNLRDILESDFAFA

SEQ ID NO: 13 - DNA, 2670 bp, synthetic construct
  misc_feature 1..2670: note = Variant of RNA polymerase
  source 1..2670: mol_type = other DNA
atgcaccatcaccatcaccatatgaacacgattaacatcgctaagaacgacttctctgacatcgaactggctgctatcccgttcaacactctggctgaccattacggtgagcgtttagctcgcgaacagttggcccttgagcatgagtcttacgagatgggtgaagcacgcttccgcaagatgtttgagcgtcaacttaaagctggtgaggttgcggataacgctgccgccaagcctctcatcactaccctactccctaagatgattgcacgcatcaacgactggtttgaggaagtgaaagctaagcgcggcaagcgcccgacagccttccagttcctgcaagaaatcaagccggaagccgtagcgtacatcaccattaagaccactctggcttgcctaaccagtgcggacaatacaaccgttcaggctgtagcaagcgcaatcggtcgggccattgaggacgaggctcgcttcggtcgtatccgtgaccttgaagctaagcacttcaagaaaaacgttgaggaacaactcaacaagcgcgtagggcacgtctacaagaaagcatttatgcaagttgtcgaggctgacatgctctctaagggtctactcggtggcgaggcgtggtcttcgtggcataaggaagactctattcatgtaggagtacgctgcatcgagatgctcattgagtcaaccggaatggttagcttacaccgccaaaatgctggcgtagtaggtcaagactctgagactatcgaactcgcacctgaatacgctgaggctatcgcaacccgtgcaggtgcgctggctggcatctctccgatgttccaaccttgcgtagttcctcctaagccgtggactggcattactggtggtggctattgggctgcggggcgcaaacccctgcagttagtacgtactcgcagtctggcggcgcttcgccgctatgaagaagtgtcgatgccggaggtcatcaaagcagtcaacattgcgcagaatacagcatggcgtgtgaacaagaaagttctcgacgtagcgaatgcaatcacccaatggcagcactgtccagtcgcggatgtgcctgcgatggatcgtggcgaaatgccagctcgtccgttggacatcgataccaacgagattgcacttaaagcgtggaagaaagaagcttccgcgttctaccgcaaagacaaagcacgcgttagccgtcgtctgtcaatggagtttatgttatctcaggcgaacaagtttgcgaattataaagcaatctggtttccgcaaaacatggattggcgtgggcgcgtgtacgctgtcccgatgttcaatcctcagggcaacgatatgacgaaaggcctgctgacctttgcgcagggtaaacccattggtgaagacggcttctattggctcaagattcatggcgcaaatacagctggagtggataaagtaccgtttccacaacgcatcaaatttgttgaggataaccatacgaatattatggaatgcgcgaaagcaccgctggaaaacacttggtgggcggaacaggactcgccgttctgttttctggcgttctgctttgagtatgctggcgtcatcaatcacggtctgtcgtacaactgtagcttgcctctggcatttgatggtagttgctccggcattcaacatttctcagcgatgttacgcgacgaaattggcggcaaagctgtgaatctcctcccatctgcggaagtgcaggatatttatcgtatcgtcagcgacaaagttaacgaggtactgaaacaagatctgattaacggtacctctaccaccttggaaacggtgactgataagaagacaggcgaaattaccgaacgcacgaaatacgggaccaaagttatggcacagtggtggttagaacacggtgtgaatcgtggcgtcacgaaacgctcggttatgactttggcgtatgggagcaaagagtttggattccgcgatcaagtgctgagtgacaccattcaaccggcgatcgataacggcaaaggtgacatgtttctgaatccgaatcaggctgctggttacatggcgaaactgatctggaacgcagtgtccgtcaccgtagtcgcagcagttgaggcgatgaactggctgaaaagtgcggcgaaattacttgctgctgaagtgaaggataagaagacggatacagttctgcgtggccgctgcgcagtacattgggtgactcccgacggcttccctgtgtggcaggaatacaagaagcctattcagacgcgcttgaacctgatgttcctcggtcagttccgcttacagcctaccattaacaccaacaaagatagcgagattgatgcacacaaacaggagtctggtatcgctcctaactttgtacacagccaagacggtaaccaccttcgtatgactgtagtgtgggcacacgagaagtacggaatcgaatcttttgcactgattcacgactccttcggtaccattccggctgacgctgcgaacctgttcaaagcagtgcgcgaaacttttgttgacacatatgagtcttgtgatgtactggctgatttctacgaccagttcgctgaccagttgcacgagtctcaattggacaaaatgccagcacttccggctaaaggtaacttgaacctccgtgacatcttaaaatcggacttcgcgttcgcg

SEQ ID NO: 14 - protein, 890 aa, synthetic construct
  REGION 1..890: note = Variant of RNA polymerase
MHHHHHHMNTINIAKNDFSDIELAAIPFNTLADHYGERLAREQLALEHESYEMGEARFRKMFERQLKAGEVADNAAAKPLITTLLPKMIARINDWFEEVKAKRGKRPTAFQFLQEIKPEAVAYITIKTTLACLTSADNTTVQAVASAIGRAIEDEARFGRIRDLEAKHFKKNVEEQLNKRVGHVYKKAFMQVVEADMLSKGLLGGEAWSSWHKEDSIHVGVRCIEMLIESTGMVSLHRQNAGVVGQDSETIELAPEYAEAIATRAGALAGISPMFQPCVVPPKPWTGITGGGYWAAGRKPLQLVRTRSLAALRRYEEVSMPEVIKAVNIAQNTAWRVNKKVLDVANAITQWQHCPVADVPAMDRGEMPARPLDIDTNEIALKAWKKEASAFYRKDKARVSRRLSMEFMLSQANKFANYKAIWFPQNMDWRGRVYAVPMFNPQGNDMTKGLLTFAQGKPIGEDGFYWLKIHGANTAGVDKVPFPQRIKFVEDNHTNIMECAKAPLENTWWAEQDSPFCFLAFCFEYAGVINHGLSYNCSLPLAFDGSCSGIQHFSAMLRDEIGGKAVNLLPSAEVQDIYRIVSDKVNEVLKQDLINGTSTTLETVTDKKTGEITERTKYGTKVMAQWWLEHGVNRGVTKRSVMTLAYGSKEFGFRDQVLSDTIQPAIDNGKGDMFLNPNQAAGYMAKLIWNAVSVTVVAAVEAMNWLKSAAKLLAAEVKDKKTDTVLRGRCAVHWVTPDGFPVWQEYKKPIQTRLNLMFLGQFRLQPTINTNKDSEIDAHKQESGIAPNFVHSQDGNHLRMTVVWAHEKYGIESFALIHDSFGTIPADAANLFKAVRETFVDTYESCDVLADFYDQFADQLHESQLDKMPALPAKGNLNLRDILKSDFAFA

SEQ ID NO: 15 - DNA, 2670 bp, synthetic construct
  misc_feature 1..2670: note = Variant of RNA polymerase
  source 1..2670: mol_type = other DNA
atgcaccatcaccatcaccatatgaacacgattaacatcgctaagaacgacttctctgacatcgaactggctgctatcccgttcaacactctggctgaccattacggtgagcgtttagctcgcgaacagttggcccttgagcatgagtcttacgagatgggtgaagcacgcttccgcaagatgtttgagcgtcaacttaaagctggtgaggttgcggataacgctgccgccaagcctctcatcactaccctactccctaagatgattgcacgcatcaacgactggtttgaggaagtgaaagctaagcgcggcaagcgcccgacagccttccagttcctgcaagaaatcaagccggaagccgtagcgtacatcaccattaagaccactctggcttgcctaaccagtgcggacaatacaaccgttcaggctgtagcaagcgcaatcggtcgggccattgaggacgaggctcgcttcggtcgtatccgtgaccttgaagctaagcacttcaagaaaaacgttgaggaacaactcaacaagcgcgtagggcacgtctacaagaaagcatttatgcaagttgtcgaggctgacatgctctctaagggtctactcggtggcgaggcgtggtcttcgtggcataaggaagactctattcatgtaggagtacgctgcatcgagatgctcattgagtcaaccggaatggttagcttacaccgccaaaatgctggcgtagtaggtcaagactctgagactatcgaactcgcacctgaatacgctgaggctatcgcaacccgtgcaggtgcgctggctggcatctctccgatgttccaaccttgcgtagttcctcctaagccgtggactggcattactggtggtggctattgggctgcggggcgcaaacccctgcagttagtacgtactcgcagtctggcggcgcttcgccgctatgaagaagtgtcgatgccggaggtcatcaaagcagtcaacattgcgcagaatacagcatggcgtgtgaacaagaaagttctcgacgtagcgaatgcaatcacccaatggcagcactgtccagtcgcggatgtgcctgcgatggatcgtggcgaaatgccagctcgtccgttggacatcgataccaacgagattgcacttaaagcgtggaagaaagaagcttccgcgttctaccgcaaagacaaagcacgcgttagccgtcgtctgtcaatggagtttatgttatctcaggcgaacaagtttgcgaattataaagcaatctggtttccgcaaaacatggattggcgtgggcgcgtgtacgctgtcccgatgttcaatcctcagggcaacgatatgacgaaaggcctgctgacctttgcgcagggtaaacccattggtgaagacggcttctattggctcaagattcatggcgcaaatacagctggagtggataaagtaccgtttccacaacgcatcaaatttgttgaggataaccatacgaatattatggaatgcgcgaaagcaccgctggaaaacacttggtgggcggaacaggactcgccgttctgttttctggcgttctgctttgagtatgctggcgtcatcaatcacggtctgtcgtacaactgtagcttgcctctggcatttgatggtagttgctccggcattcaacatttctcagcgatgttacgcgacgaaattggcggcaaagctgtgaatctcctcccatctgcggaagtgcaggatatttatcgtatcgtcagcgacaaagttaacgaggtactgaaacaagatctgattaacggtacctctaccaccttggaaacggtgactgataagaagacaggcgaaattaccgaacgcacgaaatacgggaccaaagttatggcacagtggtggttagaacacggtgtgaatcgtggcgtcacgaaacgctcggttatgactttggcgtatgggagcaaagagtttggattccgcgatcaagtgctgagtgacaccattcaaccggcgatcgataacggcaaaggtgacatgtttctgaatccgaatcaggctgctggttacatggcgaaactgatctggaacgcagtgtccgtcaccgtagtcgcagcagttgaggcgatgaactggctgaaaagtgcggcgaaattacttgctgctgaagtgaaggataagaagacggatacagttctgcgtggccgctgcgcagtacattgggtgactcccgacggcttccctgtgtggcaggaatacaagaagcctattcagacgcgcttgaacctgatgttcctcggtcagttccgcttacagcctaccattaacaccaacaaagatagcgagattgatgcacacaaacaggagtctggtatcgctcctaactttgtacacagccaagacggtaaccaccttcgtatgactgtagtgtgggcacacgagaagtacggaatcgaatcttttgcactgattcacgactccttcggtaccattccggctgacgctgcgaacctgttcaaagcagtgcgcgaaactatggtttcgacatatgagtcttgtgatgtactggctgatttctacgaccagttcgctgaccagttgcacgagtctcaattggacaaaatgccagcacttccggctaaaggtaacttgaacctccgtgacatcttagagtcggactatgcgttcgcg

SEQ ID NO: 16 - protein, 890 aa, synthetic construct
  REGION 1..890: note = Variant of RNA polymerase
MHHHHHHMNTINIAKNDFSDIELAAIPFNTLADHYGERLAREQLALEHESYEMGEARFRKMFERQLKAGEVADNAAAKPLITTLLPKMIARINDWFEEVKAKRGKRPTAFQFLQEIKPEAVAYITIKTTLACLTSADNTTVQAVASAIGRAIEDEARFGRIRDLEAKHFKKNVEEQLNKRVGHVYKKAFMQVVEADMLSKGLLGGEAWSSWHKEDSIHVGVRCIEMLIESTGMVSLHRQNAGVVGQDSETIELAPEYAEAIATRAGALAGISPMFQPCVVPPKPWTGITGGGYWAAGRKPLQLVRTRSLAALRRYEEVSMPEVIKAVNIAQNTAWRVNKKVLDVANAITQWQHCPVADVPAMDRGEMPARPLDIDTNEIALKAWKKEASAFYRKDKARVSRRLSMEFMLSQANKFANYKAIWFPQNMDWRGRVYAVPMFNPQGNDMTKGLLTFAQGKPIGEDGFYWLKIHGANTAGVDKVPFPQRIKFVEDNHTNIMECAKAPLENTWWAEQDSPFCFLAFCFEYAGVINHGLSYNCSLPLAFDGSCSGIQHFSAMLRDEIGGKAVNLLPSAEVQDIYRIVSDKVNEVLKQDLINGTSTTLETVTDKKTGEITERTKYGTKVMAQWWLEHGVNRGVTKRSVMTLAYGSKEFGFRDQVLSDTIQPAIDNGKGDMFLNPNQAAGYMAKLIWNAVSVTVVAAVEAMNWLKSAAKLLAAEVKDKKTDTVLRGRCAVHWVTPDGFPVWQEYKKPIQTRLNLMFLGQFRLQPTINTNKDSEIDAHKQESGIAPNFVHSQDGNHLRMTVVWAHEKYGIESFALIHDSFGTIPADAANLFKAVRETMVSTYESCDVLADFYDQFADQLHESQLDKMPALPAKGNLNLRDILESDYAFA

SEQ ID NO: 17 - DNA, 2670 bp, synthetic construct
  misc_feature 1..2670: note = Variant of RNA polymerase
  source 1..2670: mol_type = other DNA
atgcaccatcaccatcaccatatgaacacgattaacatcgctaagaacgacttctctgacatcgaactggctgctatcccgttcaacactctggctgaccattacggtgagcgtttagctcgcgaacagttggcccttgagcatgagtcttacgagatgggtgaagcacgcttccgcaagatgtttgagcgtcaacttaaagctggtgaggttgcggataacgctgccgccaagcctctcatcactaccctactccctaagatgattgcacgcatcaacgactggtttgaggaagtgaaagctaagcgcggcaagcgcccgacagccttccagttcctgcaagaaatcaagccggaagccgtagcgtacatcaccattaagaccactctggcttgcctaaccagtgcggacaatacaaccgttcaggctgtagcaagcgcaatcggtcgggccattgaggacgaggctcgcttcggtcgtatccgtgaccttgaagctaagcacttcaagaaaaacgttgaggaacaactcaacaagcgcgtagggcacgtctacaagaaagcatttatgcaagttgtcgaggctgacatgctctctaagggtctactcggtggcgaggcgtggtcttcgtggcataaggaagactctattcatgtaggagtacgctgcatcgagatgctcattgagtcaaccggaatggttagcttacaccgccaaaatgctggcgtagtaggtcaagactctgagactatcgaactcgcacctgaatacgctgaggctatcgcaacccgtgcaggtgcgctggctggcatctctccgatgttccaaccttgcgtagttcctcctaagccgtggactggcattactggtggtggctattgggctgcggggcgcaaacccctgcagttagtacgtactcgcagtctggcggcgcttcgccgctatgaagaagtgtcgatgccggaggtcatcaaagcagtcaacattgcgcagaatacagcatggcgtgtgaacaagaaagttctcgacgtagcgaatgcaatcacccaatggcagcactgtccagtcgcggatgtgcctgcgatggatcgtggcgaaatgccagctcgtccgttggacatcgataccaacgagattgcacttaaagcgtggaagaaagaagcttccgcgttctaccgcaaagacaaagcacgcgttagccgtcgtctgtcaatggagtttatgttatctcaggcgaacaagtttgcgaattataaagcaatctggtttccgcaaaacatggattggcgtgggcgcgtgtacgctgtcccgatgttcaatcctcagggcaacgatatgacgaaaggcctgctgacctttgcgcagggtaaacccattggtgaagacggcttctattggctcaagattcatggcgcaaatacagctggagtggataaagtaccgtttccacaacgcatcaaatttgttgaggataaccatacgaatattatggaatgcgcgaaagcaccgctggaaaacacttggtgggcggaacaggactcgccgttctgttttctggcgttctgctttgagtatgctggcgtcatcaatcacggtctgtcgtacaactgtagcttgcctctggcatttgatggtagttgctccggcattcaacatttctcagcgatgttacgcgacgaaattggcggcaaagctgtgaatctcctcccatctgcggaagtgcaggatatttatcgtatcgtcagcgacaaagttaacgaggtactgaaacaagatctgattaacggtacctctaccaccttggaaacggtgactgataagaagacaggcgaaattaccgaacgcacgaaatacgggaccaaagttatggcacagtggtggttagaacacggtgtgaatcgtggcgtcacgaaacgctcggttatgactttggcgtatgggagcaaagagtttggattccgcgatcaagtgctgagtgacaccattcaaccggcgatcgataacggcaaaggtgacatgtttctgaatccgaatcaggctgctggttacatggcgaaactgatctggaacgcagtgtccgagaccgtagtcgcagcagttgaggcgatgaactggctgaaaagtgcggcgaaattacttgctgctgaagtgaaggataagaagacggatacagttctgcgtggccgctgcgcagtacattgggtgactcccgacggcttccctgtgtggcaggaatacaagaagcctattcagacgcgcttgaacctgatgttcctcggtcagttccgcttacagcctaccattaacaccaacaaagatagcgagattgatgcacacaaacaggagtctggtatcgctcctaactttgtacacagccaagacggtaaccaccttcgtatgactgtagtgtgggcacacgagaagtacggaatcgaatcttttgcactgattcacgactccttcggtaccattccggctgacgctgcgaacctgttcaaagcagtgcgcgaaactatggtttcgacatatgagtcttgtgatgtactggctgatttctacgaccagttcgctgaccagttgcacgagtctcaattggacaaaatgccagcacttccggctaaaggtaacttgaacctccgtgacatcttaaaatcggacttcgcgttcgcg

SEQ ID NO: 18 - protein, 890 aa, synthetic construct
  REGION 1..890: note = Variant of RNA polymerase
MHHHHHHMNTINIAKNDFSDIELAAIPFNTLADHYGERLAREQLALEHESYEMGEARFRKMFERQLKAGEVADNAAAKPLITTLLPKMIARINDWFEEVKAKRGKRPTAFQFLQEIKPEAVAYITIKTTLACLTSADNTTVQAVASAIGRAIEDEARFGRIRDLEAKHFKKNVEEQLNKRVGHVYKKAFMQVVEADMLSKGLLGGEAWSSWHKEDSIHVGVRCIEMLIESTGMVSLHRQNAGVVGQDSETIELAPEYAEAIATRAGALAGISPMFQPCVVPPKPWTGITGGGYWAAGRKPLQLVRTRSLAALRRYEEVSMPEVIKAVNIAQNTAWRVNKKVLDVANAITQWQHCPVADVPAMDRGEMPARPLDIDTNEIALKAWKKEASAFYRKDKARVSRRLSMEFMLSQANKFANYKAIWFPQNMDWRGRVYAVPMFNPQGNDMTKGLLTFAQGKPIGEDGFYWLKIHGANTAGVDKVPFPQRIKFVEDNHTNIMECAKAPLENTWWAEQDSPFCFLAFCFEYAGVINHGLSYNCSLPLAFDGSCSGIQHFSAMLRDEIGGKAVNLLPSAEVQDIYRIVSDKVNEVLKQDLINGTSTTLETVTDKKTGEITERTKYGTKVMAQWWLEHGVNRGVTKRSVMTLAYGSKEFGFRDQVLSDTIQPAIDNGKGDMFLNPNQAAGYMAKLIWNAVSETVVAAVEAMNWLKSAAKLLAAEVKDKKTDTVLRGRCAVHWVTPDGFPVWQEYKKPIQTRLNLMFLGQFRLQPTINTNKDSEIDAHKQESGIAPNFVHSQDGNHLRMTVVWAHEKYGIESFALIHDSFGTIPADAANLFKAVRETMVSTYESCDVLADFYDQFADQLHESQLDKMPALPAKGNLNLRDILKSDFAFA

SEQ ID NO: 19 - DNA, 2670 bp, synthetic construct
  misc_feature 1..2670: note = Variant of RNA polymerase
  source 1..2670: mol_type = other DNA
atgcaccatcaccatcaccatatgaacacgattaacatcgctaagaacgacttctctgacatcgaactggctgctatcccgttcaacactctggctgaccattacggtgagcgtttagctcgcgaacagttggcccttgagcatgagtcttacgagatgggtgaagcacgcttccgcaagatgtttgagcgtcaacttaaagctggtgaggttgcggataacgctgccgccaagcctctcatcactaccctactccctaagatgattgcacgcatcaacgactggtttgaggaagtgaaagctaagcgcggcaagcgcccgacagccttccagttcctgcaagaaatcaagccggaagccgtagcgtacatcaccattaagaccactctggcttgcctaaccagtgcggacaatacaaccgttcaggctgtagcaagcgcaatcggtcgggccattgaggacgaggctcgcttcggtcgtatccgtgaccttgaagctaagcacttcaagaaaaacgttgaggaacaactcaacaagcgcgtagggcacgtctacaagaaagcatttatgcaagttgtcgaggctgacatgctctctaagggtctactcggtggcgaggcgtggtcttcgtggcataaggaagactctattcatgtaggagtacgctgcatcgagatgctcattgagtcaaccggaatggttagcttacaccgccaaaatgctggcgtagtaggtcaagactctgagactatcgaactcgcacctgaatacgctgaggctatcgcaacccgtgcaggtgcgctggctggcatctctccgatgttccaaccttgcgtagttcctcctaagccgtggactggcattactggtggtggctattgggctgcggggcgcaaacccctgcagttagtacgtactcgcagtctggcggcgcttcgccgctatgaagaagtgtcgatgccggaggtcatcaaagcagtcaacattgcgcagaatacagcatggcgtgtgaacaagaaagttctcgacgtagcgaatgcaatcacccaatggcagcactgtccagtcgcggatgtgcctgcgatggatcgtggcgaaatgccagctcgtccgttggacatcgataccaacgagattgcacttaaagcgtggaagaaagaagcttccgcgttctaccgcaaagacaaagcacgcgttagccgtcgtctgtcaatggagtttatgttatctcaggcgaacaagtttgcgaattataaagcaatctggtttccgcaaaacatggattggcgtgggcgcgtgtacgctgtcccgatgttcaatcctcagggcaacgatatgacgaaaggcctgctgacctttgcgcagggtaaacccattggtgaagacggcttctattggctcaagattcatggcgcaaatacagctggagtggataaagtaccgtttccacaacgcatcaaatttgttgaggataaccatacgaatattatggaatgcgcgaaagcaccgctggaaaacacttggtgggcggaacaggactcgccgttctgttttctggcgttctgctttgagtatgctggcgtcatcaatcacggtctgtcgtacaactgtagcttgcctctggcatttgatggtagttgctccggcattcaacatttctcagcgatgttacgcgacgaaattggcggcaaagctgtgaatctcctcccatctgcggaagtgcaggatatttatcgtatcgtcagcgacaaagttaacgagatgctgaaacaagatctgattaacggtacctctaccaccttggaaacggtgactgataagaagacaggcgaaattaccgaacgcacgaaatacgggaccaaagttatggcacagtggtggttagaacacggtgtgaatcgtggcgtcacgaaacgctcggttatgactttggcgtatgggagcaaagagtttggattccgcgatcaagtgctgagtgacaccattcaaccggcgatcgataacggcaaaggtgacatgtttctgaatccgaatcaggctgctggttacatggcgaaactgatctggaacgcagtgtccgtcaccgtagtcgcagcagttgaggcgatgaactggctgaaaagtgcggcgaaattacttgctgctgaagtgaaggataagaagacggatacagttctgcgtggccgctgcgcagtacattgggtgactcccgacggcttccctgtgtggcaggaatacaagaagcctattcagacgcgcttgaacctgatgttcctcggtcagttccgcttacagcctaccattaacaccaacaaagatagcgagattgatgcacacaaacaggagtctggtatcgctcctaactttgtacacagccaagacggtaaccaccttcgtatgactgtagtgtgggcacacgagaagtacggaatcgaatcttttgcactgattcacgactccttcggtaccattccggctgacgctgcgaacctgttcaaagcagtgcgcgaaactatggtttcgacatatgagtcttgtgatgtactggctgatttctacgaccagttcgctgaccagttgcacgagtctcaattggacaaaatgccagcacttccggctaaaggtaacttgaacctccgtgacatcttaaaatcggacttcgcgttcgcg

SEQ ID NO: 20 - protein, 890 aa, synthetic construct
  REGION 1..890: note = Variant of RNA polymerase
MHHHHHHMNTINIAKNDFSDIELAAIPFNTLADHYGERLAREQLALEHESYEMGEARFRKMFERQLKAGEVADNAAAKPLITTLLPKMIARINDWFEEVKAKRGKRPTAFQFLQEIKPEAVAYITIKTTLACLTSADNTTVQAVASAIGRAIEDEARFGRIRDLEAKHFKKNVEEQLNKRVGHVYKKAFMQVVEADMLSKGLLGGEAWSSWHKEDSIHVGVRCIEMLIESTGMVSLHRQNAGVVGQDSETIELAPEYAEAIATRAGALAGISPMFQPCVVPPKPWTGITGGGYWAAGRKPLQLVRTRSLAALRRYEEVSMPEVIKAVNIAQNTAWRVNKKVLDVANAITQWQHCPVADVPAMDRGEMPARPLDIDTNEIALKAWKKEASAFYRKDKARVSRRLSMEFMLSQANKFANYKAIWFPQNMDWRGRVYAVPMFNPQGNDMTKGLLTFAQGKPIGEDGFYWLKIHGANTAGVDKVPFPQRIKFVEDNHTNIMECAKAPLENTWWAEQDSPFCFLAFCFEYAGVINHGLSYNCSLPLAFDGSCSGIQHFSAMLRDEIGGKAVNLLPSAEVQDIYRIVSDKVNEMLKQDLINGTSTTLETVTDKKTGEITERTKYGTKVMAQWWLEHGVNRGVTKRSVMTLAYGSKEFGFRDQVLSDTIQPAIDNGKGDMFLNPNQAAGYMAKLIWNAVSVTVVAAVEAMNWLKSAAKLLAAEVKDKKTDTVLRGRCAVHWVTPDGFPVWQEYKKPIQTRLNLMFLGQFRLQPTINTNKDSEIDAHKQESGIAPNFVHSQDGNHLRMTVVWAHEKYGIESFALIHDSFGTIPADAANLFKAVRETMVSTYESCDVLADFYDQFADQLHESQLDKMPALPAKGNLNLRDILKSDFAFA

SEQ ID NO: 21 - DNA, 2670 bp, synthetic construct
  misc_feature 1..2670: note = Variant of RNA polymerase
  source 1..2670: mol_type = other DNA
atgcaccatcaccatcaccatatgaacacgattaacatcgctaagaacgacttctctgacatcgaactggctgctatcccgttcaacactctggctgaccattacggtgagcgtttagctcgcgaacagttggcccttgagcatgagtcttacgagatgggtgaagcacgcttccgcaagatgtttgagcgtcaacttaaagctggtgaggttgcggataacgctgccgccaagcctctcatcactaccctactccctaagatgattgcacgcatcaacgactggtttgaggaagtgaaagctaagcgcggcaagcgcccgacagccttccagttcctgcaagaaatcaagccggaagccgtagcgtacatcaccattaagaccactctggcttgcctaaccagtgcggacaatacaaccgttcaggctgtagcaagcgcaatcggtcgggccattgaggacgaggctcgcttcggtcgtatccgtgaccttgaagctaagcacttcaagaaaaacgttgaggaacaactcaacaagcgcgtagggcacgtctacaagaaagcatttatgcaagttgtcgaggctgacatgctctctaagggtctactcggtggcgaggcgtggtcttcgtggcataaggaagactctattcatgtaggagtacgctgcatcgagatgctcattgagtcaaccggaatggttagcttacaccgccaaaatgctggcgtagtaggtcaagactctgagactatcgaactcgcacctgaatacgctgaggctatcgcaacccgtgcaggtgcgctggctggcatctctccgatgttccaaccttgcgtagttcctcctaagccgtggactggcattactggtggtggctattgggctgcggggcgcaaacccctgcagttagtacgtactcgcagtctggcggcgcttcgccgctatgaagaagtgtcgatgccggaggtcatcaaagcagtcaacattgcgcagaatacagcatggcgtgtgaacaagaaagttctcgacgtagcgaatgcaatcacccaatggcagcactgtccagtcgcggatgtgcctgcgatggatcgtggcgaaatgccagctcgtccgttggacatcgataccaacgagattgcacttaaagcgtggaagaaagaagcttccgcgttctaccgcaaagacaaagcacgcgttagccgtcgtctgtcaatggagtttatgttatctcaggcgaacaagtttgcgaattataaagcaatctggtttccgcaaaacatggattggcgtgggcgcgtgtacgctgtcccgatgttcaatcctcagggcaacgatatgacgaaaggcctgctgacctttgcgcagggtaaacccattggtgaagacggcttctattggctcaagattcatggcgcaaatacagctggagtggataaagtaccgtttccacaacgcatcaaatttgttgaggataaccatacgaatattatggaatgcgcgaaagcaccgctggaaaacacttggtgggcggaacaggactcgccgttctgttttctggcgttctgctttgagtatgctggcgtcatcaatcacggtctgtcgtacaactgtagcttgcctcaggcatttgatggtagttgctccggcattcaacatttctcagcgatgttacgcgacgaaattggcggcaaagctgtgaatctcctcccatctgcggaagtgcaggatatttatcgtatcgtcagcgacaaagttaacgaggtactgaaacaagatctgattaacggtacctctaccaccttggaaacggtgactgataagaagacaggcgaaattaccgaacgcacgaaatacgggaccaaagttatggcacagtggtggttagaacacggtgtgaatcgtggcgtcacgaaacgctcggttatgactttggcgtatgggagcaaagagtttggattccgcgatcaagtgctgagtgacaccattcaaccggcgatcgataacggcaaaggtgacatgtttctgaatccgaatcaggctgctggttacatggcgaaactgatctggaacgcagtgtccgtcaccgtagtcgcagcagttgaggcgatgaactggctgaaaagtgcggcgaaattacttgctgctgaagtgaaggataagaagacggatacagttctgcgtggccgctgcgcagtacattgggtgactcccgacggcttccctgtgtggcaggaatacaagaagcctattcagacgcgcttgaacctgatgttcctcggtcagttccgcttacagcctaccattaacaccaacaaagatagcgagattgatgcacacaaacaggagtctggtatcgctcctaactttgtacacagccaagacggtaaccaccttcgtatgactgtagtgtgggcacacgagaagtacggaatcgaatcttttgcactgattcacgactccttcggtaccattccggctgacgctgcgaacctgttcaaagcagtgcgcgaaactatggtttcgacatatgagtcttgtgatgtactggctgatttctacgaccagttcgctgaccagttgcacgagtctcaattggacaaaatgccagcacttccggctaaaggtaacttgaacctccgtgacatcttaaaatcggacttcgcgttcgcg

SEQ ID NO: 22 - protein, 890 aa, synthetic construct
  REGION 1..890: note = Variant of RNA polymerase
MHHHHHHMNTINIAKNDFSDIELAAIPFNTLADHYGERLAREQLALEHESYEMGEARFRKMFERQLKAGEVADNAAAKPLITTLLPKMIARINDWFEEVKAKRGKRPTAFQFLQEIKPEAVAYITIKTTLACLTSADNTTVQAVASAIGRAIEDEARFGRIRDLEAKHFKKNVEEQLNKRVGHVYKKAFMQVVEADMLSKGLLGGEAWSSWHKEDSIHVGVRCIEMLIESTGMVSLHRQNAGVVGQDSETIELAPEYAEAIATRAGALAGISPMFQPCVVPPKPWTGITGGGYWAAGRKPLQLVRTRSLAALRRYEEVSMPEVIKAVNIAQNTAWRVNKKVLDVANAITQWQHCPVADVPAMDRGEMPARPLDIDTNEIALKAWKKEASAFYRKDKARVSRRLSMEFMLSQANKFANYKAIWFPQNMDWRGRVYAVPMFNPQGNDMTKGLLTFAQGKPIGEDGFYWLKIHGANTAGVDKVPFPQRIKFVEDNHTNIMECAKAPLENTWWAEQDSPFCFLAFCFEYAGVINHGLSYNCSLPQAFDGSCSGIQHFSAMLRDEIGGKAVNLLPSAEVQDIYRIVSDKVNEVLKQDLINGTSTTLETVTDKKTGEITERTKYGTKVMAQWWLEHGVNRGVTKRSVMTLAYGSKEFGFRDQVLSDTIQPAIDNGKGDMFLNPNQAAGYMAKLIWNAVSVTVVAAVEAMNWLKSAAKLLAAEVKDKKTDTVLRGRCAVHWVTPDGFPVWQEYKKPIQTRLNLMFLGQFRLQPTINTNKDSEIDAHKQESGIAPNFVHSQDGNHLRMTVVWAHEKYGIESFALIHDSFGTIPADAANLFKAVRETMVSTYESCDVLADFYDQFADQLHESQLDKMPALPAKGNLNLRDILKSDFAFA

SEQ ID NO: 23 - DNA, 2670 bp, synthetic construct
  misc_feature 1..2670: note = Variant of RNA polymerase
  source 1..2670: mol_type = other DNA
atgcaccatcaccatcaccatatgaacacgattaacatcgctaagaacgacttctctgacatcgaactggctgctatcccgttcaacactctggctgaccattacggtgagcgtttagctcgcgaacagttggcccttgagcatgagtcttacgagatgggtgaagcacgcttccgcaagatgtttgagcgtcaacttaaagctggtgaggttgcggataacgctgccgccaagcctctcatcactaccctactccctaagatgattgcacgcatcaacgactggtttgaggaagtgaaagctaagcgcggcaagcgcccgacagccttccagttcctgcaagaaatcaagccggaagccgtagcgtacatcaccattaagaccactctggcttgcctaaccagtgcggacaatacaaccgttcaggctgtagcaagcgcaatcggtcgggccattgaggacgaggctcgcttcggtcgtatccgtgaccttgaagctaagcacttcaagaaaaacgttgaggaacaactcaacaagcgcgtagggcacgtctacaagaaagcatttatgcaagttgtcgaggctgacatgctctctaagggtctactcggtggcgaggcgtggtcttcgtggcataaggaagactctattcatgtaggagtacgctgcatcgagatgctcattgagtcaaccggaatggttagcttacaccgccaaaatgctggcgtagtaggtcaagactctgagactatcgaactcgcacctgaatacgctgaggctatcgcaacccgtgcaggtgcgctggctggcatctctccgatgttccaaccttgcgtagttcctcctaagccgtggactggcattactggtggtggctattgggctgcggggcgcaaacccctgcagttagtacgtactcgcagtctggcggcgcttcgccgctatgaagaagtgtcgatgccggaggtcatcaaagcagtcaacattgcgcagaatacagcatggcgtgtgaacaagaaagttctcgacgtagcgaatgcaatcacccaatggcagcactgtccagtcgcggatgtgcctgcgatggatcgtggcgaaatgccagctcgtccgttggacatcgataccaacgagattgcacttaaagcgtggaagaaagaagcttccgcgttctaccgcaaagacaaagcacgcgttagccgtcgtctgtcaatggagtttatgttatctcaggcgaacaagtttgcgaattataaagcaatctggtttccgcaaaacatggattggcgtgggcgcgtgtacgctgtcccgatgttcaatcctcagggcaacgatatgacgaaaggcctgctgacctttgcgcagggtaaacccattggtgaagacggcttctattggctcaagattcatggcgcaaatacagctggagtggataaagtaccgtttccacaacgcatcaaatttgttgaggataaccatacgaatattatggaatgcgcgaaagcaccgctggaaaacacttggtgggcggaacaggactcgccgttctgttttctggcgttctgctttgagtatgctggcgtcatcaatcacggtctgtcgtacaactgtagcttgcctctggcatttgatggtagttgctccggcattcaacatttctcagcgatgttacgcgacgaaattggcggcaaagctgtgaatctcctcccatctgcggaagtgcaggatatttatcgtatcgtcagcgacaaagttaacgaggtactgaaacaagatctgattaacggtacctctaccaccttggaaacggtgactgataagaagacaggcgaaattaccgaacgcacgaaatacgggaccaaagttatggcacagtggtggttagaacacggtgtgaatcgtggcgtcacgaaacgctcggttatgactttggcgtatgggagcaaagagtttggattccgcgatcaagtgctgagtgacaccattcaaccggcgatcgataacggcaaaggtgacatgtttctgaatccgaatcaggctgctggttacatggcgaaactgatctggaacgcagtgtccgtcaccgtagtcgcagcagttgaggcgatgaactggctgaaaagtgcggcgaaattacttgctgctgaagtgaaggataagaagacggatacagttctgcgtggccgctgcgcagtacattgggtgactcccgacggcttccctgtgtggcaggaatacaagaagcctattcagacgcgcttgaacctgatgttcctcggtcagttccgcttacagcctaccattaacaccaacaaagatagcgagattgatgcacacaaacaggagtctggtatcgctcctaactttgtacacagccaagacggtaaccaccttcgtatgactgtagtgtgggcacacgagaagtacggaatcgaatcttttgcactgattcacgactccttcggtaccattccggctgacgctgcgaacctgttcaaagcagtgcgcgaaactatggtttcgacatatgagtcttgtgatgtactggctgatctgtacgaccagttcgctgaccagttgcacgagtctcaattggacaaaatgccagcacttccggctaaaggtaacttgaacctccgtgacatcttaaaatcggacttcgcgttcgcg

SEQ ID NO: 24 - protein, 890 aa, synthetic construct
  REGION 1..890: note = Variant of RNA polymerase
MHHHHHHMNTINIAKNDFSDIELAAIPFNTLADHYGERLAREQLALEHESYEMGEARFRKMFERQLKAGEVADNAAAKPLITTLLPKMIARINDWFEEVKAKRGKRPTAFQFLQEIKPEAVAYITIKTTLACLTSADNTTVQAVASAIGRAIEDEARFGRIRDLEAKHFKKNVEEQLNKRVGHVYKKAFMQVVEADMLSKGLLGGEAWSSWHKEDSIHVGVRCIEMLIESTGMVSLHRQNAGVVGQDSETIELAPEYAEAIATRAGALAGISPMFQPCVVPPKPWTGITGGGYWAAGRKPLQLVRTRSLAALRRYEEVSMPEVIKAVNIAQNTAWRVNKKVLDVANAITQWQHCPVADVPAMDRGEMPARPLDIDTNEIALKAWKKEASAFYRKDKARVSRRLSMEFMLSQANKFANYKAIWFPQNMDWRGRVYAVPMFNPQGNDMTKGLLTFAQGKPIGEDGFYWLKIHGANTAGVDKVPFPQRIKFVEDNHTNIMECAKAPLENTWWAEQDSPFCFLAFCFEYAGVINHGLSYNCSLPLAFDGSCSGIQHFSAMLRDEIGGKAVNLLPSAEVQDIYRIVSDKVNEVLKQDLINGTSTTLETVTDKKTGEITERTKYGTKVMAQWWLEHGVNRGVTKRSVMTLAYGSKEFGFRDQVLSDTIQPAIDNGKGDMFLNPNQAAGYMAKLIWNAVSVTVVAAVEAMNWLKSAAKLLAAEVKDKKTDTVLRGRCAVHWVTPDGFPVWQEYKKPIQTRLNLMFLGQFRLQPTINTNKDSEIDAHKQESGIAPNFVHSQDGNHLRMTVVWAHEKYGIESFALIHDSFGTIPADAANLFKAVRETMVSTYESCDVLADLYDQFADQLHESQLDKMPALPAKGNLNLRDILKSDFAFA

SEQ ID NO: 25 - DNA, 2670 bp, synthetic construct
  misc_feature 1..2670: note = Variant of RNA polymerase
  source 1..2670: mol_type = other DNA
atgcaccatcaccatcaccatatgaacacgattaacatcgctaagaacgacttctctgacatcgaactggctgctatcccgttcaacactctggctgaccattacggtgagcgtttagctcgcgaacagttggcccttgagcatgagtcttacgagatgggtgaagcacgcttccgcaagatgtttgagcgtcaacttaaagctggtgaggttgcggataacgctgccgccaagcctctcatcactaccctactccctaagatgattgcacgcatcaacgactggtttgaggaagtgaaagctaagcgcggcaagcgcccgacagccttccagttcctgcaagaaatcaagccggaagccgtagcgtacatcaccattaagaccactctggcttgcctaaccagtgcggacaatacaaccgttcaggctgtagcaagcgcaatcggtcgggccattgaggacgaggctcgcttcggtcgtatccgtgaccttgaagctaagcacttcaagaaaaacgttgaggaacaactcaacaagcgcgtagggcacgtctacaagaaagcatttatgcaagttgtcgaggctgacatgctctctaagggtctactcggtggcgaggcgtggtcttcgtggcataaggaagactctattcatgtaggagtacgctgcatcgagatgctcattgagtcaaccggaatggttagcttacaccgccaaaatgctggcgtagtaggtcaagactctgagactatcgaactcgcacctgaatacgctgaggctatcgcaacccgtgcaggtgcgctggctggcatctctccgatgttccaaccttgcgtagttcctcctaagccgtggactggcattactggtggtggctattgggctgcggggcgcaaacccctgcagttagtacgtactcgcagtctggcggcgcttcgccgctatgaagaagtgtcgatgccggaggtcatcaaagcagtcaacattgcgcagaatacagcatggcgtgtgaacaagaaagttctcgacgtagcgaatgcaatcacccaatggcagcactgtccagtcgcggatgtgcctgcgatggatcgtggcgaaatgccagctcgtccgttggacatcgataccaacgagattgcacttaaagcgtggaagaaagaagcttccgcgttctaccgcaaagacaaagcacgcgttagccgtcgtctgtcaatggagtttatgttatctcaggcgaacaagtttgcgaattataaagcaatctggtttccgcaaaacatggattggcgtgggcgcgtgtacgctgtcccgatgttcaatcctcagggcaacgatatgacgaaaggcctgctgacctttgcgcagggtaaacccattggtgaagacggcttctattggctcaagattcatggcgcaaatacagctggagtggataaagtaccgtttccacaacgcatcaaatttgttgaggataaccatacgaatattatggaatgcgcgaaagcaccgctggaaaacacttggtgggcggaacaggactcgccgttctgttttctggcgttctgctttgagtatgctggcgtcatcaatcacggtctgtcgtacaactgtagcttgcctctggcatttgatggtagttgctccggcattcaacatttctcagcgatgttacgcgacgaaattggcggcaaagctgtgaatctcctcccatctgcggaagtgcaggatatttatcgtatcgtcagcgacaaagttaacgaggtactgaaacaagatctgattaacggtacctctaccaccttggaaacggtgactgataagaagacaggcgaaattaccgaacgcacgaaatacgggaccaaagttatggcacagtggtggttagaacacggtgtgaatcgtggcgtcacgaaacgctcggttatgactttggtgtatgggagcaaagagtttggattccgcgatcaagtgctgagtgacaccattcaaccggcgatcgataacggcaaaggtgacatgtttctgaatccgaatcaggctgctggttacatggcgaaactgatctggaacgcagtgtccgtcaccgtagtcgcagcagttgaggcgatgaactggctgaaaagtgcggcgaaattacttgctgctgaagtgaaggataagaagacggatacagttctgcgtggccgctgcgcagtacattgggtgactcccgacggcttccctgtgtggcaggaatacaagaagcctattcagacgcgcttgaacctgatgttcctcggtcagttccgcttacagcctaccattaacaccaacaaagatagcgagattgatgcacacaaacaggagtctggtatcgctcctaactttgtacacagccaagacggtaaccaccttcgtatgactgtagtgtgggcacacgagaagtacggaatcgaatcttttgcactgattcacgactccttcggtaccattccggctgacgctgcgaacctgttcaaagcagtgcgcgaaactatggtttcgacatatgagtcttgtgatgtactggctgatttctacgaccagttcgctgaccagttgcacgagtctcaattggacaaaatgccagcacttccggctaaaggtaacttgaacctccgtgacatcttaaaatcggacttcgcgttcgcg

SEQ ID NO: 26 - protein, 890 aa, synthetic construct
  REGION 1..890: note = Variant of RNA polymerase
MHHHHHHMNTINIAKNDFSDIELAAIPFNTLADHYGERLAREQLALEHESYEMGEARFRKMFERQLKAGEVADNAAAKPLITTLLPKMIARINDWFEEVKAKRGKRPTAFQFLQEIKPEAVAYITIKTTLACLTSADNTTVQAVASAIGRAIEDEARFGRIRDLEAKHFKKNVEEQLNKRVGHVYKKAFMQVVEADMLSKGLLGGEAWSSWHKEDSIHVGVRCIEMLIESTGMVSLHRQNAGVVGQDSETIELAPEYAEAIATRAGALAGISPMFQPCVVPPKPWTGITGGGYWAAGRKPLQLVRTRSLAALRRYEEVSMPEVIKAVNIAQNTAWRVNKKVLDVANAITQWQHCPVADVPAMDRGEMPARPLDIDTNEIALKAWKKEASAFYRKDKARVSRRLSMEFMLSQANKFANYKAIWFPQNMDWRGRVYAVPMFNPQGNDMTKGLLTFAQGKPIGEDGFYWLKIHGANTAGVDKVPFPQRIKFVEDNHTNIMECAKAPLENTWWAEQDSPFCFLAFCFEYAGVINHGLSYNCSLPLAFDGSCSGIQHFSAMLRDEIGGKAVNLLPSAEVQDIYRIVSDKVNEVLKQDLINGTSTTLETVTDKKTGEITERTKYGTKVMAQWWLEHGVNRGVTKRSVMTLVYGSKEFGFRDQVLSDTIQPAIDNGKGDMFLNPNQAAGYMAKLIWNAVSVTVVAAVEAMNWLKSAAKLLAAEVKDKKTDTVLRGRCAVHWVTPDGFPVWQEYKKPIQTRLNLMFLGQFRLQPTINTNKDSEIDAHKQESGIAPNFVHSQDGNHLRMTVVWAHEKYGIESFALIHDSFGTIPADAANLFKAVRETMVSTYESCDVLADFYDQFADQLHESQLDKMPALPAKGNLNLRDILKSDFAFA

SEQ ID NO: 27 - DNA, 2670 bp, synthetic construct
  misc_feature 1..2670: note = Variant of RNA polymerase
  source 1..2670: mol_type = other DNA
atgcaccatcaccatcaccatatgaacacgattaacatcgctaagaacgacttctctgacatcgaactggctgctatcccgttcaacactctggctgaccattacggtgagcgtttagctcgcgaacagttggcccttgagcatgagtcttacgagatgggtgaagcacgcttccgcaagatgtttgagcgtcaacttaaagctggtgaggttgcggataacgctgccgccaagcctctcatcactaccctactccctaagatgattgcacgcatcaacgactggtttgaggaagtgaaagctaagcgcggcaagcgcccgacagccttccagttcctgcaagaaatcaagccggaagccgtagcgtacatcaccattaagaccactctggcttgcctaaccagtgcggacaatacaaccgttcaggctgtagcaagcgcaatcggtcgggccattgaggacgaggctcgcttcggtcgtatccgtgaccttgaagctaagcacttcaagaaaaacgttgaggaacaactcaacaagcgcgtagggcacgtctacaagaaagcatttatgcaagttgtcgaggctgacatgctctctaagggtctactcggtggcgaggcgtggtcttcgtggcataaggaagactctattcatgtaggagtacgctgcatcgagatgctcattgagtcaaccggaatggttagcttacaccgccaaaatgctggcgtagtaggtcaagactctgagactatcgaactcgcacctgaatacgctgaggctatcgcaacccgtgcaggtgcgctggctggcatctctccgatgttccaaccttgcgtagttcctcctaagccgtggactggcattactggtggtggctattgggctgcggggcgcaaacccctgcagttagtacgtactcgcagtctggcggcgcttcgccgctatgaagaagtgtcgatgccggaggtcatcaaagcagtcaacattgcgcagaatacagcatggcgtgtgaacaagaaagttctcgacgtagcgaatgcaatcacccaatggcagcactgtccagtcgcggatgtgcctgcgatggatcgtggcgaaatgccagctcgtccgttggacatcgataccaacgagattgcacttaaagcgtggaagaaagaagcttccgcgttctaccgcaaagacaaagcacgcgttagccgtcgtctgtcaatggagtttatgttatctcaggcgaacaagtttgcgaattataaagcaatctggtttccgcaaaacatggattggcgtgggcgcgtgtacgctgtcccgatgttcaatcctcagggcaacgatatgacgaaaggcctgctgacctttgcgcagggtaaacccattggtgaagacggcttctattggctcaagattcatggcgcaaatacagctggagtggataaagtaccgtttccacaacgcatcaaatttgttgaggataaccatacgaatattatggaatgcgcgaaagcaccgctggaaaacacttggtgggcggaacaggactcgccgttctgttttctggcgttctgctttgagtatgctggcgtcatcaatcacggtctgtcgtacaactgtagcttgcctctggcatttgatggtagttgctccggcattcaacatttctcagcgatgttacgcgacgaaattggcggcaaagctgtgaatctcctcccatctgcggaagtgcaggatatttatcgtatcgtcgctgacaaagttaacgaggtactgaaacaagatctgattaacggtacctctaccaccttggaaacggtgactgataagaagacaggcgaaattaccgaacgcacgaaatacgggaccaaagttatggcacagtggtggttagaacacggtgtgaatcgtggcgtcacgaaacgctcggttatgactttggcgtatgggagcaaagagtttggattccgcgatcaagtgctgagtgacaccattcaaccggcgatcgataacggcaaaggtgacatgtttctgaatccgaatcaggctgctggttacatggcgaaactgatctggaacgcagtgtccgtcaccgtagtcgcagcagttgaggcgatgaactggctgaaaagtgcggcgaaattacttgctgctgaagtgaaggataagaagacggatacagttctgcgtggccgctgcgcagtacattgggtgactcccgacggcttccctgtgtggcaggaatacaagaagcctattcagacgcgcttgaacctgatgttcctcggtcagttccgcttacagcctaccattaacaccaacaaagatagcgagattgatgcacacaaacaggagtctggtatcgctcctaactttgtacacagccaagacggtaaccaccttcgtatgactgtagtgtgggcacacgagaagtacggaatcgaatcttttgcactgattcacgactccttcggtaccattccggctgacgctgcgaacctgttcaaagcagtgcgcgaaactatggtttcgacatatgagtcttgtgatgtactggctgatttctacgaccagttcgctgaccagttgcacgagtctcaattggacaaaatgccagcacttccggctaaaggtaacttgaacctccgtgacatcttaaaatcggacttcgcgttcgcg

SEQ ID NO: 28 - protein, 890 aa, synthetic construct
  REGION 1..890: note = Variant of RNA polymerase
MHHHHHHMNTINIAKNDFSDIELAAIPFNTLADHYGERLAREQLALEHESYEMGEARFRKMFERQLKAGEVADNAAAKPLITTLLPKMIARINDWFEEVKAKRGKRPTAFQFLQEIKPEAVAYITIKTTLACLTSADNTTVQAVASAIGRAIEDEARFGRIRDLEAKHFKKNVEEQLNKRVGHVYKKAFMQVVEADMLSKGLLGGEAWSSWHKEDSIHVGVRCIEMLIESTGMVSLHRQNAGVVGQDSETIELAPEYAEAIATRAGALAGISPMFQPCVVPPKPWTGITGGGYWAAGRKPLQLVRTRSLAALRRYEEVSMPEVIKAVNIAQNTAWRVNKKVLDVANAITQWQHCPVADVPAMDRGEMPARPLDIDTNEIALKAWKKEASAFYRKDKARVSRRLSMEFMLSQANKFANYKAIWFPQNMDWRGRVYAVPMFNPQGNDMTKGLLTFAQGKPIGEDGFYWLKIHGANTAGVDKVPFPQRIKFVEDNHTNIMECAKAPLENTWWAEQDSPFCFLAFCFEYAGVINHGLSYNCSLPLAFDGSCSGIQHFSAMLRDEIGGKAVNLLPSAEVQDIYRIVADKVNEVLKQDLINGTSTTLETVTDKKTGEITERTKYGTKVMAQWWLEHGVNRGVTKRSVMTLAYGSKEFGFRDQVLSDTIQPAIDNGKGDMFLNPNQAAGYMAKLIWNAVSVTVVAAVEAMNWLKSAAKLLAAEVKDKKTDTVLRGRCAVHWVTPDGFPVWQEYKKPIQTRLNLMFLGQFRLQPTINTNKDSEIDAHKQESGIAPNFVHSQDGNHLRMTVVWAHEKYGIESFALIHDSFGTIPADAANLFKAVRETMVSTYESCDVLADFYDQFADQLHESQLDKMPALPAKGNLNLRDILKSDFAFA

SEQ ID NO: 29 - DNA, 2670 bp, synthetic construct
  misc_feature 1..2670: note = Variant of RNA polymerase
  source 1..2670: mol_type = other DNA
atgcaccatcaccatcaccatatgaacacgattaacatcgctaagaacgacttctctgacatcgaactggctgctatcccgttcaacactctggctgaccattacggtgagcgtttagctcgcgaacagttggcccttgagcatgagtcttacgagatgggtgaagcacgcttccgcaagatgtttgagcgtcaacttaaagctggtgaggttgcggataacgctgccgccaagcctctcatcactaccctactccctaagatgattgcacgcatcaacgactggtttgaggaagtgaaagctaagcgcggcaagcgcccgacagccttccagttcctgcaagaaatcaagccggaagccgtagcgtacatcaccattaagaccactctggcttgcctaaccagtgcggacaatacaaccgttcaggctgtagcaagcgcaatcggtcgggccattgaggacgaggctcgcttcggtcgtatccgtgaccttgaagctaagcacttcaagaaaaacgttgaggaacaactcaacaagcgcgtagggcacgtctacaagaaagcatttatgcaagttgtcgaggctgacatgctctctaagggtctactcggtggcgaggcgtggtcttcgtggcataaggaagactctattcatgtaggagtacgctgcatcgagatgctcattgagtcaaccggaatggttagcttacaccgccaaaatgctggcgtagtaggtcaagactctgagactatcgaactcgcacctgaatacgctgaggctatcgcaacccgtgcaggtgcgctggctggcatctctccgatgttccaaccttgcgtagttcctcctaagccgtggactggcattactggtggtggctattgggctgcggggcgcaaacccctgcagttagtacgtactcgcagtctggcggcgcttcgccgctatgaagaagtgtcgatgccggaggtcatcaaagcagtcaacattgcgcagaatacagcatggcgtgtgaacaagaaagttctcgacgtagcgaatgcaatcacccaatggcagcactgtccagtcgcggatgtgcctgcgatggatcgtggcgaaatgccagctcgtccgttggacatcgataccaacgagattgcacttaaagcgtggaagaaagaagcttccgcgttctaccgcaaagacaaagcacgcgttagccgtcgtctgtcaatggagtttatgttatctcaggcgaacaagtttgcgaattataaagcaatctggtttccgcaaaacatggattggcgtgggcgcgtgtacgctgtcccgatgttcaatcctcagggcaacgatatgacgaaaggcctgctgacctttgcgcagggtaaacccattggtgaagacggcttctattggctcaagattcatggcgcaaatacagctggagtggataaagtaccgtttccacaacgcatcaaatttgttgaggataaccatacgaatattatggaatgcgcgaaagcaccgctggaaaacacttggtgggcggaacaggactcgccgttctgttttctggcgttctgctttgagtatgctggcgtcatcaatcacggtctgtcgtacaactgtagcttgcctctggcatttgatggtagttgctccggcattcaacatttctcagcgatgttacgcgacgaaattggcggcaaagctgtgaatctcctcccatctgcggaagtgcaggatatttatcgtatcgtcagcgacaaagttaacgaggtactgaaacaagatctgattaacggtacctctaccaccttggaaacggtgactgataagaagacaggcgaaattaccgaacgcacgaaatacgggaccaaagttatggcacagtggtggttagaacacggtgtgaatcgtggcgtcacgaaacgctcggttatgactttggcgtatgggagcaaagagtttggattccgcgatcaaatcctgagtgacaccattcaaccggcgatcgataacggcaaaggtgacatgtttctgaatccgaatcaggctgctggttacatggcgaaactgatctggaacgcagtgtccgtcaccgtagtcgcagcagttgaggcgatgaactggctgaaaagtgcggcgaaattacttgctgctgaagtgaaggataagaagacggatacagttctgcgtggccgctgcgcagtacattgggtgactcccgacggcttccctgtgtggcaggaatacaagaagcctattcagacgcgcttgaacctgatgttcctcggtcagttccgcttacagcctaccattaacaccaacaaagatagcgagattgatgcacacaaacaggagtctggtatcgctcctaactttgtacacagccaagacggtaaccaccttcgtatgactgtagtgtgggcacacgagaagtacggaatcgaatcttttgcactgattcacgactccttcggtaccattccggctgacgctgcgaacctgttcaaagcagtgcgcgaaactatggtttcgacatatgagtcttgtgatgtactggctgatttctacgaccagttcgctgaccagttgcacgagtctcaattggacaaaatgccagcacttccggctaaaggtaacttgaacctccgtgacatcttaaaatcggacttcgcgttcgcg

SEQ ID NO: 30 - protein, 890 aa, synthetic construct
  REGION 1..890: note = Variant of RNA polymerase
MHHHHHHMNTINIAKNDFSDIELAAIPFNTLADHYGERLAREQLALEHESYEMGEARFRKMFERQLKAGEVADNAAAKPLITTLLPKMIARINDWFEEVKAKRGKRPTAFQFLQEIKPEAVAYITIKTTLACLTSADNTTVQAVASAIGRAIEDEARFGRIRDLEAKHFKKNVEEQLNKRVGHVYKKAFMQVVEADMLSKGLLGGEAWSSWHKEDSIHVGVRCIEMLIESTGMVSLHRQNAGVVGQDSETIELAPEYAEAIATRAGALAGISPMFQPCVVPPKPWTGITGGGYWAAGRKPLQLVRTRSLAALRRYEEVSMPEVIKAVNIAQNTAWRVNKKVLDVANAITQWQHCPVADVPAMDRGEMPARPLDIDTNEIALKAWKKEASAFYRKDKARVSRRLSMEFMLSQANKFANYKAIWFPQNMDWRGRVYAVPMFNPQGNDMTKGLLTFAQGKPIGEDGFYWLKIHGANTAGVDKVPFPQRIKFVEDNHTNIMECAKAPLENTWWAEQDSPFCFLAFCFEYAGVINHGLSYNCSLPLAFDGSCSGIQHFSAMLRDEIGGKAVNLLPSAEVQDIYRIVSDKVNEVLKQDLINGTSTTLETVTDKKTGEITERTKYGTKVMAQWWLEHGVNRGVTKRSVMTLAYGSKEFGFRDQILSDTIQPAIDNGKGDMFLNPNQAAGYMAKLIWNAVSVTVVAAVEAMNWLKSAAKLLAAEVKDKKTDTVLRGRCAVHWVTPDGFPVWQEYKKPIQTRLNLMFLGQFRLQPTINTNKDSEIDAHKQESGIAPNFVHSQDGNHLRMTVVWAHEKYGIESFALIHDSFGTIPADAANLFKAVRETMVSTYESCDVLADFYDQFADQLHESQLDKMPALPAKGNLNLRDILKSDFAFA

SEQ ID NO: 31 - DNA, 2670 bp, synthetic construct
  misc_feature 1..2670: note = Variant of RNA polymerase
  source 1..2670: mol_type = other DNA
atgcaccatcaccatcaccatatgaacacgattaacatcgctaagaacgacttctctgacatcgaactggctgctatcccgttcaacactctggctgaccattacggtgagcgtttagctcgcgaacagttggcccttgagcatgagtcttacgagatgggtgaagcacgcttccgcaagatgtttgagcgtcaacttaaagctggtgaggttgcggataacgctgccgccaagcctctcatcactaccctactccctaagatgattgcacgcatcaacgactggtttgaggaagtgaaagctaagcgcggcaagcgcccgacagccttccagttcctgcaagaaatcaagccggaagccgtagcgtacatcaccattaagaccactctggcttgcctaaccagtgcggacaatacaaccgttcaggctgtagcaagcgcaatcggtcgggccattgaggacgaggctcgcttcggtcgtatccgtgaccttgaagctaagcacttcaagaaaaacgttgaggaacaactcaacaagcgcgtagggcacgtctacaagaaagcatttatgcaagttgtcgaggctgacatgctctctaagggtctactcggtggcgaggcgtggtcttcgtggcataaggaagactctattcatgtaggagtacgctgcatcgagatgctcattgagtcaaccggaatggttagcttacaccgccaaaatgctggcgtagtaggtcaagactctgagactatcgaactcgcacctgaatacgctgaggctatcgcaacccgtgcaggtgcgctggctggcatctctccgatgttccaaccttgcgtagttcctcctaagccgtggactggcattactggtggtggctattgggctgcggggcgcaaacccctgcagttagtacgtactcgcagtctggcggcgcttcgccgctatgaagaagtgtcgatgccggaggtcatcaaagcagtcaacattgcgcagaatacagcatggcgtgtgaacaagaaagttctcgacgtagcgaatgcaatcacccaatggcagcactgtccagtcgcggatgtgcctgcgatggatcgtggcgaaatgccagctcgtccgttggacatcgataccaacgagattgcacttaaagcgtggaagaaagaagcttccgcgttctaccgcaaagacaaagcacgcgttagccgtcgtctgtcaatggagtttatgttatctcaggcgaacaagtttgcgaattataaagcaatctggtttccgcaaaacatggattggcgtgggcgcgtgtacgctgtcccgatgttcaatcctcagggcaacgatatgacgaaaggcctgctgacctttgcgcagggtaaacccattggtgaagacggcttctattggctcaagattcatggcgcaaatacagctggagtggataaagtaccgtttccacaacgcatcaaatttgttgaggataaccatacgaatattatggaatgcgcgaaagcaccgctggaaaacacttggtgggcggaacaggactcgccgttctgttttctggcgttctgctttgagtatgctggcgtcatcaatcacggtctgtcgtacaactgtagcttgcctctggcatttgatggtagttgctccggcattcaacatttctcagcgatgttacgcgacgaaattggcggcaaagctgtgaatctcctcccatctgcggaaccacaggatatttatcgtatcgtcagcgacaaagttaacgaggtactgaaacaagatctgattaacggtacctctaccaccttggaaacggtgactgataagaagacaggcgaaattaccgaacgcacgaaatacgggaccaaagttatggcacagtggtggttagaacacggtgtgaatcgtggcgtcacgaaacgctcggttatgactttggcgtatgggagcaaagagtttggattccgcgatcaagtgctgagtgacaccattcaaccggcgatcgataacggcaaaggtgacatgtttctgaatccgaatcaggctgctggttacatggcgaaactgatctggaacgcagtgtccgtcaccgtagtcgcagcagttgaggcgatgaactggctgaaaagtgcggcgaaattacttgctgctgaagtgaaggataagaagacggatacagttctgcgtggccgctgcgcagtacattgggtgactcccgacggcttccctgtgtggcaggaatacaagaagcctattcagacgcgcttgaacctgatgttcctcggtcagttccgcttacagcctaccattaacaccaacaaagatagcgagattgatgcacacaaacaggagtctggtatcgctcctaactttgtacacagccaagacggtaaccaccttcgtatgactgtagtgtgggcacacgagaagtacggaatcgaatcttttgcactgattcacgactccttcggtaccattccggctgacgctgcgaacctgttcaaagcagtgcgcgaaactatggtttcgacatatgagtcttgtgatgtactggctgatttctacgaccagttcgctgaccagttgcacgagtctcaattggacaaaatgccagcacttccggctaaaggtaacttgaacctccgtgacatcttaaaatcggacttcgcgttcgcg

SEQ ID NO: 32 - protein, 890 aa, synthetic construct
  REGION 1..890: note = Variant of RNA polymerase
MHHHHHHMNTINIAKNDFSDIELAAIPFNTLADHYGERLAREQLALEHESYEMGEARFRKMFERQLKAGEVADNAAAKPLITTLLPKMIARINDWFEEVKAKRGKRPTAFQFLQEIKPEAVAYITIKTTLACLTSADNTTVQAVASAIGRAIEDEARFGRIRDLEAKHFKKNVEEQLNKRVGHVYKKAFMQVVEADMLSKGLLGGEAWSSWHKEDSIHVGVRCIEMLIESTGMVSLHRQNAGVVGQDSETIELAPEYAEAIATRAGALAGISPMFQPCVVPPKPWTGITGGGYWAAGRKPLQLVRTRSLAALRRYEEVSMPEVIKAVNIAQNTAWRVNKKVLDVANAITQWQHCPVADVPAMDRGEMPARPLDIDTNEIALKAWKKEASAFYRKDKARVSRRLSMEFMLSQANKFANYKAIWFPQNMDWRGRVYAVPMFNPQGNDMTKGLLTFAQGKPIGEDGFYWLKIHGANTAGVDKVPFPQRIKFVEDNHTNIMECAKAPLENTWWAEQDSPFCFLAFCFEYAGVINHGLSYNCSLPLAFDGSCSGIQHFSAMLRDEIGGKAVNLLPSAEPQDIYRIVSDKVNEVLKQDLINGTSTTLETVTDKKTGEITERTKYGTKVMAQWWLEHGVNRGVTKRSVMTLAYGSKEFGFRDQVLSDTIQPAIDNGKGDMFLNPNQAAGYMAKLIWNAVSVTVVAAVEAMNWLKSAAKLLAAEVKDKKTDTVLRGRCAVHWVTPDGFPVWQEYKKPIQTRLNLMFLGQFRLQPTINTNKDSEIDAHKQESGIAPNFVHSQDGNHLRMTVVWAHEKYGIESFALIHDSFGTIPADAANLFKAVRETMVSTYESCDVLADFYDQFADQLHESQLDKMPALPAKGNLNLRDILKSDFAFA

SEQ ID NO: 33 - DNA, 2670 bp, synthetic construct
  misc_feature 1..2670: note = Variant of RNA polymerase
  source 1..2670: mol_type = other DNA
atgcaccatcaccatcaccatatgaacacgattaacatcgctaagaacgacttctctgacatcgaactggctgctatcccgttcaacactctggctgaccattacggtgagcgtttagctcgcgaacagttggcccttgagcatgagtcttacgagatgggtgaagcacgcttccgcaagatgtttgagcgtcaacttaaagctggtgaggttgcggataacgctgccgccaagcctctcatcactaccctactccctaagatgattgcacgcatcaacgactggtttgaggaagtgaaagctaagcgcggcaagcgcccgacagccttccagttcctgcaagaaatcaagccggaagccgtagcgtacatcaccattaagaccactctggcttgcctaaccagtgcggacaatacaaccgttcaggctgtagcaagcgcaatcggtcgggccattgaggacgaggctcgcttcggtcgtatccgtgaccttgaagctaagcacttcaagaaaaacgttgaggaacaactcaacaagcgcgtagggcacgtctacaagaaagcatttatgcaagttgtcgaggctgacatgctctctaagggtctactcggtggcgaggcgtggtcttcgtggcataaggaagactctattcatgtaggagtacgctgcatcgagatgctcattgagtcaaccggaatggttagcttacaccgccaaaatgctggcgtagtaggtcaagactctgagactatcgaactcgcacctgaatacgctgaggctatcgcaacccgtgcaggtgcgctggctggcatctctccgatgttccaaccttgcgtagttcctcctaagccgtggactggcattactggtggtggctattgggctgcggggcgcaaacccctgcagttagtacgtactcgcagtctggcggcgcttcgccgctatgaagaagtgtcgatgccggaggtcatcaaagcagtcaacattgcgcagaatacagcatggcgtgtgaacaagaaagttctcgacgtagcgaatgcaatcacccaatggcagcactgtccagtcgcggatgtgcctgcgatggatcgtggcgaaatgccagctcgtccgttggacatcgataccaacgagattgcacttaaagcgtggaagaaagaagcttccgcgttctaccgcaaagacaaagcacgcgttagccgtcgtctgtcaatggagtttatgttatctcaggcgaacaagtttgcgaattataaagcaatctggtttccgcaaaacatggattggcgtgggcgcgtgtacgctgtcccgatgttcaatcctcagggcaacgatatgacgaaaggcctgctgacctttgcgcaggagaaacccattggtgaagacggcttctattggctcaagattcatggcgcaaatacagctggagtggataaagtaccgtttccacaacgcatcaaatttgttgaggataaccatacgaatattatggaatgcgcgaaagcaccgctggaaaacacttggtgggcggaacaggactcgccgttctgttttctggcgttctgctttgagtatgctggcgtcatcaatcacggtctgtcgtacaactgtagcttgcctctggcatttgatggtagttgctccggcattcaacatttctcagcgatgttacgcgacgaaattggcggcaaagctgtgaatctcctcccatctgcggaagtgcaggatatttatcgtatcgtcagcgacaaagttaacgaggtactgaaacaagatctgattaacggtacctctaccaccttggaaacggtgactgataagaagacaggcgaaattaccgaacgcacgaaatacgggaccaaagttatggcacagtggtggttagaacacggtgtgaatcgtggcgtcacgaaacgctcggttatgactttggcgtatgggagcaaagagtttggattccgcgatcaagtgctgagtgacaccattcaaccggcgatcgataacggcaaaggtgacatgtttctgaatccgaatcaggctgctggttacatggcgaaactgatctggaacgcagtgtccgtcaccgtagtcgcagcagttgaggcgatgaactggctgaaaagtgcggcgaaattacttgctgctgaagtgaaggataagaagacggatacagttctgcgtggccgctgcgcagtacattgggtgactcccgacggcttccctgtgtggcaggaatacaagaagcctattcagacgcgcttgaacctgatgttcctcggtcagttccgcttacagcctaccattaacaccaacaaagatagcgagattgatgcacacaaacaggagtctggtatcgctcctaactttgtacacagccaagacggtaaccaccttcgtatgactgtagtgtgggcacacgagaagtacggaatcgaatcttttgcactgattcacgactccttcggtaccattccggctgacgctgcgaacctgttcaaagcagtgcgcgaaactatggtttcgacatatgagtcttgtgatgtactggctgatttctacgaccagttcgctgaccagttgcacgagtctcaattggacaaaatgccagcacttccggctaaaggtaacttgaacctccgtgacatcttaaaatcggacttcgcgttcgcg

SEQ ID NO: 34 - protein, 890 aa, synthetic construct
  REGION 1..890: note = Variant of RNA polymerase
MHHHHHHMNTINIAKNDFSDIELAAIPFNTLADHYGERLAREQLALEHESYEMGEARFRKMFERQLKAGEVADNAAAKPLITTLLPKMIARINDWFEEVKAKRGKRPTAFQFLQEIKPEAVAYITIKTTLACLTSADNTTVQAVASAIGRAIEDEARFGRIRDLEAKHFKKNVEEQLNKRVGHVYKKAFMQVVEADMLSKGLLGGEAWSSWHKEDSIHVGVRCIEMLIESTGMVSLHRQNAGVVGQDSETIELAPEYAEAIATRAGALAGISPMFQPCVVPPKPWTGITGGGYWAAGRKPLQLVRTRSLAALRRYEEVSMPEVIKAVNIAQNTAWRVNKKVLDVANAITQWQHCPVADVPAMDRGEMPARPLDIDTNEIALKAWKKEASAFYRKDKARVSRRLSMEFMLSQANKFANYKAIWFPQNMDWRGRVYAVPMFNPQGNDMTKGLLTFAQEKPIGEDGFYWLKIHGANTAGVDKVPFPQRIKFVEDNHTNIMECAKAPLENTWWAEQDSPFCFLAFCFEYAGVINHGLSYNCSLPLAFDGSCSGIQHFSAMLRDEIGGKAVNLLPSAEVQDIYRIVSDKVNEVLKQDLINGTSTTLETVTDKKTGEITERTKYGTKVMAQWWLEHGVNRGVTKRSVMTLAYGSKEFGFRDQVLSDTIQPAIDNGKGDMFLNPNQAAGYMAKLIWNAVSVTVVAAVEAMNWLKSAAKLLAAEVKDKKTDTVLRGRCAVHWVTPDGFPVWQEYKKPIQTRLNLMFLGQFRLQPTINTNKDSEIDAHKQESGIAPNFVHSQDGNHLRMTVVWAHEKYGIESFALIHDSFGTIPADAANLFKAVRETMVSTYESCDVLADFYDQFADQLHESQLDKMPALPAKGNLNLRDILKSDFAFA

SEQ ID NO: 35 - DNA, 2670 bp, synthetic construct
  misc_feature 1..2670: note = Variant of RNA polymerase
  source 1..2670: mol_type = other DNA
atgcaccatcaccatcaccatatgaacacgattaacatcgctaagaacgacttctctgacatcgaactggctgctatcccgttcaacactctggctgaccattacggtgagcgtttagctcgcgaacagttggcccttgagcatgagtcttacgagatgggtgaagcacgcttccgcaagatgtttgagcgtcaacttaaagctggtgaggttgcggataacgctgccgccaagcctctcatcactaccctactccctaagatgattgcacgcatcaacgactggtttgaggaagtgaaagctaagcgcggcaagcgcccgacagccttccagttcctgcaagaaatcaagccggaagccgtagcgtacatcaccattaagaccactctggcttgcctaaccagtgcggacaatacaaccgttcaggctgtagcaagcgcaatcggtcgggccattgaggacgaggctcgcttcggtcgtatccgtgaccttgaagctaagcacttcaagaaaaacgttgaggaacaactcaacaagcgcgtagggcacgtctacaagaaagcatttatgcaagttgtcgaggctgacatgctctctaagggtctactcggtggcgaggcgtggtcttcgtggcataaggaagactctattcatgtaggagtacgctgcatcgagatgctcattgagtcaaccggaatggttagcttacaccgccaaaatgctggcgtagtaggtcaagactctgagactatcgaactcgcacctgaatacgctgaggctatcgcaacccgtgcaggtgcgctggctggcatctctccgatgttccaaccttgcgtagttcctcctaagccgtggactggcattactggtggtggctattgggctgcggggcgcaaacccctgcagttagtacgtactcgcagtctggcggcgcttcgccgctatgaagaagtgtcgatgccggaggtcatcaaagcagtcaacattgcgcagaatacagcatggcgtgtgaacaagaaagttctcgacgtagcgaatgcaatcacccaatggcagcactgtccagtcgcggatgtgcctgcgatggatcgtggcgaaatgccagctcgtccgttggacatcgataccaacgagattgcacttaaagcgtggaagaaagaagcttccgcgttctaccgcaaagacaaagcacgcgttagccgtcgtctgtcaatggagtttatgttatctcaggcgaacaagtttgcgaattataaagcaatctggtttccgcaaaacatggattggcgtgggcgcgtgtacgctgtcccgatgttcaatcctcagggcaacgatatgacgaaaggcctgctgacctttgcgcagggtaaacccattggtgaagacggcttctattggctcaagattcatggcgcaaatacagctggagtggataaagtaccgtttccacaacgcatcaaatttgttgaggataaccatacgaatattatggaatgcgcgaaagcaccgctggaaaacacttggtgggcggaacaggactcgccgttctgttttctggcgttctgctttgagtatgctggcgtcatcaatcacggtctgtcgtacaactgtagcttgcctctggcatttgatggtagttgctccggcattcaacatttctcagcgatgttacgcgacgaaattggcggcaaagctgtgaatctcctcccatctgcggaatatcaggatatttatcgtatcgtcagcgacaaagttaacgaggtactgaaacaagatctgattaacggtacctctaccaccttggaaacggtgactgataagaagacaggcgaaattaccgaacgcacgaaatacgggaccaaagttatggcacagtggtggttagaacacggtgtgaatcgtggcgtcacgaaacgctcggttatgactttggcgtatgggagcaaagagtttggattccgcgatcaagtgctgagtgacaccattcaaccggcgatcgataacggcaaaggtgacatgtttctgaatccgaatcaggctgctggttacatggcgaaactgatctggaacgcagtgtccgtcaccgtagtcgcagcagttgaggcgatgaactggctgaaaagtgcggcgaaattacttgctgctgaagtgaaggataagaagacggatacagttctgcgtggccgctgcgcagtacattgggtgactcccgacggcttccctgtgtggcaggaatacaagaagcctattcagacgcgcttgaacctgatgttcctcggtcagttccgcttacagcctaccattaacaccaacaaagatagcgagattgatgcacacaaacaggagtctggtatcgctcctaactttgtacacagccaagacggtaaccaccttcgtatgactgtagtgtgggcacacgagaagtacggaatcgaatcttttgcactgattcacgactccttcggtaccattccggctgacgctgcgaacctgttcaaagcagtgcgcgaaactatggtttcgacatatgagtcttgtgatgtactggctgatttctacgaccagttcgctgaccagttgcacgagtctcaattggacaaaatgccagcacttccggctaaaggtaacttgaacctccgtgacatcttaaaatcggacttcgcgttcgcg

SEQ ID NO: 36 - protein, 890 aa, synthetic construct
  REGION 1..890: note = Variant of RNA polymerase
MHHHHHHMNTINIAKNDFSDIELAAIPFNTLADHYGERLAREQLALEHESYEMGEARFRKMFERQLKAGEVADNAAAKPLITTLLPKMIARINDWFEEVKAKRGKRPTAFQFLQEIKPEAVAYITIKTTLACLTSADNTTVQAVASAIGRAIEDEARFGRIRDLEAKHFKKNVEEQLNKRVGHVYKKAFMQVVEADMLSKGLLGGEAWSSWHKEDSIHVGVRCIEMLIESTGMVSLHRQNAGVVGQDSETIELAPEYAEAIATRAGALAGISPMFQPCVVPPKPWTGITGGGYWAAGRKPLQLVRTRSLAALRRYEEVSMPEVIKAVNIAQNTAWRVNKKVLDVANAITQWQHCPVADVPAMDRGEMPARPLDIDTNEIALKAWKKEASAFYRKDKARVSRRLSMEFMLSQANKFANYKAIWFPQNMDWRGRVYAVPMFNPQGNDMTKGLLTFAQGKPIGEDGFYWLKIHGANTAGVDKVPFPQRIKFVEDNHTNIMECAKAPLENTWWAEQDSPFCFLAFCFEYAGVINHGLSYNCSLPLAFDGSCSGIQHFSAMLRDEIGGKAVNLLPSAEYQDIYRIVSDKVNEVLKQDLINGTSTTLETVTDKKTGEITERTKYGTKVMAQWWLEHGVNRGVTKRSVMTLAYGSKEFGFRDQVLSDTIQPAIDNGKGDMFLNPNQAAGYMAKLIWNAVSVTVVAAVEAMNWLKSAAKLLAAEVKDKKTDTVLRGRCAVHWVTPDGFPVWQEYKKPIQTRLNLMFLGQFRLQPTINTNKDSEIDAHKQESGIAPNFVHSQDGNHLRMTVVWAHEKYGIESFALIHDSFGTIPADAANLFKAVRETMVSTYESCDVLADFYDQFADQLHESQLDKMPALPAKGNLNLRDILKSDFAFA

SEQ ID NO: 37 - DNA, 2670 bp, synthetic construct
  misc_feature 1..2670: note = Variant of RNA polymerase
  source 1..2670: mol_type = other DNA
atgcaccatcaccatcaccatatgaacacgattaacatcgctaagaacgacttctctgacatcgaactggctgctatcccgttcaacactctggctgaccattacggtgagcgtttagctcgcgaacagttggcccttgagcatgagtcttacgagatgggtgaagcacgcttccgcaagatgtttgagcgtcaacttaaagctggtgaggttgcggataacgctgccgccaagcctctcatcactaccctactccctaagatgattgcacgcatcaacgactggtttgaggaagtgaaagctaagcgcggcaagcgcccgacagccttccagttcctgcaagaaatcaagccggaagccgtagcgtacatcaccattaagaccactctggcttgcctaaccagtgcggacaatacaaccgttcaggctgtagcaagcgcaatcggtcgggccattgaggacgaggctcgcttcggtcgtatccgtgaccttgaagctaagcacttcaagaaaaacgttgaggaacaactcaacaagcgcgtagggcacgtctacaagaaagcatttatgcaagttgtcgaggctgacatgctctctaagggtctactcggtggcgaggcgtggtcttcgtggcataaggaagactctattcatgtaggagtacgctgcatcgagatgctcattgagtcaaccggaatggttagcttacaccgccaaaatgctggcgtagtaggtcaagactctgagactatcgaactcgcacctgaatacgctgaggctatcgcaacccgtgcaggtgcgctggctggcatctctccgatgttccaaccttgcgtagttcctcctaagccgtggactggcattactggtggtggctattgggctgcggggcgcaaacccctgcagttagtacgtactcgcagtctggcggcgcttcgccgctatgaagaagtgtcgatgccggaggtcatcaaagcagtcaacattgcgcagaatacagcatggcgtgtgaacaagaaagttctcgacgtagcgaatgcaatcacccaatggcagcactgtccagtcgcggatgtgcctgcgatggatcgtggcgaaatgccagctcgtccgttggacatcgataccaacgagattgcacttaaagcgtggaagaaagaagcttccgcgttctaccgcaaagacaaagcacgcgttagccgtcgtctgtcaatggagtttatgttatctcaggcgaacaagtttgcgaattataaagcaatctggtttccgcaaaacatggattggcgtgggcgcgtgtacgctgtcccgatgttcaatcctcagggcaacgatatgacgaaaggcctgctgacctttgcgcagggtaaacccattggtgaagacggcttctattggctcaagattcatggcgcaaatacagctggagtggataaagtaccgtttccacaacgcatcaaatttgttgaggataaccatacgaatattatggaatgcgcgaaagcaccgctggaaaacacttggtgggcggaacaggactcgccgttctgttttctggcgttctgctttgagtatgctggcgtcatcaatcacggtctgtcgtacaactgtagcttgcctctggcatttgatggtagttgctccggcattcaacatttctcagcgatgttacgcgacgaaattggcgccaaagctgtgaatctcctcccatctgcggaagtgcaggatatttatcgtatcgtcagcgacaaagttaacgaggtactgaaacaagatctgattaacggtacctctaccaccttggaaacggtgactgataagaagacaggcgaaattaccgaacgcacgaaatacgggaccaaagttatggcacagtggtggttagaacacggtgtgaatcgtggcgtcacgaaacgctcggttatgactttggcgtatgggagcaaagagtttggattccgcgatcaagtgctgagtgacaccattcaaccggcgatcgataacggcaaaggtgacatgtttctgaatccgaatcaggctgctggttacatggcgaaactgatctggaacgcagtgtccgtcaccgtagtcgcagcagttgaggcgatgaactggctgaaaagtgcggcgaaattacttgctgctgaagtgaaggataagaagacggatacagttctgcgtggccgctgcgcagtacattgggtgactcccgacggcttccctgtgtggcaggaatacaagaagcctattcagacgcgcttgaacctgatgttcctcggtcagttccgcttacagcctaccattaacaccaacaaagatagcgagattgatgcacacaaacaggagtctggtatcgctcctaactttgtacacagccaagacggtaaccaccttcgtatgactgtagtgtgggcacacgagaagtacggaatcgaatcttttgcactgattcacgactccttcggtaccattccggctgacgctgcgaacctgttcaaagcagtgcgcgaaactatggtttcgacatatgagtcttgtgatgtactggctgatttctacgaccagttcgctgaccagttgcacgagtctcaattggacaaaatgccagcacttccggctaaaggtaacttgaacctccgtgacatcttaaaatcggacttcgcgttcgcg

SEQ ID NO: 38 - protein, 890 aa, synthetic construct
  REGION 1..890: note = Variant of RNA polymerase
MHHHHHHMNTINIAKNDFSDIELAAIPFNTLADHYGERLAREQLALEHESYEMGEARFRKMFERQLKAGEVADNAAAKPLITTLLPKMIARINDWFEEVKAKRGKRPTAFQFLQEIKPEAVAYITIKTTLACLTSADNTTVQAVASAIGRAIEDEARFGRIRDLEAKHFKKNVEEQLNKRVGHVYKKAFMQVVEADMLSKGLLGGEAWSSWHKEDSIHVGVRCIEMLIESTGMVSLHRQNAGVVGQDSETIELAPEYAEAIATRAGALAGISPMFQPCVVPPKPWTGITGGGYWAAGRKPLQLVRTRSLAALRRYEEVSMPEVIKAVNIAQNTAWRVNKKVLDVANAITQWQHCPVADVPAMDRGEMPARPLDIDTNEIALKAWKKEASAFYRKDKARVSRRLSMEFMLSQANKFANYKAIWFPQNMDWRGRVYAVPMFNPQGNDMTKGLLTFAQGKPIGEDGFYWLKIHGANTAGVDKVPFPQRIKFVEDNHTNIMECAKAPLENTWWAEQDSPFCFLAFCFEYAGVINHGLSYNCSLPLAFDGSCSGIQHFSAMLRDEIGAKAVNLLPSAEVQDIYRIVSDKVNEVLKQDLINGTSTTLETVTDKKTGEITERTKYGTKVMAQWWLEHGVNRGVTKRSVMTLAYGSKEFGFRDQVLSDTIQPAIDNGKGDMFLNPNQAAGYMAKLIWNAVSVTVVAAVEAMNWLKSAAKLLAAEVKDKKTDTVLRGRCAVHWVTPDGFPVWQEYKKPIQTRLNLMFLGQFRLQPTINTNKDSEIDAHKQESGIAPNFVHSQDGNHLRMTVVWAHEKYGIESFALIHDSFGTIPADAANLFKAVRETMVSTYESCDVLADFYDQFADQLHESQLDKMPALPAKGNLNLRDILKSDFAFA

SEQ ID NO: 39 - DNA, 2670 bp, synthetic construct
  misc_feature 1..2670: note = Variant of RNA polymerase
  source 1..2670: mol_type = other DNA
atgcaccatcaccatcaccatatgaacacgattaacatcgctaagaacgacttctctgacatcgaactggctgctatcccgttcaacactctggctgaccattacggtgagcgtttagctcgcgaacagttggcccttgagcatgagtcttacgagatgggtgaagcacgcttccgcaagatgtttgagcgtcaacttaaagctggtgaggttgcggataacgctgccgccaagcctctcatcactaccctactccctaagatgattgcacgcatcaacgactggtttgaggaagtgaaagctaagcgcggcaagcgcccgacagccttccagttcctgcaagaaatcaagccggaagccgtagcgtacatcaccattaagaccactctggcttgcctaaccagtgcggacaatacaaccgttcaggctgtagcaagcgcaatcggtcgggccattgaggacgaggctcgcttcggtcgtatccgtgaccttgaagctaagcacttcaagaaaaacgttgaggaacaactcaacaagcgcgtagggcacgtctacaagaaagcatttatgcaagttgtcgaggctgacatgctctctaagggtctactcggtggcgaggcgtggtcttcgtggcataaggaagactctattcatgtaggagtacgctgcatcgagatgctcattgagtcaaccggaatggttagcttacaccgccaaaatgctggcgtagtaggtcaagactctgagactatcgaactcgcacctgaatacgctgaggctatcgcaacccgtgcaggtgcgctggctggcatctctccgatgttccaaccttgcgtagttcctcctaagccgtggactggcattactggtggtggctattgggctgcggggcgcaaacccctgcagttagtacgtactcgcagtctggcggcgcttcgccgctatgaagaagtgtcgatgccggaggtcatcaaagcagtcaacattgcgcagaatacagcatggcgtgtgaacaagaaagttctcgacgtagcgaatgcaatcacccaatggcagcactgtccagtcgcggatgtgcctgcgatggatcgtggcgaaatgccagctcgtccgttggacatcgataccaacgagattgcacttaaagcgtggaagaaagaagcttccgcgttctaccgcaaagacaaagcacgcgttagccgtcgtctgtcaatggagtttatgttatctcaggcgaacaagtttgcgaattataaagcaatctggtttccgcaaaacatggattggcgtgggcgcgtgtacgctgtcccgatgttcaatcctcagggcaacgatatgacgaaaggcctgctgacctttgcgcagggtaaacccattggtgaagacggcttctattggctcaagattcatggcgcaaatacagctggagtggataaagtaccgtttccacaacgcatcaaatttgttgaggataaccatacgaatattatggaatgcgcgaaagcaccgctggaaaacacttggtgggcggaacaggactcgccgttctgttttctggcgttctgctttgagtatgctggcgtcatcaatcacggtctgtcgtacaactgtagcttgcctctggcatttgatggtagttgctccggcattcaacatttctcagcgatgttacgcgacgaaattggcggcaaagctgtgaatctcctcccatctgcggaagtgcaggatatttatcgtatcgtcagcgacaaagttaacgaggtactgaaacaagatctgattaacggtacctctaccaccttggaaacggtgactgataagaagacaggcgaaattaccgaacgcacgaaatacgggaccaaagttatggcacagtggtggttagaacacggtgtgaatcgtggcgtcacgaaacgctcggttatgactttggcgtatgggagcaaagagtttggattccgcgatcaagtgctgagtgacaccattcaaccggcgatcgataacggcaaaggtgacatgtttctgaatccgaatcaggctgctggttacatggcgaaactgatctggaacgcagtgtccgtcaccgtagtcgcagcagttgaggcgatgaactggctgaaaagtgcggcgaaattacttgctgctgaagtgaaggataagaagacggatacagttctgcgtggccgctgcgcagtacattgggtgactcccgacggcttccctgtgtggcaggaatacaagaagcctattcagacgcgcttgaacctgatgttcctcggtcagttccgcttacagcctaccattaacaccaacaaagatagcgagattgatgcacacaaacaggagtctggtatcgctcctaactttgtacacagccaagacggtaaccaccttcgtatgactgtagtgtgggcacacgagaagtacggaatcgaatcttttgcactgattcacgactccttcggtaccattccggctgacgctgcgaacctgttcaaagcagtgcgcgaaactatggtttcgacatatgagtcttgtgatgtactggctgatttctacgaccagttcgctgaccagttgcacgagtctcaaagggacaaaatgccagcacttccggctaaaggtaacttgaacctccgtgacatcttaaaatcggacttcgcgttcgcg

SEQ ID NO: 40 - protein, 890 aa, synthetic construct
  REGION 1..890: note = Variant of RNA polymerase
MHHHHHHMNTINIAKNDFSDIELAAIPFNTLADHYGERLAREQLALEHESYEMGEARFRKMFERQLKAGEVADNAAAKPLITTLLPKMIARINDWFEEVKAKRGKRPTAFQFLQEIKPEAVAYITIKTTLACLTSADNTTVQAVASAIGRAIEDEARFGRIRDLEAKHFKKNVEEQLNKRVGHVYKKAFMQVVEADMLSKGLLGGEAWSSWHKEDSIHVGVRCIEMLIESTGMVSLHRQNAGVVGQDSETIELAPEYAEAIATRAGALAGISPMFQPCVVPPKPWTGITGGGYWAAGRKPLQLVRTRSLAALRRYEEVSMPEVIKAVNIAQNTAWRVNKKVLDVANAITQWQHCPVADVPAMDRGEMPARPLDIDTNEIALKAWKKEASAFYRKDKARVSRRLSMEFMLSQANKFANYKAIWFPQNMDWRGRVYAVPMFNPQGNDMTKGLLTFAQGKPIGEDGFYWLKIHGANTAGVDKVPFPQRIKFVEDNHTNIMECAKAPLENTWWAEQDSPFCFLAFCFEYAGVINHGLSYNCSLPLAFDGSCSGIQHFSAMLRDEIGGKAVNLLPSAEVQDIYRIVSDKVNEVLKQDLINGTSTTLETVTDKKTGEITERTKYGTKVMAQWWLEHGVNRGVTKRSVMTLAYGSKEFGFRDQVLSDTIQPAIDNGKGDMFLNPNQAAGYMAKLIWNAVSVTVVAAVEAMNWLKSAAKLLAAEVKDKKTDTVLRGRCAVHWVTPDGFPVWQEYKKPIQTRLNLMFLGQFRLQPTINTNKDSEIDAHKQESGIAPNFVHSQDGNHLRMTVVWAHEKYGIESFALIHDSFGTIPADAANLFKAVRETMVSTYESCDVLADFYDQFADQLHESQRDKMPALPAKGNLNLRDILKSDFAFA

SEQ ID NO: 41 - DNA, 2670 bp, synthetic construct
  misc_feature 1..2670: note = Variant of RNA polymerase
  source 1..2670: mol_type = other DNA
atgcaccatcaccatcaccatatgaacacgattaacatcgctaagaacgacttctctgacatcgaactggctgctatcccgttcaacactctggctgaccattacggtgagcgtttagctcgcgaacagttggcccttgagcatgagtcttacgagatgggtgaagcacgcttccgcaagatgtttgagcgtcaacttaaagctggtgaggttgcggataacgctgccgccaagcctctcatcactaccctactccctaagatgattgcacgcatcaacgactggtttgaggaagtgaaagctaagcgcggcaagcgcccgacagccttccagttcctgcaagaaatcaagccggaagccgtagcgtacatcaccattaagaccactctggcttgcctaaccagtgcggacaatacaaccgttcaggctgtagcaagcgcaatcggtcgggccattgaggacgaggctcgcttcggtcgtatccgtgaccttgaagctaagcacttcaagaaaaacgttgaggaacaactcaacaagcgcgtagggcacgtctacaagaaagcatttatgcaagttgtcgaggctgacatgctctctaagggtctactcggtggcgaggcgtggtcttcgtggcataaggaagactctattcatgtaggagtacgctgcatcgagatgctcattgagtcaaccggaatggttagcttacaccgccaaaatgctggcgtagtaggtcaagactctgagactatcgaactcgcacctgaatacgctgaggctatcgcaacccgtgcaggtgcgctggctggcatctctccgatgttccaaccttgcgtagttcctcctaagccgtggactggcattactggtggtggctattgggctgcggggcgcaaacccctgcagttagtacgtactcgcagtctggcggcgcttcgccgctatgaagaagtgtcgatgccggaggtcatcaaagcagtcaacattgcgcagaatacagcatggcgtgtgaacaagaaagttctcgacgtagcgaatgcaatcacccaatggcagcactgtccagtcgcggatgtgcctgcgatggatcgtggcgaaatgccagctcgtccgttggacatcgataccaacgagattgcacttaaagcgtggaagaaagaagcttccgcgttctaccgcaaagacaaagcacgcgttagccgtcgtctgtcaatggagtttatgttatctcaggcgaacaagtttgcgaattataaagcaatctggtttccgcaaaacatggattggcgtgggcgcgtgtacgctgtcccgatgttcaatcctcagggcaacgatatgacgaaaggcctgctgacctttgcgcagggtaaacccattggtgaagacggcttctattggctcaagattcatggcgcaaatacagctggagtggataaagtaccgtttccacaacgcatcaaatttgttgaggataaccatacgaatattatggaatgcgcgaaagcaccgctggaaaacacttggtgggcggaacaggactcgccgttctgttttctggcgttctgctttgagtatgctggcgtcatcaatcacggtctgtcgtacaactgtagcttgcctctggcatttgatggtagttgctccggcattcaacatttctcagcgatgttacgcgacgaaattggcggcaaagctgtgaatctcctcccatctgcggaagtgcaggatatttatcgtatcgtcagcgacaaagttaacgaggtactgaaacaagatctgattaacggtacctctaccaccttggaaacggtgactgataagaagacaggcgaaattaccgaacgcacgaaatacgggaccaaagttatggcacagtggtggttagaacacggtgtgaatcgtggcgtcacgaaacgctcggttatgactttggcgtatgggagcaaagagtttggattccgcgatcaagtgctgagtgacaccattcaaccggcgatcgataacggcaaaggtgacatgtttctgaatccgaatcaggctgctggttacatggcgaaactgatctggaacgcagtgtccgtcaccgtagtcgcagcagttgaggcgatgaactggctgaaaagtgcggcgaaattacttgctgctgaagtgaaggatccgaagacggatacagttctgcgtggccgctgcgcagtacattgggtgactcccgacggcttccctgtgtggcaggaatacaagaagcctattcagacgcgcttgaacctgatgttcctcggtcagttccgcttacagcctaccattaacaccaacaaagatagcgagattgatgcacacaaacaggagtctggtatcgctcctaactttgtacacagccaagacggtaaccaccttcgtatgactgtagtgtgggcacacgagaagtacggaatcgaatcttttgcactgattcacgactccttcggtaccattccggctgacgctgcgaacctgttcaaagcagtgcgcgaaactatggtttcgacatatgagtcttgtgatgtactggctgatttctacgaccagttcgctgaccagttgcacgagtctcaattggacaaaatgccagcacttccggctaaaggtaacttgaacctccgtgacatcttaaaatcggacttcgcgttcgcg

SEQ ID NO: 42 - protein, 890 aa, synthetic construct
  REGION 1..890: note = Variant of RNA polymerase
MHHHHHHMNTINIAKNDFSDIELAAIPFNTLADHYGERLAREQLALEHESYEMGEARFRKMFERQLKAGEVADNAAAKPLITTLLPKMIARINDWFEEVKAKRGKRPTAFQFLQEIKPEAVAYITIKTTLACLTSADNTTVQAVASAIGRAIEDEARFGRIRDLEAKHFKKNVEEQLNKRVGHVYKKAFMQVVEADMLSKGLLGGEAWSSWHKEDSIHVGVRCIEMLIESTGMVSLHRQNAGVVGQDSETIELAPEYAEAIATRAGALAGISPMFQPCVVPPKPWTGITGGGYWAAGRKPLQLVRTRSLAALRRYEEVSMPEVIKAVNIAQNTAWRVNKKVLDVANAITQWQHCPVADVPAMDRGEMPARPLDIDTNEIALKAWKKEASAFYRKDKARVSRRLSMEFMLSQANKFANYKAIWFPQNMDWRGRVYAVPMFNPQGNDMTKGLLTFAQGKPIGEDGFYWLKIHGANTAGVDKVPFPQRIKFVEDNHTNIMECAKAPLENTWWAEQDSPFCFLAFCFEYAGVINHGLSYNCSLPLAFDGSCSGIQHFSAMLRDEIGGKAVNLLPSAEVQDIYRIVSDKVNEVLKQDLINGTSTTLETVTDKKTGEITERTKYGTKVMAQWWLEHGVNRGVTKRSVMTLAYGSKEFGFRDQVLSDTIQPAIDNGKGDMFLNPNQAAGYMAKLIWNAVSVTVVAAVEAMNWLKSAAKLLAAEVKDPKTDTVLRGRCAVHWVTPDGFPVWQEYKKPIQTRLNLMFLGQFRLQPTINTNKDSEIDAHKQESGIAPNFVHSQDGNHLRMTVVWAHEKYGIESFALIHDSFGTIPADAANLFKAVRETMVSTYESCDVLADFYDQFADQLHESQLDKMPALPAKGNLNLRDILKSDFAFA

SEQ ID NO: 43 - DNA, 2670 bp, synthetic construct
  misc_feature 1..2670: note = Variant of RNA polymerase
  source 1..2670: mol_type = other DNA
atgcaccatcaccatcaccatatgaacacgattaacatcgctaagaacgacttctctgacatcgaactggctgctatcccgttcaacactctggctgaccattacggtgagcgtttagctcgcgaacagttggcccttgagcatgagtcttacgagatgggtgaagcacgcttccgcaagatgtttgagcgtcaacttaaagctggtgaggttgcggataacgctgccgccaagcctctcatcactaccctactccctaagatgattgcacgcatcaacgactggtttgaggaagtgaaagctaagcgcggcaagcgcccgacagccttccagttcctgcaagaaatcaagccggaagccgtagcgtacatcaccattaagaccactctggcttgcctaaccagtgcggacaatacaaccgttcaggctgtagcaagcgcaatcggtcgggccattgaggacgaggctcgcttcggtcgtatccgtgaccttgaagctaagcacttcaagaaaaacgttgaggaacaactcaacaagcgcgtagggcacgtctacaagaaagcatttatgcaagttgtcgaggctgacatgctctctaagggtctactcggtggcgaggcgtggtcttcgtggcataaggaagactctattcatgtaggagtacgctgcatcgagatgctcattgagtcaaccggaatggttagcttacaccgccaaaatgctggcgtagtaggtcaagactctgagactatcgaactcgcacctgaatacgctgaggctatcgcaacccgtgcaggtgcgctggctggcatctctccgatgttccaaccttgcgtagttcctcctaagccgtggactggcattactggtggtggctattgggctgcggggcgcaaacccctgcagttagtacgtactcgcagtctggcggcgcttcgccgctatgaagaagtgtcgatgccggaggtcatcaaagcagtcaacattgcgcagaatacagcatggcgtgtgaacaagaaagttctcgacgtagcgaatgcaatcacccaatggcagcactgtccagtcgcggatgtgcctgcgatggatcgtggcgaaatgccagctcgtccgttggacatcgataccaacgagattgcacttaaagcgtggaagaaagaagcttccgcgttctaccgcaaagacaaagcacgcgttagccgtcgtctgtcaatggagtttatgttatctcaggcgaacaagtttgcgaattataaagcaatctggtttccgcaaaacatggattggcgtgggcgcgtgtacgctgtcccgatgttcaatcctcagggcaacgatatgacgaaaggcctgctgacctttgcgcagggtaaacccattggtgaagacggcttctattggctcaagattcatggcgcaaatacagctggagtggataaagtaccgtttccacaacgcatcaaatttgttgaggataaccatacgaatattatggaatgcgcgaaagcaccgctggaaaacacttggtgggcggaacaggactcgccgttctgttttctggcgttctgctttgagtatgctggcgcgatcaatcacggtctgtcgtacaactgtagcttgcctctggcatttgatggtagttgctccggcattcaacatttctcagcgatgttacgcgacgaaattggcggcaaagctgtgaatctcctcccatctgcggaagtgcaggatatttatcgtatcgtcagcgacaaagttaacgaggtactgaaacaagatctgattaacggtacctctaccaccttggaaacggtgactgataagaagacaggcgaaattaccgaacgcacgaaatacgggaccaaagttatggcacagtggtggttagaacacggtgtgaatcgtggcgtcacgaaacgctcggttatgactttggcgtatgggagcaaagagtttggattccgcgatcaagtgctgagtgacaccattcaaccggcgatcgataacggcaaaggtgacatgtttctgaatccgaatcaggctgctggttacatggcgaaactgatctggaacgcagtgtccgtcaccgtagtcgcagcagttgaggcgatgaactggctgaaaagtgcggcgaaattacttgctgctgaagtgaaggataagaagacggatacagttctgcgtggccgctgcgcagtacattgggtgactcccgacggcttccctgtgtggcaggaatacaagaagcctattcagacgcgcttgaacctgatgttcctcggtcagttccgcttacagcctaccattaacaccaacaaagatagcgagattgatgcacacaaacaggagtctggtatcgctcctaactttgtacacagccaagacggtaaccaccttcgtatgactgtagtgtgggcacacgagaagtacggaatcgaatcttttgcactgattcacgactccttcggtaccattccggctgacgctgcgaacctgttcaaagcagtgcgcgaaactatggtttcgacatatgagtcttgtgatgtactggctgatttctacgaccagttcgctgaccagttgcacgagtctcaattggacaaaatgccagcacttccggctaaaggtaacttgaacctccgtgacatcttaaaatcggacttcgcgttcgcg

SEQ ID NO: 44 - protein, 890 aa, synthetic construct
  REGION 1..890: note = Variant of RNA polymerase
MHHHHHHMNTINIAKNDFSDIELAAIPFNTLADHYGERLAREQLALEHESYEMGEARFRKMFERQLKAGEVADNAAAKPLITTLLPKMIARINDWFEEVKAKRGKRPTAFQFLQEIKPEAVAYITIKTTLACLTSADNTTVQAVASAIGRAIEDEARFGRIRDLEAKHFKKNVEEQLNKRVGHVYKKAFMQVVEADMLSKGLLGGEAWSSWHKEDSIHVGVRCIEMLIESTGMVSLHRQNAGVVGQDSETIELAPEYAEAIATRAGALAGISPMFQPCVVPPKPWTGITGGGYWAAGRKPLQLVRTRSLAALRRYEEVSMPEVIKAVNIAQNTAWRVNKKVLDVANAITQWQHCPVADVPAMDRGEMPARPLDIDTNEIALKAWKKEASAFYRKDKARVSRRLSMEFMLSQANKFANYKAIWFPQNMDWRGRVYAVPMFNPQGNDMTKGLLTFAQGKPIGEDGFYWLKIHGANTAGVDKVPFPQRIKFVEDNHTNIMECAKAPLENTWWAEQDSPFCFLAFCFEYAGAINHGLSYNCSLPLAFDGSCSGIQHFSAMLRDEIGGKAVNLLPSAEVQDIYRIVSDKVNEVLKQDLINGTSTTLETVTDKKTGEITERTKYGTKVMAQWWLEHGVNRGVTKRSVMTLAYGSKEFGFRDQVLSDTIQPAIDNGKGDMFLNPNQAAGYMAKLIWNAVSVTVVAAVEAMNWLKSAAKLLAAEVKDKKTDTVLRGRCAVHWVTPDGFPVWQEYKKPIQTRLNLMFLGQFRLQPTINTNKDSEIDAHKQESGIAPNFVHSQDGNHLRMTVVWAHEKYGIESFALIHDSFGTIPADAANLFKAVRETMVSTYESCDVLADFYDQFADQLHESQLDKMPALPAKGNLNLRDILKSDFAFA

SEQ ID NO: 45 - DNA, 2670 bp, synthetic construct
  misc_feature 1..2670: note = Variant of RNA polymerase
  source 1..2670: mol_type = other DNA
atgcaccatcaccatcaccatatgaacacgattaacatcgctaagaacgacttctctgacatcgaactggctgctatcccgttcaacactctggctgaccattacggtgagcgtttagctcgcgaacagttggcccttgagcatgagtcttacgagatgggtgaagcacgcttccgcaagatgtttgagcgtcaacttaaagctggtgaggttgcggataacgctgccgccaagcctctcatcactaccctactccctaagatgattgcacgcatcaacgactggtttgaggaagtgaaagctaagcgcggcaagcgcccgacagccttccagttcctgcaagaaatcaagccggaagccgtagcgtacatcaccattaagaccactctggcttgcctaaccagtgcggacaatacaaccgttcaggctgtagcaagcgcaatcggtcgggccattgaggacgaggctcgcttcggtcgtatccgtgaccttgaagctaagcacttcaagaaaaacgttgaggaacaactcaacaagcgcgtagggcacgtctacaagaaagcatttatgcaagttgtcgaggctgacatgctctctaagggtctactcggtggcgaggcgtggtcttcgtggcataaggaagactctattcatgtaggagtacgctgcatcgagatgctcattgagtcaaccggaatggttagcttacaccgccaaaatgctggcgtagtaggtcaagactctgagactatcgaactcgcacctgaatacgctgaggctatcgcaacccgtgcaggtgcgctggctggcatctctccgatgttccaaccttgcgtagttcctcctaagccgtggactggcattactggtggtggctattgggctgcggggcgcaaacccctgcagttagtacgtactcgcagtctggcggcgcttcgccgctatgaagaagtgtcgatgccggaggtcatcaaagcagtcaacattgcgcagaatacagcatggcgtgtgaacaagaaagttctcgacgtagcgaatgcaatcacccaatggcagcactgtccagtcgcggatgtgcctgcgatggatcgtggcgaaatgccagctcgtccgttggacatcgataccaacgagattgcacttaaagcgtggaagaaagaagcttccgcgttctaccgcaaagacaaagcacgcgttagccgtcgtctgtcaatggagtttatgttatctcaggcgaacaagtttgcgaattataaagcaatctggtttccgcaaaacatggattggcgtgggcgcgtgtacgctgtcccgatgttcaatcctcagggcaacgatatgacgaaaggcctgctgacctttgcgcagggtaaacccattggtgaagacggcttctattggctcaagattcatggcgcaaatacagctggagtggataaagtaccgtttccacaacgcatcaaatttgttgaggataaccatacgaatattatggaatgcgcgaaagcaccgctggaaaacacttggtgggcggaacaggactcgccgttctgttttctggcgttctgctttgagtatgctggcgtcatcaatcacggtctgtcgtacaactgtagcttgcctctggcatttgatggtagttgctccggcattcaacatttctcagcgatgttacgcgacgaaattggcggcaaagctgtgaatctcctcccatctgcggaagtgcaggatatttatcgtatcgtcagcgacaaagttaacgaggtactgaaacaagatctgattaacggtacctctaccaccgtggaaacggtgactgataagaagacaggcgaaattaccgaacgcacgaaatacgggaccaaagttatggcacagtggtggttagaacacggtgtgaatcgtggcgtcacgaaacgctcggttatgactttggcgtatgggagcaaagagtttggattccgcgatcaagtgctgagtgacaccattcaaccggcgatcgataacggcaaaggtgacatgtttctgaatccgaatcaggctgctggttacatggcgaaactgatctggaacgcagtgtccgtcaccgtagtcgcagcagttgaggcgatgaactggctgaaaagtgcggcgaaattacttgctgctgaagtgaaggataagaagacggatacagttctgcgtggccgctgcgcagtacattgggtgactcccgacggcttccctgtgtggcaggaatacaagaagcctattcagacgcgcttgaacctgatgttcctcggtcagttccgcttacagcctaccattaacaccaacaaagatagcgagattgatgcacacaaacaggagtctggtatcgctcctaactttgtacacagccaagacggtaaccaccttcgtatgactgtagtgtgggcacacgagaagtacggaatcgaatcttttgcactgattcacgactccttcggtaccattccggctgacgctgcgaacctgttcaaagcagtgcgcgaaactatggtttcgacatatgagtcttgtgatgtactggctgatttctacgaccagttcgctgaccagttgcacgagtctcaattggacaaaatgccagcacttccggctaaaggtaacttgaacctccgtgacatcttaaaatcggacttcgcgttcgcg

SEQ ID NO: 46 - protein, 890 aa, synthetic construct
  REGION 1..890: note = Variant of RNA polymerase
MHHHHHHMNTINIAKNDFSDIELAAIPFNTLADHYGERLAREQLALEHESYEMGEARFRKMFERQLKAGEVADNAAAKPLITTLLPKMIARINDWFEEVKAKRGKRPTAFQFLQEIKPEAVAYITIKTTLACLTSADNTTVQAVASAIGRAIEDEARFGRIRDLEAKHFKKNVEEQLNKRVGHVYKKAFMQVVEADMLSKGLLGGEAWSSWHKEDSIHVGVRCIEMLIESTGMVSLHRQNAGVVGQDSETIELAPEYAEAIATRAGALAGISPMFQPCVVPPKPWTGITGGGYWAAGRKPLQLVRTRSLAALRRYEEVSMPEVIKAVNIAQNTAWRVNKKVLDVANAITQWQHCPVADVPAMDRGEMPARPLDIDTNEIALKAWKKEASAFYRKDKARVSRRLSMEFMLSQANKFANYKAIWFPQNMDWRGRVYAVPMFNPQGNDMTKGLLTFAQGKPIGEDGFYWLKIHGANTAGVDKVPFPQRIKFVEDNHTNIMECAKAPLENTWWAEQDSPFCFLAFCFEYAGVINHGLSYNCSLPLAFDGSCSGIQHFSAMLRDEIGGKAVNLLPSAEVQDIYRIVSDKVNEVLKQDLINGTSTTVETVTDKKTGEITERTKYGTKVMAQWWLEHGVNRGVTKRSVMTLAYGSKEFGFRDQVLSDTIQPAIDNGKGDMFLNPNQAAGYMAKLIWNAVSVTVVAAVEAMNWLKSAAKLLAAEVKDKKTDTVLRGRCAVHWVTPDGFPVWQEYKKPIQTRLNLMFLGQFRLQPTINTNKDSEIDAHKQESGIAPNFVHSQDGNHLRMTVVWAHEKYGIESFALIHDSFGTIPADAANLFKAVRETMVSTYESCDVLADFYDQFADQLHESQLDKMPALPAKGNLNLRDILKSDFAFA

SEQ ID NO: 47 - DNA, 2670 bp, synthetic construct
  misc_feature 1..2670: note = Variant of RNA polymerase
  source 1..2670: mol_type = other DNA
atgcaccatcaccatcaccatatgaacacgattaacatcgctaagaacgacttctctgacatcgaactggctgctatcccgttcaacactctggctgaccattacggtgagcgtttagctcgcgaacagttggcccttgagcatgagtcttacgagatgggtgaagcacgcttccgcaagatgtttgagcgtcaacttaaagctggtgaggttgcggataacgctgccgccaagcctctcatcactaccctactccctaagatgattgcacgcatcaacgactggtttgaggaagtgaaagctaagcgcggcaagcgcccgacagccttccagttcctgcaagaaatcaagccggaagccgtagcgtacatcaccattaagaccactctggcttgcctaaccagtgcggacaatacaaccgttcaggctgtagcaagcgcaatcggtcgggccattgaggacgaggctcgcttcggtcgtatccgtgaccttgaagctaagcacttcaagaaaaacgttgaggaacaactcaacaagcgcgtagggcacgtctacaagaaagcatttatgcaagttgtcgaggctgacatgctctctaagggtctactcggtggcgaggcgtggtcttcgtggcataaggaagactctattcatgtaggagtacgctgcatcgagatgctcattgagtcaaccggaatggttagcttacaccgccaaaatgctggcgtagtaggtcaagactctgagactatcgaactcgcacctgaatacgctgaggctatcgcaacccgtgcaggtgcgctggctggcatctctccgatgttccaaccttgcgtagttcctcctaagccgtggactggcattactggtggtggctattgggctgcggggcgcaaacccctgcagttagtacgtactcgcagtctggcggcgcttcgccgctatgaagaagtgtcgatgccggaggtcatcaaagcagtcaacattgcgcagaatacagcatggcgtgtgaacaagaaagttctcgacgtagcgaatgcaatcacccaatggcagcactgtccagtcgcggatgtgcctgcgatggatcgtggcgaaatgccagctcgtccgttggacatcgataccaacgagattgcacttaaagcgtggaagaaagaagcttccgcgttctaccgcaaagacaaagcacgcgttagccgtcgtctgtcaatggagtttatgttatctcaggcgaacaagtttgcgaattataaagcaatctggtttccgcaaaacatggattggcgtgggcgcgtgtacgctgtcccgatgttcaatcctcagggcaacgatatgacgaaaggcctgctgacctttgcgcagacgaaacccattggtgaagacggcttctattggctcaagattcatggcgcaaatacagctggagtggataaagtaccgtttccacaacgcatcaaatttgttgaggataaccatacgaatattatggaatgcgcgaaagcaccgctggaaaacacttggtgggcggaacaggactcgccgttctgttttctggcgttctgctttgagtatgctggcgtcatcaatcacggtctgtcgtacaactgtagcttgcctctggcatttgatggtagttgctccggcattcaacatttctcagcgatgttacgcgacgaaattggcggcaaagctgtgaatctcctcccatctgcggaagtgcaggatatttatcgtatcgtcagcgacaaagttaacgaggtactgaaacaagatctgattaacggtacctctaccaccttggaaacggtgactgataagaagacaggcgaaattaccgaacgcacgaaatacgggaccaaagttatggcacagtggtggttagaacacggtgtgaatcgtggcgtcacgaaacgctcggttatgactttggcgtatgggagcaaagagtttggattccgcgatcaagtgctgagtgacaccattcaaccggcgatcgataacggcaaaggtgacatgtttctgaatccgaatcaggctgctggttacatggcgaaactgatctggaacgcagtgtccgtcaccgtagtcgcagcagttgaggcgatgaactggctgaaaagtgcggcgaaattacttgctgctgaagtgaaggataagaagacggatacagttctgcgtggccgctgcgcagtacattgggtgactcccgacggcttccctgtgtggcaggaatacaagaagcctattcagacgcgcttgaacctgatgttcctcggtcagttccgcttacagcctaccattaacaccaacaaagatagcgagattgatgcacacaaacaggagtctggtatcgctcctaactttgtacacagccaagacggtaaccaccttcgtatgactgtagtgtgggcacacgagaagtacggaatcgaatcttttgcactgattcacgactccttcggtaccattccggctgacgctgcgaacctgttcaaagcagtgcgcgaaactatggtttcgacatatgagtcttgtgatgtactggctgatttctacgaccagttcgctgaccagttgcacgagtctcaattggacaaaatgccagcacttccggctaaaggtaacttgaacctccgtgacatcttaaaatcggacttcgcgttcgcg

SEQ ID NO: 48 - protein, 890 aa, synthetic construct
  REGION 1..890: note = Variant of RNA polymerase
MHHHHHHMNTINIAKNDFSDIELAAIPFNTLADHYGERLAREQLALEHESYEMGEARFRKMFERQLKAGEVADNAAAKPLITTLLPKMIARINDWFEEVKAKRGKRPTAFQFLQEIKPEAVAYITIKTTLACLTSADNTTVQAVASAIGRAIEDEARFGRIRDLEAKHFKKNVEEQLNKRVGHVYKKAFMQVVEADMLSKGLLGGEAWSSWHKEDSIHVGVRCIEMLIESTGMVSLHRQNAGVVGQDSETIELAPEYAEAIATRAGALAGISPMFQPCVVPPKPWTGITGGGYWAAGRKPLQLVRTRSLAALRRYEEVSMPEVIKAVNIAQNTAWRVNKKVLDVANAITQWQHCPVADVPAMDRGEMPARPLDIDTNEIALKAWKKEASAFYRKDKARVSRRLSMEFMLSQANKFANYKAIWFPQNMDWRGRVYAVPMFNPQGNDMTKGLLTFAQTKPIGEDGFYWLKIHGANTAGVDKVPFPQRIKFVEDNHTNIMECAKAPLENTWWAEQDSPFCFLAFCFEYAGVINHGLSYNCSLPLAFDGSCSGIQHFSAMLRDEIGGKAVNLLPSAEVQDIYRIVSDKVNEVLKQDLINGTSTTLETVTDKKTGEITERTKYGTKVMAQWWLEHGVNRGVTKRSVMTLAYGSKEFGFRDQVLSDTIQPAIDNGKGDMFLNPNQAAGYMAKLIWNAVSVTVVAAVEAMNWLKSAAKLLAAEVKDKKTDTVLRGRCAVHWVTPDGFPVWQEYKKPIQTRLNLMFLGQFRLQPTINTNKDSEIDAHKQESGIAPNFVHSQDGNHLRMTVVWAHEKYGIESFALIHDSFGTIPADAANLFKAVRETMVSTYESCDVLADFYDQFADQLHESQLDKMPALPAKGNLNLRDILKSDFAFA

SEQ ID NO: 49 - DNA, 2670 bp, synthetic construct
  misc_feature 1..2670: note = Variant of RNA polymerase
  source 1..2670: mol_type = other DNA
atgcaccatcaccatcaccatatgaacacgattaacatcgctaagaacgacttctctgacatcgaactggctgctatcccgttcaacactctggctgaccattacggtgagcgtttagctcgcgaacagttggcccttgagcatgagtcttacgagatgggtgaagcacgcttccgcaagatgtttgagcgtcaacttaaagctggtgaggttgcggataacgctgccgccaagcctctcatcactaccctactccctaagatgattgcacgcatcaacgactggtttgaggaagtgaaagctaagcgcggcaagcgcccgacagccttccagttcctgcaagaaatcaagccggaagccgtagcgtacatcaccattaagaccactctggcttgcctaaccagtgcggacaatacaaccgttcaggctgtagcaagcgcaatcggtcgggccattgaggacgaggctcgcttcggtcgtatccgtgaccttgaagctaagcacttcaagaaaaacgttgaggaacaactcaacaagcgcgtagggcacgtctacaagaaagcatttatgcaagttgtcgaggctgacatgctctctaagggtctactcggtggcgaggcgtggtcttcgtggcataaggaagactctattcatgtaggagtacgctgcatcgagatgctcattgagtcaaccggaatggttagcttacaccgccaaaatgctggcgtagtaggtcaagactctgagactatcgaactcgcacctgaatacgctgaggctatcgcaacccgtgcaggtgcgctggctggcatctctccgatgttccaaccttgcgtagttcctcctaagccgtggactggcattactggtggtggctattgggctgcggggcgcaaacccctgcagttagtacgtactcgcagtctggcggcgcttcgccgctatgaagaagtgtcgatgccggaggtcatcaaagcagtcaacattgcgcagaatacagcatggcgtgtgaacaagaaagttctcgacgtagcgaatgcaatcacccaatggcagcactgtccagtcgcggatgtgcctgcgatggatcgtggcgaaatgccagctcgtccgttggacatcgataccaacgagattgcacttaaagcgtggaagaaagaagcttccgcgttctaccgcaaagacaaagcacgcgttagccgtcgtctgtcaatggagtttatgttatctcaggcgaacaagtttgcgaattataaagcaatctggtttccgcaaaacatggattggcgtgggcgcgtgtacgctgtcccgatgttcaatcctcagggcaacgatatgacgaaaggcctgctgacctttgcgcagggtaaacccattggtgaagacggcttctattggctcaagattcatggcgcaaatacagctggagtggataaagtaccgtttccacaacgcatcaaatttgttgaggataaccatacgaatattatggaatgcgcgaaagcaccgctggaaaacacttggtgggcggaacaggactcgccgttctgttttctggcgttctgctttgagtatgctggcgtcatcaatcacggtctgtcgtacaactgtagcttgcctctggcatttgatggtagttgctccggcattcaacatttctcagcgatgttacgcgacgaaattggcggcaaagctgtgaatctcctcccatctgcggaagtgcaggatatttatcgtatcgtcagcgacaaagttaacgaggtactgaaacaagatctgattaacggtacctctaccaccttggaaacggtgactgataagaagacaggcgaaattaccgaacgcacgaaatacgggaccaaagttatggcacagtggtggttagaacacggtgtgaatcgtggcgtcacgaaacgctcggttatgactttggcgtatgggagcaaagagtttggattccgcgatcaagtgctgagtgacaccattcaaccggcgatcgataacggcaaaggtgacatgtttctgaatccgaatcaggctgctggttacatggcgaaactgatctgggacgcagtgtccgtcaccgtagtcgcagcagttgaggcgatgaactggctgaaaagtgcggcgaaattacttgctgctgaagtgaaggataagaagacggatacagttctgcgtggccgctgcgcagtacattgggtgactcccgacggcttccctgtgtggcaggaatacaagaagcctattcagacgcgcttgaacctgatgttcctcggtcagttccgcttacagcctaccattaacaccaacaaagatagcgagattgatgcacacaaacaggagtctggtatcgctcctaactttgtacacagccaagacggtaaccaccttcgtatgactgtagtgtgggcacacgagaagtacggaatcgaatcttttgcactgattcacgactccttcggtaccattccggctgacgctgcgaacctgttcaaagcagtgcgcgaaactatggtttcgacatatgagtcttgtgatgtactggctgatttctacgaccagttcgctgaccagttgcacgagtctcaattggacaaaatgccagcacttccggctaaaggtaacttgaacctccgtgacatcttaaaatcggacttcgcgttcgcg

SEQ ID NO: 50 - protein, 890 aa, synthetic construct
  REGION 1..890: note = Variant of RNA polymerase
MHHHHHHMNTINIAKNDFSDIELAAIPFNTLADHYGERLAREQLALEHESYEMGEARFRKMFERQLKAGEVADNAAAKPLITTLLPKMIARINDWFEEVKAKRGKRPTAFQFLQEIKPEAVAYITIKTTLACLTSADNTTVQAVASAIGRAIEDEARFGRIRDLEAKHFKKNVEEQLNKRVGHVYKKAFMQVVEADMLSKGLLGGEAWSSWHKEDSIHVGVRCIEMLIESTGMVSLHRQNAGVVGQDSETIELAPEYAEAIATRAGALAGISPMFQPCVVPPKPWTGITGGGYWAAGRKPLQLVRTRSLAALRRYEEVSMPEVIKAVNIAQNTAWRVNKKVLDVANAITQWQHCPVADVPAMDRGEMPARPLDIDTNEIALKAWKKEASAFYRKDKARVSRRLSMEFMLSQANKFANYKAIWFPQNMDWRGRVYAVPMFNPQGNDMTKGLLTFAQGKPIGEDGFYWLKIHGANTAGVDKVPFPQRIKFVEDNHTNIMECAKAPLENTWWAEQDSPFCFLAFCFEYAGVINHGLSYNCSLPLAFDGSCSGIQHFSAMLRDEIGGKAVNLLPSAEVQDIYRIVSDKVNEVLKQDLINGTSTTLETVTDKKTGEITERTKYGTKVMAQWWLEHGVNRGVTKRSVMTLAYGSKEFGFRDQVLSDTIQPAIDNGKGDMFLNPNQAAGYMAKLIWDAVSVTVVAAVEAMNWLKSAAKLLAAEVKDKKTDTVLRGRCAVHWVTPDGFPVWQEYKKPIQTRLNLMFLGQFRLQPTINTNKDSEIDAHKQESGIAPNFVHSQDGNHLRMTVVWAHEKYGIESFALIHDSFGTIPADAANLFKAVRETMVSTYESCDVLADFYDQFADQLHESQLDKMPALPAKGNLNLRDILKSDFAFA

SEQ ID NO: 51 - DNA, 2670 bp, synthetic construct
  misc_feature 1..2670: note = Variant of RNA polymerase
  source 1..2670: mol_type = other DNA
atgcaccatcaccatcaccatatgaacacgattaacatcgctaagaacgacttctctgacatcgaactggctgctatcccgttcaacactctggctgaccattacggtgagcgtttagctcgcgaacagttggcccttgagcatgagtcttacgagatgggtgaagcacgcttccgcaagatgtttgagcgtcaacttaaagctggtgaggttgcggataacgctgccgccaagcctctcatcactaccctactccctaagatgattgcacgcatcaacgactggtttgaggaagtgaaagctaagcgcggcaagcgcccgacagccttccagttcctgcaagaaatcaagccggaagccgtagcgtacatcaccattaagaccactctggcttgcctaaccagtgcggacaatacaaccgttcaggctgtagcaagcgcaatcggtcgggccattgaggacgaggctcgcttcggtcgtatccgtgaccttgaagctaagcacttcaagaaaaacgttgaggaacaactcaacaagcgcgtagggcacgtctacaagaaagcatttatgcaagttgtcgaggctgacatgctctctaagggtctactcggtggcgaggcgtggtcttcgtggcataaggaagactctattcatgtaggagtacgctgcatcgagatgctcattgagtcaaccggaatggttagcttacaccgccaaaatgctggcgtagtaggtcaagactctgagactatcgaactcgcacctgaatacgctgaggctatcgcaacccgtgcaggtgcgctggctggcatctctccgatgttccaaccttgcgtagttcctcctaagccgtggactggcattactggtggtggctattgggctgcggggcgcaaacccctgcagttagtacgtactcgcagtctggcggcgcttcgccgctatgaagaagtgtcgatgccggaggtcatcaaagcagtcaacattgcgcagaatacagcatggcgtgtgaacaagaaagttctcgacgtagcgaatgcaatcacccaatggcagcactgtccagtcgcggatgtgcctgcgatggatcgtggcgaaatgccagctcgtccgttggacatcgataccaacgagattgcacttaaagcgtggaagaaagaagcttccgcgttctaccgcaaagacaaagcacgcgttagccgtcgtctgtcaatggagtttatgttatctcaggcgaacaagtttgcgaattataaagcaatctggtttccgcaaaacatggattggcgtgggcgcgtgtacgctgtcccgatgttcaatcctcagggcaacgatatgacgaaaggcctgctgacctttgcgcagggtaaacccattggtgaagacggcttctattggctcaagattcatggcgcaaatacagctggagtggataaagtaccgtttccacaacgcatcaaatttgttgaggataaccatacgaatattatggaatgcgcgaaagcaccgctggaaaacacttggtgggcggaacaggactcgccgttctgttttctggcgttctgctttgagtatgctggcgtcatcaatcacggtctgtcgtacaactgtagcttgcctctggcatttgatggtagttgctccggcattcaacatttctcagcgatgttacgcgacgaaattggcggcaaagctgtgaatctcctcccatctgcggaagtgcaggatatttatcgtatcgtcagcgacaaagttaacgaggtactgaaacaagatctgattaacggtacctctaccaccttggaaacggtgactgataagaagacaggcgaaattaccgaacgcacgaaatacgggaccaaagttatggcacagtggtggttagaacacggtgtgaatcgtggcgtcacgaaacgctcggttatgactttggcgtatgggagcaaagagtttggattccgcgatcaagtgctgagtgacaccattcaaccggcgatcgataacggcaaaggtgacatgtttctgaatccgaatcaggctgctggttacatggcgaaactgatctggaacgcagtgtccggtaccgtagtcgcagcagttgaggcgatgaactggctgaaaagtgcggcgaaattacttgctgctgaagtgaaggataagaagacggatacagttctgcgtggccgctgcgcagtacattgggtgactcccgacggcttccctgtgtggcaggaatacaagaagcctattcagacgcgcttgaacctgatgttcctcggtcagttccgcttacagcctaccattaacaccaacaaagatagcgagattgatgcacacaaacaggagtctggtatcgctcctaactttgtacacagccaagacggtaaccaccttcgtatgactgtagtgtgggcacacgagaagtacggaatcgaatcttttgcactgattcacgactccttcggtaccattccggctgacgctgcgaacctgttcaaagcagtgcgcgaaactatggtttcgacatatgagtcttgtgatgtactggctgatttctacgaccagttcgctgaccagttgcacgagtctcaattggacaaaatgccagcacttccggctaaaggtaacttgaacctccgtgacatcttaaaatcggacttcgcgttcgcg

SEQ ID NO: 52 - protein, 890 aa, synthetic construct
  REGION 1..890: note = Variant of RNA polymerase
MHHHHHHMNTINIAKNDFSDIELAAIPFNTLADHYGERLAREQLALEHESYEMGEARFRKMFERQLKAGEVADNAAAKPLITTLLPKMIARINDWFEEVKAKRGKRPTAFQFLQEIKPEAVAYITIKTTLACLTSADNTTVQAVASAIGRAIEDEARFGRIRDLEAKHFKKNVEEQLNKRVGHVYKKAFMQVVEADMLSKGLLGGEAWSSWHKEDSIHVGVRCIEMLIESTGMVSLHRQNAGVVGQDSETIELAPEYAEAIATRAGALAGISPMFQPCVVPPKPWTGITGGGYWAAGRKPLQLVRTRSLAALRRYEEVSMPEVIKAVNIAQNTAWRVNKKVLDVANAITQWQHCPVADVPAMDRGEMPARPLDIDTNEIALKAWKKEASAFYRKDKARVSRRLSMEFMLSQANKFANYKAIWFPQNMDWRGRVYAVPMFNPQGNDMTKGLLTFAQGKPIGEDGFYWLKIHGANTAGVDKVPFPQRIKFVEDNHTNIMECAKAPLENTWWAEQDSPFCFLAFCFEYAGVINHGLSYNCSLPLAFDGSCSGIQHFSAMLRDEIGGKAVNLLPSAEVQDIYRIVSDKVNEVLKQDLINGTSTTLETVTDKKTGEITERTKYGTKVMAQWWLEHGVNRGVTKRSVMTLAYGSKEFGFRDQVLSDTIQPAIDNGKGDMFLNPNQAAGYMAKLIWNAVSGTVVAAVEAMNWLKSAAKLLAAEVKDKKTDTVLRGRCAVHWVTPDGFPVWQEYKKPIQTRLNLMFLGQFRLQPTINTNKDSEIDAHKQESGIAPNFVHSQDGNHLRMTVVWAHEKYGIESFALIHDSFGTIPADAANLFKAVRETMVSTYESCDVLADFYDQFADQLHESQLDKMPALPAKGNLNLRDILKSDFAFA

SEQ ID NO: 53 - DNA, 2670 bp, synthetic construct
  misc_feature 1..2670: note = Variant of RNA polymerase
  source 1..2670: mol_type = other DNA
atgcaccatcaccatcaccatatgaacacgattaacatcgctaagaacgacttctctgacatcgaactggctgctatcccgttcaacactctggctgaccattacggtgagcgtttagctcgcgaacagttggcccttgagcatgagtcttacgagatgggtgaagcacgcttccgcaagatgtttgagcgtcaacttaaagctggtgaggttgcggataacgctgccgccaagcctctcatcactaccctactccctaagatgattgcacgcatcaacgactggtttgaggaagtgaaagctaagcgcggcaagcgcccgacagccttccagttcctgcaagaaatcaagccggaagccgtagcgtacatcaccattaagaccactctggcttgcctaaccagtgcggacaatacaaccgttcaggctgtagcaagcgcaatcggtcgggccattgaggacgaggctcgcttcggtcgtatccgtgaccttgaagctaagcacttcaagaaaaacgttgaggaacaactcaacaagcgcgtagggcacgtctacaagaaagcatttatgcaagttgtcgaggctgacatgctctctaagggtctactcggtggcgaggcgtggtcttcgtggcataaggaagactctattcatgtaggagtacgctgcatcgagatgctcattgagtcaaccggaatggttagcttacaccgccaaaatgctggcgtagtaggtcaagactctgagactatcgaactcgcacctgaatacgctgaggctatcgcaacccgtgcaggtgcgctggctggcatctctccgatgttccaaccttgcgtagttcctcctaagccgtggactggcattactggtggtggctattgggctgcggggcgcaaacccctgcagttagtacgtactcgcagtctggcggcgcttcgccgctatgaagaagtgtcgatgccggaggtcatcaaagcagtcaacattgcgcagaatacagcatggcgtgtgaacaagaaagttctcgacgtagcgaatgcaatcacccaatggcagcactgtccagtcgcggatgtgcctgcgatggatcgtggcgaaatgccagctcgtccgttggacatcgataccaacgagattgcacttaaagcgtggaagaaagaagcttccgcgttctaccgcaaagacaaagcacgcgttagccgtcgtctgtcaatggagtttatgttatctcaggcgaacaagtttgcgaattataaagcaatctggtttccgcaaaacatggattggcgtgggcgcgtgtacgctgtcccgatgttcaatcctcagggcaacgatatgacgaaaggcctgctgacctttgcgcagggtaaacccattggtgaagacggcttctattggctcaagattcatggcgcaaatacagctggagtggataaagtaccgtttccacaacgcatcaaatttgttgaggataaccatacgaatattatggaatgcgcgaaagcaccgctggaaaacacttggtgggcggaacaggactcgccgttctgttttctggcgttctgctttgagtatgctggcgtcatcaatcacggtctgtcgtacaactgtagcttgcctctggcatttgatggtagttgctccggcattcaacatttctcagcgatgttacgcgacgaaattggcggcaaagctgtgaatctcctcccatctgcggaagtgcaggatatttatcgtatcgtcagcgacaaagttaacgaggtactgaaacaagatctgattaacggtacctctaccaccttggaaacggtgactgataagaagacaggcgaaattacccagcgcacgaaatacgggaccaaagttatggcacagtggtggttagaacacggtgtgaatcgtggcgtcacgaaacgctcggttatgactttggcgtatgggagcaaagagtttggattccgcgatcaagtgctgagtgacaccattcaaccggcgatcgataacggcaaaggtgacatgtttctgaatccgaatcaggctgctggttacatggcgaaactgatctggaacgcagtgtccgtcaccgtagtcgcagcagttgaggcgatgaactggctgaaaagtgcggcgaaattacttgctgctgaagtgaaggataagaagacggatacagttctgcgtggccgctgcgcagtacattgggtgactcccgacggcttccctgtgtggcaggaatacaagaagcctattcagacgcgcttgaacctgatgttcctcggtcagttccgcttacagcctaccattaacaccaacaaagatagcgagattgatgcacacaaacaggagtctggtatcgctcctaactttgtacacagccaagacggtaaccaccttcgtatgactgtagtgtgggcacacgagaagtacggaatcgaatcttttgcactgattcacgactccttcggtaccattccggctgacgctgcgaacctgttcaaagcagtgcgcgaaactatggtttcgacatatgagtcttgtgatgtactggctgatttctacgaccagttcgctgaccagttgcacgagtctcaattggacaaaatgccagcacttccggctaaaggtaacttgaacctccgtgacatcttaaaatcggacttcgcgttcgcg

SEQ ID NO: 54 - protein, 890 aa, synthetic construct
  REGION 1..890: note = Variant of RNA polymerase
MHHHHHHMNTINIAKNDFSDIELAAIPFNTLADHYGERLAREQLALEHESYEMGEARFRKMFERQLKAGEVADNAAAKPLITTLLPKMIARINDWFEEVKAKRGKRPTAFQFLQEIKPEAVAYITIKTTLACLTSADNTTVQAVASAIGRAIEDEARFGRIRDLEAKHFKKNVEEQLNKRVGHVYKKAFMQVVEADMLSKGLLGGEAWSSWHKEDSIHVGVRCIEMLIESTGMVSLHRQNAGVVGQDSETIELAPEYAEAIATRAGALAGISPMFQPCVVPPKPWTGITGGGYWAAGRKPLQLVRTRSLAALRRYEEVSMPEVIKAVNIAQNTAWRVNKKVLDVANAITQWQHCPVADVPAMDRGEMPARPLDIDTNEIALKAWKKEASAFYRKDKARVSRRLSMEFMLSQANKFANYKAIWFPQNMDWRGRVYAVPMFNPQGNDMTKGLLTFAQGKPIGEDGFYWLKIHGANTAGVDKVPFPQRIKFVEDNHTNIMECAKAPLENTWWAEQDSPFCFLAFCFEYAGVINHGLSYNCSLPLAFDGSCSGIQHFSAMLRDEIGGKAVNLLPSAEVQDIYRIVSDKVNEVLKQDLINGTSTTLETVTDKKTGEITQRTKYGTKVMAQWWLEHGVNRGVTKRSVMTLAYGSKEFGFRDQVLSDTIQPAIDNGKGDMFLNPNQAAGYMAKLIWNAVSVTVVAAVEAMNWLKSAAKLLAAEVKDKKTDTVLRGRCAVHWVTPDGFPVWQEYKKPIQTRLNLMFLGQFRLQPTINTNKDSEIDAHKQESGIAPNFVHSQDGNHLRMTVVWAHEKYGIESFALIHDSFGTIPADAANLFKAVRETMVSTYESCDVLADFYDQFADQLHESQLDKMPALPAKGNLNLRDILKSDFAFA

SEQ ID NO: 55 - DNA, 2670 bp, synthetic construct
  misc_feature 1..2670: note = Variant of RNA polymerase
  source 1..2670: mol_type = other DNA
atgcaccatcaccatcaccatatgaacacgattaacatcgctaagaacgacttctctgacatcgaactggctgctatcccgttcaacactctggctgaccattacggtgagcgtttagctcgcgaacagttggcccttgagcatgagtcttacgagatgggtgaagcacgcttccgcaagatgtttgagcgtcaacttaaagctggtgaggttgcggataacgctgccgccaagcctctcatcactaccctactccctaagatgattgcacgcatcaacgactggtttgaggaagtgaaagctaagcgcggcaagcgcccgacagccttccagttcctgcaagaaatcaagccggaagccgtagcgtacatcaccattaagaccactctggcttgcctaaccagtgcggacaatacaaccgttcaggctgtagcaagcgcaatcggtcgggccattgaggacgaggctcgcttcggtcgtatccgtgaccttgaagctaagcacttcaagaaaaacgttgaggaacaactcaacaagcgcgtagggcacgtctacaagaaagcatttatgcaagttgtcgaggctgacatgctctctaagggtctactcggtggcgaggcgtggtcttcgtggcataaggaagactctattcatgtaggagtacgctgcatcgagatgctcattgagtcaaccggaatggttagcttacaccgccaaaatgctggcgtagtaggtcaagactctgagactatcgaactcgcacctgaatacgctgaggctatcgcaacccgtgcaggtgcgctggctggcatctctccgatgttccaaccttgcgtagttcctcctaagccgtggactggcattactggtggtggctattgggctgcggggcgcaaacccctgcagttagtacgtactcgcagtctggcggcgcttcgccgctatgaagaagtgtcgatgccggaggtcatcaaagcagtcaacattgcgcagaatacagcatggcgtgtgaacaagaaagttctcgacgtagcgaatgcaatcacccaatggcagcactgtccagtcgcggatgtgcctgcgatggatcgtggcgaaatgccagctcgtccgttggacatcgataccaacgagattgcacttaaagcgtggaagaaagaagcttccgcgttctaccgcaaagacaaagcacgcgttagccgtcgtctgtcaatggagtttatgttatctcaggcgaacaagtttgcgaattataaagcaatctggtttccgcaaaacatggattggcgtgggcgcgtgtacgctgtcccgatgttcaatcctcagggcaacgatatgacgaaaggcctgctgacctttgcgcagggtaaacccattggtgaagacggcttctattggctcaagattcatggcgcaaatacagctggagtggataaagtaccgtttccacaacgcatcaaatttgttgaggataaccatacgaatattatggaatgcgcgaaagcaccgctggaaaacacttggtgggcggaacaggactcgccgttctgttttctggcgttctgctttgagtatgctggcgtcatcaatcacggtctgtcgtacaactgtagcttgcctctggcatttgatggtagttgctccggcctgcaacatttctcagcgatgttacgcgacgaaattggcggcaaagctgtgaatctcctcccatctgcggaagtgcaggatatttatcgtatcgtcagcgacaaagttaacgaggtactgaaacaagatctgattaacggtacctctaccaccttggaaacggtgactgataagaagacaggcgaaattaccgaacgcacgaaatacgggaccaaagttatggcacagtggtggttagaacacggtgtgaatcgtggcgtcacgaaacgctcggttatgactttggcgtatgggagcaaagagtttggattccgcgatcaagtgctgagtgacaccattcaaccggcgatcgataacggcaaaggtgacatgtttctgaatccgaatcaggctgctggttacatggcgaaactgatctggaacgcagtgtccgtcaccgtagtcgcagcagttgaggcgatgaactggctgaaaagtgcggcgaaattacttgctgctgaagtgaaggataagaagacggatacagttctgcgtggccgctgcgcagtacattgggtgactcccgacggcttccctgtgtggcaggaatacaagaagcctattcagacgcgcttgaacctgatgttcctcggtcagttccgcttacagcctaccattaacaccaacaaagatagcgagattgatgcacacaaacaggagtctggtatcgctcctaactttgtacacagccaagacggtaaccaccttcgtatgactgtagtgtgggcacacgagaagtacggaatcgaatcttttgcactgattcacgactccttcggtaccattccggctgacgctgcgaacctgttcaaagcagtgcgcgaaactatggtttcgacatatgagtcttgtgatgtactggctgatttctacgaccagttcgctgaccagttgcacgagtctcaattggacaaaatgccagcacttccggctaaaggtaacttgaacctccgtgacatcttaaaatcggacttcgcgttcgcg

SEQ ID NO: 56 - protein, 890 aa, synthetic construct
  REGION 1..890: note = Variant of RNA polymerase
MHHHHHHMNTINIAKNDFSDIELAAIPFNTLADHYGERLAREQLALEHESYEMGEARFRKMFERQLKAGEVADNAAAKPLITTLLPKMIARINDWFEEVKAKRGKRPTAFQFLQEIKPEAVAYITIKTTLACLTSADNTTVQAVASAIGRAIEDEARFGRIRDLEAKHFKKNVEEQLNKRVGHVYKKAFMQVVEADMLSKGLLGGEAWSSWHKEDSIHVGVRCIEMLIESTGMVSLHRQNAGVVGQDSETIELAPEYAEAIATRAGALAGISPMFQPCVVPPKPWTGITGGGYWAAGRKPLQLVRTRSLAALRRYEEVSMPEVIKAVNIAQNTAWRVNKKVLDVANAITQWQHCPVADVPAMDRGEMPARPLDIDTNEIALKAWKKEASAFYRKDKARVSRRLSMEFMLSQANKFANYKAIWFPQNMDWRGRVYAVPMFNPQGNDMTKGLLTFAQGKPIGEDGFYWLKIHGANTAGVDKVPFPQRIKFVEDNHTNIMECAKAPLENTWWAEQDSPFCFLAFCFEYAGVINHGLSYNCSLPLAFDGSCSGLQHFSAMLRDEIGGKAVNLLPSAEVQDIYRIVSDKVNEVLKQDLINGTSTTLETVTDKKTGEITERTKYGTKVMAQWWLEHGVNRGVTKRSVMTLAYGSKEFGFRDQVLSDTIQPAIDNGKGDMFLNPNQAAGYMAKLIWNAVSVTVVAAVEAMNWLKSAAKLLAAEVKDKKTDTVLRGRCAVHWVTPDGFPVWQEYKKPIQTRLNLMFLGQFRLQPTINTNKDSEIDAHKQESGIAPNFVHSQDGNHLRMTVVWAHEKYGIESFALIHDSFGTIPADAANLFKAVRETMVSTYESCDVLADFYDQFADQLHESQLDKMPALPAKGNLNLRDILKSDFAFA

SEQ ID NO: 57 - DNA, 2670 bp, synthetic construct
  misc_feature 1..2670: note = Variant of RNA polymerase
  source 1..2670: mol_type = other DNA
atgcaccatcaccatcaccatatgaacacgattaacatcgctaagaacgacttctctgacatcgaactggctgctatcccgttcaacactctggctgaccattacggtgagcgtttagctcgcgaacagttggcccttgagcatgagtcttacgagatgggtgaagcacgcttccgcaagatgtttgagcgtcaacttaaagctggtgaggttgcggataacgctgccgccaagcctctcatcactaccctactccctaagatgattgcacgcatcaacgactggtttgaggaagtgaaagctaagcgcggcaagcgcccgacagccttccagttcctgcaagaaatcaagccggaagccgtagcgtacatcaccattaagaccactctggcttgcctaaccagtgcggacaatacaaccgttcaggctgtagcaagcgcaatcggtcgggccattgaggacgaggctcgcttcggtcgtatccgtgaccttgaagctaagcacttcaagaaaaacgttgaggaacaactcaacaagcgcgtagggcacgtctacaagaatgcatttatgcaagttgtcgaggctgacatgctctctaagggtctactcggtggcgaggcgtggtcttcgtggcataaggaagactctattcatgtaggagtacgctgcatcgagatgctcattgagtcaaccggaatggttagcttacaccgccaaaatgctggcgtagtaggtcaagactctgagactatcgaactcgcacctgaatacgctgaggctatcgcaacccgtgcaggtgcgctggctggcatctctccgatgttccaaccttgcgtagttcctcctaagccgtggactggcattactggtggtggctattgggctgcggggcgcaaacccctgcagttagtacgtactcgcagtctggcggcgcttcgccgctatgaagaagtgtcgatgccggaggtcatcaaagcagtcaacattgcgcagaatacagcatggcgtgtgaacaagaaagttctcgacgtagcgaatgcaatcacccaatggcagcactgtccagtcgcggatgtgcctgcgatggatcgtggcgaaatgccagctcgtccgttggacatcgataccaacgagattgcacttaaagcgtggaagaaagaagcttccgcgttctaccgcaaagacaaagcacgcgttagccgtcgtctgtcaatggagtttatgttatctcaggcgaacaagtttgcgaattataaagcaatctggtttccgcaaaacatggattggcgtgggcgcgtgtacgctgtcccgatgttcaatcctcagggcaacgatatgacgaaaggcctgctgacctttgcgcagggtaaacccattggtgaagacggcttctattggctcaagattcatggcgcaaatacagctggagtggataaagtaccgtttccacaacgcatcaaatttgttgaggataaccatacgaatattatggaatgcgcgaaagcaccgctggaaaacacttggtgggcggaacaggactcgccgttctgttttctggcgttctgctttgagtatgctggcgtcatcaatcacggtctgtcgtacaactgtagcttgcctctggcatttgatggtagttgctccggcattcaacatttctcagcgatgttacgcgacgaaattggcggcaaagctgtgaatctcctcccatctgcggaagtgcaggatatttatcgtatcgtcagcgacaaagttaacgaggtactgaaacaagatctgattaacggtacctctaccaccttggaaacggtgactgataagaagacaggcgaaattaccgaacgcacgaaatacgggaccaaagttatggcacagtggtggttagaacacggtgtgaatcgtggcgtcacgaaacgctcggttatgactttggcgtatgggagcaaagagtttggattccgcgatcaagtgctgagtgacaccattcaaccggcgatcgataacggcaaaggtgacatgtttctgaatccgaatcaggctgctggttacatggcgaaactgatctggaacgcagtgtccgtcaccgtagtcgcagcagttgaggcgatgaactggctgaaaagtgcggcgaaattacttgctgctgaagtgaaggataagaagacggatacagttctgcgtggccgctgcgcagtacattgggtgactcccgacggcttccctgtgtggcaggaatacaagaagcctattcagacgcgcttgaacctgatgttcctcggtcagttccgcttacagcctaccattaacaccaacaaagatagcgagattgatgcacacaaacaggagtctggtatcgctcctaactttgtacacagccaagacggtaaccaccttcgtatgactgtagtgtgggcacacgagaagtacggaatcgaatcttttgcactgattcacgactccttcggtaccattccggctgacgctgcgaacctgttcaaagcagtgcgcgaaactatggtttcgacatatgagtcttgtgatgtactggctgatttctacgaccagttcgctgaccagttgcacgagtctcaattggacaaaatgccagcacttccggctaaaggtaacttgaacctccgtgacatcttaaaatcggacttcgcgttcgcg

SEQ ID NO: 58 - protein, 890 aa, synthetic construct
  REGION 1..890: note = Variant of RNA polymerase
MHHHHHHMNTINIAKNDFSDIELAAIPFNTLADHYGERLAREQLALEHESYEMGEARFRKMFERQLKAGEVADNAAAKPLITTLLPKMIARINDWFEEVKAKRGKRPTAFQFLQEIKPEAVAYITIKTTLACLTSADNTTVQAVASAIGRAIEDEARFGRIRDLEAKHFKKNVEEQLNKRVGHVYKNAFMQVVEADMLSKGLLGGEAWSSWHKEDSIHVGVRCIEMLIESTGMVSLHRQNAGVVGQDSETIELAPEYAEAIATRAGALAGISPMFQPCVVPPKPWTGITGGGYWAAGRKPLQLVRTRSLAALRRYEEVSMPEVIKAVNIAQNTAWRVNKKVLDVANAITQWQHCPVADVPAMDRGEMPARPLDIDTNEIALKAWKKEASAFYRKDKARVSRRLSMEFMLSQANKFANYKAIWFPQNMDWRGRVYAVPMFNPQGNDMTKGLLTFAQGKPIGEDGFYWLKIHGANTAGVDKVPFPQRIKFVEDNHTNIMECAKAPLENTWWAEQDSPFCFLAFCFEYAGVINHGLSYNCSLPLAFDGSCSGIQHFSAMLRDEIGGKAVNLLPSAEVQDIYRIVSDKVNEVLKQDLINGTSTTLETVTDKKTGEITERTKYGTKVMAQWWLEHGVNRGVTKRSVMTLAYGSKEFGFRDQVLSDTIQPAIDNGKGDMFLNPNQAAGYMAKLIWNAVSVTVVAAVEAMNWLKSAAKLLAAEVKDKKTDTVLRGRCAVHWVTPDGFPVWQEYKKPIQTRLNLMFLGQFRLQPTINTNKDSEIDAHKQESGIAPNFVHSQDGNHLRMTVVWAHEKYGIESFALIHDSFGTIPADAANLFKAVRETMVSTYESCDVLADFYDQFADQLHESQLDKMPALPAKGNLNLRDILKSDFAFA

SEQ ID NO: 59 - DNA, 2670 bp, synthetic construct
  misc_feature 1..2670: note = Variant of RNA polymerase
  source 1..2670: mol_type = other DNA
atgcaccatcaccatcaccatatgaacacgattaacatcgctaagaacgacttctctgacatcgaactggctgctatcccgttcaacactctggctgaccattacggtgagcgtttagctcgcgaacagttggcccttgagcatgagtcttacgagatgggtgaagcagctttccgcaagatgtttgagcgtcaacttaaagctggtgaggttgcggataacgctgccgccaagcctctcatcactaccctactccctaagatgattgcacgcatcaacgactggtttgaggaagtgaaagctaagcgcggcaagcgcccgacagccttccagttcctgcaagaaatcaagccggaagccgtagcgtacatcaccattaagaccactctggcttgcctaaccagtgcggacaatacaaccgttcaggctgtagcaagcgcaatcggtcgggccattgaggacgaggctcgcttcggtcgtatccgtgaccttgaagctaagcacttcaagaaaaacgttgaggaacaactcaacaagcgcgtagggcacgtctacaagaaagcatttatgcaagttgtcgaggctgacatgctctctaagggtctactcggtggcgaggcgtggtcttcgtggcataaggaagactctattcatgtaggagtacgctgcatcgagatgctcattgagtcaaccggaatggttagcttacaccgccaaaatgctggcgtagtaggtcaagactctgagactatcgaactcgcacctgaatacgctgaggctatcgcaacccgtgcaggtgcgctggctggcatctctccgatgttccaaccttgcgtagttcctcctaagccgtggactggcattactggtggtggctattgggctgcggggcgcaaacccctgcagttagtacgtactcgcagtctggcggcgcttcgccgctatgaagaagtgtcgatgccggaggtcatcaaagcagtcaacattgcgcagaatacagcatggcgtgtgaacaagaaagttctcgacgtagcgaatgcaatcacccaatggcagcactgtccagtcgcggatgtgcctgcgatggatcgtggcgaaatgccagctcgtccgttggacatcgataccaacgagattgcacttaaagcgtggaagaaagaagcttccgcgttctaccgcaaagacaaagcacgcgttagccgtcgtctgtcaatggagtttatgttatctcaggcgaacaagtttgcgaattataaagcaatctggtttccgcaaaacatggattggcgtgggcgcgtgtacgctgtcccgatgttcaatcctcagggcaacgatatgacgaaaggcctgctgacctttgcgcagggtaaacccattggtgaagacggcttctattggctcaagattcatggcgcaaatacagctggagtggataaagtaccgtttccacaacgcatcaaatttgttgaggataaccatacgaatattatggaatgcgcgaaagcaccgctggaaaacacttggtgggcggaacaggactcgccgttctgttttctggcgttctgctttgagtatgctggcgtcatcaatcacggtctgtcgtacaactgtagcttgcctctggcatttgatggtagttgctccggcattcaacatttctcagcgatgttacgcgacgaaattggcggcaaagctgtgaatctcctcccatctgcggaagtgcaggatatttatcgtatcgtcagcgacaaagttaacgaggtactgaaacaagatctgattaacggtacctctaccaccttggaaacggtgactgataagaagacaggcgaaattaccgaacgcacgaaatacgggaccaaagttatggcacagtggtggttagaacacggtgtgaatcgtggcgtcacgaaacgctcggttatgactttggcgtatgggagcaaagagtttggattccgcgatcaagtgctgagtgacaccattcaaccggcgatcgataacggcaaaggtgacatgtttctgaatccgaatcaggctgctggttacatggcgaaactgatctggaacgcagtgtccgtcaccgtagtcgcagcagttgaggcgatgaactggctgaaaagtgcggcgaaattacttgctgctgaagtgaaggataagaagacggatacagttctgcgtggccgctgcgcagtacattgggtgactcccgacggcttccctgtgtggcaggaatacaagaagcctattcagacgcgcttgaacctgatgttcctcggtcagttccgcttacagcctaccattaacaccaacaaagatagcgagattgatgcacacaaacaggagtctggtatcgctcctaactttgtacacagccaagacggtaaccaccttcgtatgactgtagtgtgggcacacgagaagtacggaatcgaatcttttgcactgattcacgactccttcggtaccattccggctgacgctgcgaacctgttcaaagcagtgcgcgaaactatggtttcgacatatgagtcttgtgatgtactggctgatttctacgaccagttcgctgaccagttgcacgagtctcaattggacaaaatgccagcacttccggctaaaggtaacttgaacctccgtgacatcttaaaatcggacttcgcgttcgcg

SEQ ID NO: 60 - protein, 890 aa, synthetic construct
  REGION 1..890: note = Variant of RNA polymerase
MHHHHHHMNTINIAKNDFSDIELAAIPFNTLADHYGERLAREQLALEHESYEMGEAAFRKMFERQLKAGEVADNAAAKPLITTLLPKMIARINDWFEEVKAKRGKRPTAFQFLQEIKPEAVAYITIKTTLACLTSADNTTVQAVASAIGRAIEDEARFGRIRDLEAKHFKKNVEEQLNKRVGHVYKKAFMQVVEADMLSKGLLGGEAWSSWHKEDSIHVGVRCIEMLIESTGMVSLHRQNAGVVGQDSETIELAPEYAEAIATRAGALAGISPMFQPCVVPPKPWTGITGGGYWAAGRKPLQLVRTRSLAALRRYEEVSMPEVIKAVNIAQNTAWRVNKKVLDVANAITQWQHCPVADVPAMDRGEMPARPLDIDTNEIALKAWKKEASAFYRKDKARVSRRLSMEFMLSQANKFANYKAIWFPQNMDWRGRVYAVPMFNPQGNDMTKGLLTFAQGKPIGEDGFYWLKIHGANTAGVDKVPFPQRIKFVEDNHTNIMECAKAPLENTWWAEQDSPFCFLAFCFEYAGVINHGLSYNCSLPLAFDGSCSGIQHFSAMLRDEIGGKAVNLLPSAEVQDIYRIVSDKVNEVLKQDLINGTSTTLETVTDKKTGEITERTKYGTKVMAQWWLEHGVNRGVTKRSVMTLAYGSKEFGFRDQVLSDTIQPAIDNGKGDMFLNPNQAAGYMAKLIWNAVSVTVVAAVEAMNWLKSAAKLLAAEVKDKKTDTVLRGRCAVHWVTPDGFPVWQEYKKPIQTRLNLMFLGQFRLQPTINTNKDSEIDAHKQESGIAPNFVHSQDGNHLRMTVVWAHEKYGIESFALIHDSFGTIPADAANLFKAVRETMVSTYESCDVLADFYDQFADQLHESQLDKMPALPAKGNLNLRDILKSDFAFA

SEQ ID NO: 61 - DNA, 2670 bp, synthetic construct
  misc_feature 1..2670: note = Variant of RNA polymerase
  source 1..2670: mol_type = other DNA
atgcaccatcaccatcaccatatgaacacgattaacatcgctaagaacgacttctctgacatcgaactggctgctatcccgttcaacactctggctgaccattacggtgagcgtttagctcgcgaacagttggcccttgagcatgagtcttacgagatgggtgaagcacgcttccgcaagatgtttgagcgtcaacttaaagctggtgaggttgcggataacgctgccgccaagcctctcatcactaccctactccctaagatgattgcacgcatcaacgactggtttgaggaagtgaaagctaagcgcggcaagcgcccgacagccttccagttcctgcaagaaatcaagccggaagccgtagcgtacatcaccattaagaccactctggcttgcctaaccagtgcggacaatacaaccgttcaggctgtagcaagcgcaatcggtcgggccattgaggacgaggctcgcttcggtcgtatccgtgaccttgaagctaagacgttcaagaaaaacgttgaggaacaactcaacaagcgcgtagggcacgtctacaagaaagcatttatgcaagttgtcgaggctgacatgctctctaagggtctactcggtggcgaggcgtggtcttcgtggcataaggaagactctattcatgtaggagtacgctgcatcgagatgctcattgagtcaaccggaatggttagcttacaccgccaaaatgctggcgtagtaggtcaagactctgagactatcgaactcgcacctgaatacgctgaggctatcgcaacccgtgcaggtgcgctggctggcatctctccgatgttccaaccttgcgtagttcctcctaagccgtggactggcattactggtggtggctattgggctgcggggcgcaaacccctgcagttagtacgtactcgcagtctggcggcgcttcgccgctatgaagaagtgtcgatgccggaggtcatcaaagcagtcaacattgcgcagaatacagcatggcgtgtgaacaagaaagttctcgacgtagcgaatgcaatcacccaatggcagcactgtccagtcgcggatgtgcctgcgatggatcgtggcgaaatgccagctcgtccgttggacatcgataccaacgagattgcacttaaagcgtggaagaaagaagcttccgcgttctaccgcaaagacaaagcacgcgttagccgtcgtctgtcaatggagtttatgttatctcaggcgaacaagtttgcgaattataaagcaatctggtttccgcaaaacatggattggcgtgggcgcgtgtacgctgtcccgatgttcaatcctcagggcaacgatatgacgaaaggcctgctgacctttgcgcagggtaaacccattggtgaagacggcttctattggctcaagattcatggcgcaaatacagctggagtggataaagtaccgtttccacaacgcatcaaatttgttgaggataaccatacgaatattatggaatgcgcgaaagcaccgctggaaaacacttggtgggcggaacaggactcgccgttctgttttctggcgttctgctttgagtatgctggcgtcatcaatcacggtctgtcgtacaactgtagcttgcctctggcatttgatggtagttgctccggcattcaacatttctcagcgatgttacgcgacgaaattggcggcaaagctgtgaatctcctcccatctgcggaagtgcaggatatttatcgtatcgtcagcgacaaagttaacgaggtactgaaacaagatctgattaacggtacctctaccaccttggaaacggtgactgataagaagacaggcgaaattaccgaacgcacgaaatacgggaccaaagttatggcacagtggtggttagaacacggtgtgaatcgtggcgtcacgaaacgctcggttatgactttggcgtatgggagcaaagagtttggattccgcgatcaagtgctgagtgacaccattcaaccggcgatcgataacggcaaaggtgacatgtttctgaatccgaatcaggctgctggttacatggcgaaactgatctggaacgcagtgtccgtcaccgtagtcgcagcagttgaggcgatgaactggctgaaaagtgcggcgaaattacttgctgctgaagtgaaggataagaagacggatacagttctgcgtggccgctgcgcagtacattgggtgactcccgacggcttccctgtgtggcaggaatacaagaagcctattcagacgcgcttgaacctgatgttcctcggtcagttccgcttacagcctaccattaacaccaacaaagatagcgagattgatgcacacaaacaggagtctggtatcgctcctaactttgtacacagccaagacggtaaccaccttcgtatgactgtagtgtgggcacacgagaagtacggaatcgaatcttttgcactgattcacgactccttcggtaccattccggctgacgctgcgaacctgttcaaagcagtgcgcgaaactatggtttcgacatatgagtcttgtgatgtactggctgatttctacgaccagttcgctgaccagttgcacgagtctcaattggacaaaatgccagcacttccggctaaaggtaacttgaacctccgtgacatcttaaaatcggacttcgcgttcgcg

SEQ ID NO: 62 - protein, 890 aa, synthetic construct
  REGION 1..890: note = Variant of RNA polymerase
MHHHHHHMNTINIAKNDFSDIELAAIPFNTLADHYGERLAREQLALEHESYEMGEARFRKMFERQLKAGEVADNAAAKPLITTLLPKMIARINDWFEEVKAKRGKRPTAFQFLQEIKPEAVAYITIKTTLACLTSADNTTVQAVASAIGRAIEDEARFGRIRDLEAKTFKKNVEEQLNKRVGHVYKKAFMQVVEADMLSKGLLGGEAWSSWHKEDSIHVGVRCIEMLIESTGMVSLHRQNAGVVGQDSETIELAPEYAEAIATRAGALAGISPMFQPCVVPPKPWTGITGGGYWAAGRKPLQLVRTRSLAALRRYEEVSMPEVIKAVNIAQNTAWRVNKKVLDVANAITQWQHCPVADVPAMDRGEMPARPLDIDTNEIALKAWKKEASAFYRKDKARVSRRLSMEFMLSQANKFANYKAIWFPQNMDWRGRVYAVPMFNPQGNDMTKGLLTFAQGKPIGEDGFYWLKIHGANTAGVDKVPFPQRIKFVEDNHTNIMECAKAPLENTWWAEQDSPFCFLAFCFEYAGVINHGLSYNCSLPLAFDGSCSGIQHFSAMLRDEIGGKAVNLLPSAEVQDIYRIVSDKVNEVLKQDLINGTSTTLETVTDKKTGEITERTKYGTKVMAQWWLEHGVNRGVTKRSVMTLAYGSKEFGFRDQVLSDTIQPAIDNGKGDMFLNPNQAAGYMAKLIWNAVSVTVVAAVEAMNWLKSAAKLLAAEVKDKKTDTVLRGRCAVHWVTPDGFPVWQEYKKPIQTRLNLMFLGQFRLQPTINTNKDSEIDAHKQESGIAPNFVHSQDGNHLRMTVVWAHEKYGIESFALIHDSFGTIPADAANLFKAVRETMVSTYESCDVLADFYDQFADQLHESQLDKMPALPAKGNLNLRDILKSDFAFA

SEQ ID NO: 63 - DNA, 2670 bp, synthetic construct
  misc_feature 1..2670: note = Variant of RNA polymerase
  source 1..2670: mol_type = other DNA
atgcaccatcaccatcaccatatgaacacgattaacatcgctaagaacgacttctctgacatcgaactggctgctatcccgttcaacactctggctgaccattacggtgagcgtttagctcgcgaacagttggcccttgagcatgagtcttacgagatgggtgaagcacgcttccgcaagatgtttgagcgtcaacttaaagctggtgaggttgcggataacgctgccgccaagcctctcatcactaccctactccctaagatgattgcacgcatcaacgactggtttgaggaagtgaaagctaagcgcggcaagcgcccgacagccttccagttcctgcaagaaatcaagccggaagccgtagcgtacatcaccattaagaccactctggcttgcctaaccagtgcggacaatacaaccgttcaggctgtagcaagcgcaatcggtcgggccattgaggacgaggctcgcttcggtcgtatccgtgaccttgaagctaagcacttcaagaaaaacgttgaggaacaactcaacaagcgcgtagggcacgtctacaagaaagcatttatgcaagttgtcgaggctgacatgctctctaagggtctactcggtggcgaggcgtggtcttcgtggcataaggaagactctattcatgtaggagtacgctgcatcgagatgctcattgagtcaaccggaatggttagcttacaccgccaaaatgctggcgtagtaggtcaagactctgagactatcgaactcgcacctgaatacgctgaggctatcgcaacccgtgcaggtgcgctggctggcatctctccgatgttccaaccttgcgtagttcctcctaagccgtggactggcattactggtggtggctattgggctgcggggcgcaaacccctgcagttagtacgtactcgcagtctggcggcgcttcgccgctatgaagaagtgtcgatgccggaggtcatcaaagcagtcaacattgcgcagaatacagcatggcgtgtgaacaagaaagttctcgacgtagcgaatgcaatcacccaatggcagcactgtccagtcgcggatgtgcctgcgatggatcgtggcgaaatgccagctcgtccgttggacatcgataccaacgagattgcacttaaagcgtggaagaaagaagcttccgcgttctaccgcaaagacaaagcacgcgttagccgtcgtctgtcaatggagtttatgttatctcaggcgaacaagtttgcgaattataaagcaatctggtttccgcaaaacatggattggcgtgggcgcgtgtacgctgtcccgatgttcaatcctcagggcaacgatatgacgaaaggcctgctgacctttgcgcagggtaaacccattggtgaagacggcttctattggctcaagattcatggcgcaaatacagctggagtggataaagtaccgtttccacaacgcatcaaatttgttgaggataaccatacgaatattatggaatgcgcgaaagcaccgctggaaaacacttggtgggcggaacaggactcgccgttctgttttctggcgttctgctttgagtatgctggcgtcatcaatagtggtctgtcgtacaactgtagcttgcctctggcatttgatggtagttgctccggcattcaacatttctcagcgatgttacgcgacgaaattggcggcaaagctgtgaatctcctcccatctgcggaagtgcaggatatttatcgtatcgtcagcgacaaagttaacgaggtactgaaacaagatctgattaacggtacctctaccaccttggaaacggtgactgataagaagacaggcgaaattaccgaacgcacgaaatacgggaccaaagttatggcacagtggtggttagaacacggtgtgaatcgtggcgtcacgaaacgctcggttatgactttggcgtatgggagcaaagagtttggattccgcgatcaagtgctgagtgacaccattcaaccggcgatcgataacggcaaaggtgacatgtttctgaatccgaatcaggctgctggttacatggcgaaactgatctggaacgcagtgtccgtcaccgtagtcgcagcagttgaggcgatgaactggctgaaaagtgcggcgaaattacttgctgctgaagtgaaggataagaagacggatacagttctgcgtggccgctgcgcagtacattgggtgactcccgacggcttccctgtgtggcaggaatacaagaagcctattcagacgcgcttgaacctgatgttcctcggtcagttccgcttacagcctaccattaacaccaacaaagatagcgagattgatgcacacaaacaggagtctggtatcgctcctaactttgtacacagccaagacggtaaccaccttcgtatgactgtagtgtgggcacacgagaagtacggaatcgaatcttttgcactgattcacgactccttcggtaccattccggctgacgctgcgaacctgttcaaagcagtgcgcgaaactatggtttcgacatatgagtcttgtgatgtactggctgatttctacgaccagttcgctgaccagttgcacgagtctcaattggacaaaatgccagcacttccggctaaaggtaacttgaacctccgtgacatcttaaaatcggacttcgcgttcgcg

SEQ ID NO: 64 - protein, 890 aa, synthetic construct
  REGION 1..890: note = Variant of RNA polymerase
MHHHHHHMNTINIAKNDFSDIELAAIPFNTLADHYGERLAREQLALEHESYEMGEARFRKMFERQLKAGEVADNAAAKPLITTLLPKMIARINDWFEEVKAKRGKRPTAFQFLQEIKPEAVAYITIKTTLACLTSADNTTVQAVASAIGRAIEDEARFGRIRDLEAKHFKKNVEEQLNKRVGHVYKKAFMQVVEADMLSKGLLGGEAWSSWHKEDSIHVGVRCIEMLIESTGMVSLHRQNAGVVGQDSETIELAPEYAEAIATRAGALAGISPMFQPCVVPPKPWTGITGGGYWAAGRKPLQLVRTRSLAALRRYEEVSMPEVIKAVNIAQNTAWRVNKKVLDVANAITQWQHCPVADVPAMDRGEMPARPLDIDTNEIALKAWKKEASAFYRKDKARVSRRLSMEFMLSQANKFANYKAIWFPQNMDWRGRVYAVPMFNPQGNDMTKGLLTFAQGKPIGEDGFYWLKIHGANTAGVDKVPFPQRIKFVEDNHTNIMECAKAPLENTWWAEQDSPFCFLAFCFEYAGVINSGLSYNCSLPLAFDGSCSGIQHFSAMLRDEIGGKAVNLLPSAEVQDIYRIVSDKVNEVLKQDLINGTSTTLETVTDKKTGEITERTKYGTKVMAQWWLEHGVNRGVTKRSVMTLAYGSKEFGFRDQVLSDTIQPAIDNGKGDMFLNPNQAAGYMAKLIWNAVSVTVVAAVEAMNWLKSAAKLLAAEVKDKKTDTVLRGRCAVHWVTPDGFPVWQEYKKPIQTRLNLMFLGQFRLQPTINTNKDSEIDAHKQESGIAPNFVHSQDGNHLRMTVVWAHEKYGIESFALIHDSFGTIPADAANLFKAVRETMVSTYESCDVLADFYDQFADQLHESQLDKMPALPAKGNLNLRDILKSDFAFA

SEQ ID NO: 65 - DNA, 2670 bp, synthetic construct
  misc_feature 1..2670: note = Variant of RNA polymerase
  source 1..2670: mol_type = other DNA
atgcaccatcaccatcaccatatgaacacgattaacatcgctaagaacgacttctctgacatcgaactggctgctatcccgttcaacactctggctgaccattacggtgagcgtttagctcgcgaacagttggcccttgagcatgagtcttacgagatgggtgaagcacgcttccgcaagatgtttgagcgtcaacttaaagctggtgaggttgcggataacgctgccgccaagcctctcatcactaccctactccctaagatgattgcacgcatcaacgactggtttgaggaagtgaaagctaagcgcggcaagcgcccgacagccttccagttcctgcaagaaatcaagccggaagccgtagcgtacatcaccattaagaccactctggcttgcctaaccagtgcggacaatacaaccgttcaggctgtagcaagcgcaatcggtcgggccattgaggacgaggctcgcttcggtcgtatccgtgaccttgaagctaagcacttcaagaaaaacgttgaggaacaactcaacaagcgcgtagggcacgtctacaagaaagcatttatgcaagttgtcgaggctgacatgctctctaagggtctactcggtggcgaggcgtggtcttcgtggcataaggaagactctattcatgtaggagtacgctgcatcgagatgctcattgagtcaaccggaatggttagcttacaccgccaaaatgctggcgtagtaggtcaagactctgagactatcgaactcgcacctgaatacgctgaggctatcgcaacccgtgcaggtgcgctggctggcatctctccgatgttccaaccttgcgtagttcctcctaagccgtggactggcattactggtggtggctattgggctgcggggcgcaaacccctgcagttagtacgtactcgcagtctggcggcgcttcgccgctatgaagaagtgtcgatgccggaggtcatcaaagcagtcaacattgcgcagaatacagcatggcgtgtgaacaagaaagttctcgacgtagcgaatacgatcacccaatggcagcactgtccagtcgcggatgtgcctgcgatggatcgtggcgaaatgccagctcgtccgttggacatcgataccaacgagattgcacttaaagcgtggaagaaagaagcttccgcgttctaccgcaaagacaaagcacgcgttagccgtcgtctgtcaatggagtttatgttatctcaggcgaacaagtttgcgaattataaagcaatctggtttccgcaaaacatggattggcgtgggcgcgtgtacgctgtcccgatgttcaatcctcagggcaacgatatgacgaaaggcctgctgacctttgcgcagggtaaacccattggtgaagacggcttctattggctcaagattcatggcgcaaatacagctggagtggataaagtaccgtttccacaacgcatcaaatttgttgaggataaccatacgaatattatggaatgcgcgaaagcaccgctggaaaacacttggtgggcggaacaggactcgccgttctgttttctggcgttctgctttgagtatgctggcgtcatcaatcacggtctgtcgtacaactgtagcttgcctctggcatttgatggtagttgctccggcattcaacatttctcagcgatgttacgcgacgaaattggcggcaaagctgtgaatctcctcccatctgcggaagtgcaggatatttatcgtatcgtcagcgacaaagttaacgaggtactgaaacaagatctgattaacggtacctctaccaccttggaaacggtgactgataagaagacaggcgaaattaccgaacgcacgaaatacgggaccaaagttatggcacagtggtggttagaacacggtgtgaatcgtggcgtcacgaaacgctcggttatgactttggcgtatgggagcaaagagtttggattccgcgatcaagtgctgagtgacaccattcaaccggcgatcgataacggcaaaggtgacatgtttctgaatccgaatcaggctgctggttacatggcgaaactgatctggaacgcagtgtccgtcaccgtagtcgcagcagttgaggcgatgaactggctgaaaagtgcggcgaaattacttgctgctgaagtgaaggataagaagacggatacagttctgcgtggccgctgcgcagtacattgggtgactcccgacggcttccctgtgtggcaggaatacaagaagcctattcagacgcgcttgaacctgatgttcctcggtcagttccgcttacagcctaccattaacaccaacaaagatagcgagattgatgcacacaaacaggagtctggtatcgctcctaactttgtacacagccaagacggtaaccaccttcgtatgactgtagtgtgggcacacgagaagtacggaatcgaatcttttgcactgattcacgactccttcggtaccattccggctgacgctgcgaacctgttcaaagcagtgcgcgaaactatggtttcgacatatgagtcttgtgatgtactggctgatttctacgaccagttcgctgaccagttgcacgagtctcaattggacaaaatgccagcacttccggctaaaggtaacttgaacctccgtgacatcttaaaatcggacttcgcgttcgcg

SEQ ID NO: 66 - protein, 890 aa, synthetic construct
  REGION 1..890: note = Variant of RNA polymerase
MHHHHHHMNTINIAKNDFSDIELAAIPFNTLADHYGERLAREQLALEHESYEMGEARFRKMFERQLKAGEVADNAAAKPLITTLLPKMIARINDWFEEVKAKRGKRPTAFQFLQEIKPEAVAYITIKTTLACLTSADNTTVQAVASAIGRAIEDEARFGRIRDLEAKHFKKNVEEQLNKRVGHVYKKAFMQVVEADMLSKGLLGGEAWSSWHKEDSIHVGVRCIEMLIESTGMVSLHRQNAGVVGQDSETIELAPEYAEAIATRAGALAGISPMFQPCVVPPKPWTGITGGGYWAAGRKPLQLVRTRSLAALRRYEEVSMPEVIKAVNIAQNTAWRVNKKVLDVANTITQWQHCPVADVPAMDRGEMPARPLDIDTNEIALKAWKKEASAFYRKDKARVSRRLSMEFMLSQANKFANYKAIWFPQNMDWRGRVYAVPMFNPQGNDMTKGLLTFAQGKPIGEDGFYWLKIHGANTAGVDKVPFPQRIKFVEDNHTNIMECAKAPLENTWWAEQDSPFCFLAFCFEYAGVINHGLSYNCSLPLAFDGSCSGIQHFSAMLRDEIGGKAVNLLPSAEVQDIYRIVSDKVNEVLKQDLINGTSTTLETVTDKKTGEITERTKYGTKVMAQWWLEHGVNRGVTKRSVMTLAYGSKEFGFRDQVLSDTIQPAIDNGKGDMFLNPNQAAGYMAKLIWNAVSVTVVAAVEAMNWLKSAAKLLAAEVKDKKTDTVLRGRCAVHWVTPDGFPVWQEYKKPIQTRLNLMFLGQFRLQPTINTNKDSEIDAHKQESGIAPNFVHSQDGNHLRMTVVWAHEKYGIESFALIHDSFGTIPADAANLFKAVRETMVSTYESCDVLADFYDQFADQLHESQLDKMPALPAKGNLNLRDILKSDFAFA

SEQ ID NO: 67 - DNA, 2670 bp, synthetic construct
  misc_feature 1..2670: note = Variant of RNA polymerase
  source 1..2670: mol_type = other DNA
atgcaccatcaccatcaccatatgaacacgattaacatcgctaagaacgacgtttctgacatcgaactggctgctatcccgttcaacactctggctgaccattacggtgagcgtttagctcgcgaacagttggcccttgagcatgagtcttacgagatgggtgaagcacgcttccgcaagatgtttgagcgtcaacttaaagctggtgaggttgcggataacgctgccgccaagcctctcatcactaccctactccctaagatgattgcacgcatcaacgactggtttgaggaagtgaaagctaagcgcggcaagcgcccgacagccttccagttcctgcaagaaatcaagccggaagccgtagcgtacatcaccattaagaccactctggcttgcctaaccagtgcggacaatacaaccgttcaggctgtagcaagcgcaatcggtcgggccattgaggacgaggctcgcttcggtcgtatccgtgaccttgaagctaagcacttcaagaaaaacgttgaggaacaactcaacaagcgcgtagggcacgtctacaagaaagcatttatgcaagttgtcgaggctgacatgctctctaagggtctactcggtggcgaggcgtggtcttcgtggcataaggaagactctattcatgtaggagtacgctgcatcgagatgctcattgagtcaaccggaatggttagcttacaccgccaaaatgctggcgtagtaggtcaagactctgagactatcgaactcgcacctgaatacgctgaggctatcgcaacccgtgcaggtgcgctggctggcatctctccgatgttccaaccttgcgtagttcctcctaagccgtggactggcattactggtggtggctattgggctgcggggcgcaaacccctgcagttagtacgtactcgcagtctggcggcgcttcgccgctatgaagaagtgtcgatgccggaggtcatcaaagcagtcaacattgcgcagaatacagcatggcgtgtgaacaagaaagttctcgacgtagcgaatgcaatcacccaatggcagcactgtccagtcgcggatgtgcctgcgatggatcgtggcgaaatgccagctcgtccgttggacatcgataccaacgagattgcacttaaagcgtggaagaaagaagcttccgcgttctaccgcaaagacaaagcacgcgttagccgtcgtctgtcaatggagtttatgttatctcaggcgaacaagtttgcgaattataaagcaatctggtttccgcaaaacatggattggcgtgggcgcgtgtacgctgtcccgatgttcaatcctcagggcaacgatatgacgaaaggcctgctgacctttgcgcagggtaaacccattggtgaagacggcttctattggctcaagattcatggcgcaaatacagctggagtggataaagtaccgtttccacaacgcatcaaatttgttgaggataaccatacgaatattatggaatgcgcgaaagcaccgctggaaaacacttggtgggcggaacaggactcgccgttctgttttctggcgttctgctttgagtatgctggcgtcatcaatcacggtctgtcgtacaactgtagcttgcctctggcatttgatggtagttgctccggcattcaacatttctcagcgatgttacgcgacgaaattggcggcaaagctgtgaatctcctcccatctgcggaagtgcaggatatttatcgtatcgtcagcgacaaagttaacgaggtactgaaacaagatctgattaacggtacctctaccaccttggaaacggtgactgataagaagacaggcgaaattaccgaacgcacgaaatacgggaccaaagttatggcacagtggtggttagaacacggtgtgaatcgtggcgtcacgaaacgctcggttatgactttggcgtatgggagcaaagagtttggattccgcgatcaagtgctgagtgacaccattcaaccggcgatcgataacggcaaaggtgacatgtttctgaatccgaatcaggctgctggttacatggcgaaactgatctggaacgcagtgtccgtcaccgtagtcgcagcagttgaggcgatgaactggctgaaaagtgcggcgaaattacttgctgctgaagtgaaggataagaagacggatacagttctgcgtggccgctgcgcagtacattgggtgactcccgacggcttccctgtgtggcaggaatacaagaagcctattcagacgcgcttgaacctgatgttcctcggtcagttccgcttacagcctaccattaacaccaacaaagatagcgagattgatgcacacaaacaggagtctggtatcgctcctaactttgtacacagccaagacggtaaccaccttcgtatgactgtagtgtgggcacacgagaagtacggaatcgaatcttttgcactgattcacgactccttcggtaccattccggctgacgctgcgaacctgttcaaagcagtgcgcgaaactatggtttcgacatatgagtcttgtgatgtactggctgatttctacgaccagttcgctgaccagttgcacgagtctcaattggacaaaatgccagcacttccggctaaaggtaacttgaacctccgtgacatcttaaaatcggacttcgcgttcgcg

SEQ ID NO: 68 - protein, 890 aa, synthetic construct
  REGION 1..890: note = Variant of RNA polymerase
MHHHHHHMNTINIAKNDVSDIELAAIPFNTLADHYGERLAREQLALEHESYEMGEARFRKMFERQLKAGEVADNAAAKPLITTLLPKMIARINDWFEEVKAKRGKRPTAFQFLQEIKPEAVAYITIKTTLACLTSADNTTVQAVASAIGRAIEDEARFGRIRDLEAKHFKKNVEEQLNKRVGHVYKKAFMQVVEADMLSKGLLGGEAWSSWHKEDSIHVGVRCIEMLIESTGMVSLHRQNAGVVGQDSETIELAPEYAEAIATRAGALAGISPMFQPCVVPPKPWTGITGGGYWAAGRKPLQLVRTRSLAALRRYEEVSMPEVIKAVNIAQNTAWRVNKKVLDVANAITQWQHCPVADVPAMDRGEMPARPLDIDTNEIALKAWKKEASAFYRKDKARVSRRLSMEFMLSQANKFANYKAIWFPQNMDWRGRVYAVPMFNPQGNDMTKGLLTFAQGKPIGEDGFYWLKIHGANTAGVDKVPFPQRIKFVEDNHTNIMECAKAPLENTWWAEQDSPFCFLAFCFEYAGVINHGLSYNCSLPLAFDGSCSGIQHFSAMLRDEIGGKAVNLLPSAEVQDIYRIVSDKVNEVLKQDLINGTSTTLETVTDKKTGEITERTKYGTKVMAQWWLEHGVNRGVTKRSVMTLAYGSKEFGFRDQVLSDTIQPAIDNGKGDMFLNPNQAAGYMAKLIWNAVSVTVVAAVEAMNWLKSAAKLLAAEVKDKKTDTVLRGRCAVHWVTPDGFPVWQEYKKPIQTRLNLMFLGQFRLQPTINTNKDSEIDAHKQESGIAPNFVHSQDGNHLRMTVVWAHEKYGIESFALIHDSFGTIPADAANLFKAVRETMVSTYESCDVLADFYDQFADQLHESQLDKMPALPAKGNLNLRDILKSDFAFA

SEQ ID NO: 69 - DNA, 2670 bp, synthetic construct
  misc_feature 1..2670: note = Variant of RNA polymerase
  source 1..2670: mol_type = other DNA
atgcaccatcaccatcaccatatgaacacgattaacatcgctaagaacgacttctctgacatcgaactggctgctatcccgttcaacactctggctgaccattacggtgagcgtttagctcgcgaacagttggcccttgagcatgagtcttacgagatgggtgaagcacgcttccgcaagatgtttgagcgtcaacttaaagctggtgaggttgcggataacgctgccgccaagcctctcatcactaccctactccctaagatgattgcacgcatcaacgactggtttgaggaagtgaaagctaagcgcggcaagcgcccgacagccttccagttcctgcaagaaatcaagccggaagccgtagcgtacatcaccattaagaccactctggcttgcctaaccagtgcggacaatacaaccgttcaggctgtagcaagcgcaatcggtcgggccattgaggacgaggctcgcttcggtcgtatccgtgaccttgaagctaagcacttcaagaaaaacgttgaggaacaactcaacaagcgcgtagggcacgtctacaagaaagcatttatgcaagttgtcgaggctgacatgctctctaagggtctactcggtggcgaggcgtggtcttcgtggcataaggaagactctattcatgtaggagtacgctgcatcgagatgctcattgagtcaaccggaatggttagcttacaccgccaaaatgctggcgtagtaggtcaagactctgagactatcgaactcgcacctgaatacgctgaggctatcgcaacccgtgcaggtgcgctggctggcatctctccgatgttccaaccttgcgtagttcctcctaagccgtggactggcattactggtggtggctattgggctgcggggcgcaaacccctgcagttagtacgtactcgcagtctggcggcgcttcgccgctatgaagaagtgtcgatgccggaggtcatcaaagcagtcaacattgcgcagaatacagcatggcgtgtgaacaagaaagttctcgacgtagcgaatgcaatcacccaatggcagcactgtccagtcgcggatgtgcctgcgatggatcgtggcgaaatgccagctcgtccgttggacatcgataccaacgagattgcacttaaagcgtggaagaaagaagcttccgcgttctaccgcaaagacaaagcacgcgttagccgtcgtctgtcaatggagtttatgttatctcaggcgaacaagtttgcgaattataaagcaatctggtttccgcaaaacatggattggcgtgggcgcgtgtacgctgtcccgatgttcaatcctcagggcaacgatatgacgaaaggcctgctgacctttgcgcagggtaaacccattggtgaagacggcttctattggctcaagattcatggcgcaaatacagctggagtggataaagtaccgtttccacaacgcatcaaatttgttgaggataaccatacgaatattatggaatgcgcgaaagcaccgctggaaaacacttggtgggcggaacaggactcgccgttctgttttctggcgttctgctttgagtatgctcgggtcatcaatcacggtctgtcgtacaactgtagcttgcctctggcatttgatggtagttgctccggcattcaacatttctcagcgatgttacgcgacgaaattggcggcaaagctgtgaatctcctcccatctgcggaagtgcaggatatttatcgtatcgtcagcgacaaagttaacgaggtactgaaacaagatctgattaacggtacctctaccaccttggaaacggtgactgataagaagacaggcgaaattaccgaacgcacgaaatacgggaccaaagttatggcacagtggtggttagaacacggtgtgaatcgtggcgtcacgaaacgctcggttatgactttggcgtatgggagcaaagagtttggattccgcgatcaagtgctgagtgacaccattcaaccggcgatcgataacggcaaaggtgacatgtttctgaatccgaatcaggctgctggttacatggcgaaactgatctggaacgcagtgtccgtcaccgtagtcgcagcagttgaggcgatgaactggctgaaaagtgcggcgaaattacttgctgctgaagtgaaggataagaagacggatacagttctgcgtggccgctgcgcagtacattgggtgactcccgacggcttccctgtgtggcaggaatacaagaagcctattcagacgcgcttgaacctgatgttcctcggtcagttccgcttacagcctaccattaacaccaacaaagatagcgagattgatgcacacaaacaggagtctggtatcgctcctaactttgtacacagccaagacggtaaccaccttcgtatgactgtagtgtgggcacacgagaagtacggaatcgaatcttttgcactgattcacgactccttcggtaccattccggctgacgctgcgaacctgttcaaagcagtgcgcgaaactatggtttcgacatatgagtcttgtgatgtactggctgatttctacgaccagttcgctgaccagttgcacgagtctcaattggacaaaatgccagcacttccggctaaaggtaacttgaacctccgtgacatcttaaaatcggacttcgcgttcgcg

SEQ ID NO: 70 - protein, 890 aa, synthetic construct
  REGION 1..890: note = Variant of RNA polymerase
MHHHHHHMNTINIAKNDFSDIELAAIPFNTLADHYGERLAREQLALEHESYEMGEARFRKMFERQLKAGEVADNAAAKPLITTLLPKMIARINDWFEEVKAKRGKRPTAFQFLQEIKPEAVAYITIKTTLACLTSADNTTVQAVASAIGRAIEDEARFGRIRDLEAKHFKKNVEEQLNKRVGHVYKKAFMQVVEADMLSKGLLGGEAWSSWHKEDSIHVGVRCIEMLIESTGMVSLHRQNAGVVGQDSETIELAPEYAEAIATRAGALAGISPMFQPCVVPPKPWTGITGGGYWAAGRKPLQLVRTRSLAALRRYEEVSMPEVIKAVNIAQNTAWRVNKKVLDVANAITQWQHCPVADVPAMDRGEMPARPLDIDTNEIALKAWKKEASAFYRKDKARVSRRLSMEFMLSQANKFANYKAIWFPQNMDWRGRVYAVPMFNPQGNDMTKGLLTFAQGKPIGEDGFYWLKIHGANTAGVDKVPFPQRIKFVEDNHTNIMECAKAPLENTWWAEQDSPFCFLAFCFEYARVINHGLSYNCSLPLAFDGSCSGIQHFSAMLRDEIGGKAVNLLPSAEVQDIYRIVSDKVNEVLKQDLINGTSTTLETVTDKKTGEITERTKYGTKVMAQWWLEHGVNRGVTKRSVMTLAYGSKEFGFRDQVLSDTIQPAIDNGKGDMFLNPNQAAGYMAKLIWNAVSVTVVAAVEAMNWLKSAAKLLAAEVKDKKTDTVLRGRCAVHWVTPDGFPVWQEYKKPIQTRLNLMFLGQFRLQPTINTNKDSEIDAHKQESGIAPNFVHSQDGNHLRMTVVWAHEKYGIESFALIHDSFGTIPADAANLFKAVRETMVSTYESCDVLADFYDQFADQLHESQLDKMPALPAKGNLNLRDILKSDFAFA

SEQ ID NO: 71 - DNA, 2670 bp, synthetic construct
  misc_feature 1..2670: note = Variant of RNA polymerase
  source 1..2670: mol_type = other DNA
atgcaccatcaccatcaccatatgaacacgattaacatcgctaagaacgacttctctgacatcgaactggctgctatcccgttcaacactctggctgaccattacggtgagcgtttagctcgcgaacagttggcccttgagcatgagtcttacgagatgggtgaagcacgcttccgcaagatgtttgagcgtcaacttaaagctggtgaggttgcggataacgctgccgccaagcctctcatcactaccctactccctaagatgattgcacgcatcaacgactggtttgaggaagtgaaagctaagcgcggcaagcgcccgacagccttccagttcctgcaagaaatcaagccggaagccgtagcgtacatcaccattaagaccactctggcttgcctaaccagtgcggacaatacaaccgttcaggctgtagcaagcgcaatcggtcgggccattgaggacgaggctcgcttcggtcgtatccgtgaccttgaagctaagcacttcaagaaaaacgttgaggaacaactcaacaagcgcgtagggcacgtctacaagaaagcatttatgcaagttgtcgaggctgacgttctctctaagggtctactcggtggcgaggcgtggtcttcgtggcataaggaagactctattcatgtaggagtacgctgcatcgagatgctcattgagtcaaccggaatggttagcttacaccgccaaaatgctggcgtagtaggtcaagactctgagactatcgaactcgcacctgaatacgctgaggctatcgcaacccgtgcaggtgcgctggctggcatctctccgatgttccaaccttgcgtagttcctcctaagccgtggactggcattactggtggtggctattgggctgcggggcgcaaacccctgcagttagtacgtactcgcagtctggcggcgcttcgccgctatgaagaagtgtcgatgccggaggtcatcaaagcagtcaacattgcgcagaatacagcatggcgtgtgaacaagaaagttctcgacgtagcgaatgcaatcacccaatggcagcactgtccagtcgcggatgtgcctgcgatggatcgtggcgaaatgccagctcgtccgttggacatcgataccaacgagattgcacttaaagcgtggaagaaagaagcttccgcgttctaccgcaaagacaaagcacgcgttagccgtcgtctgtcaatggagtttatgttatctcaggcgaacaagtttgcgaattataaagcaatctggtttccgcaaaacatggattggcgtgggcgcgtgtacgctgtcccgatgttcaatcctcagggcaacgatatgacgaaaggcctgctgacctttgcgcagggtaaacccattggtgaagacggcttctattggctcaagattcatggcgcaaatacagctggagtggataaagtaccgtttccacaacgcatcaaatttgttgaggataaccatacgaatattatggaatgcgcgaaagcaccgctggaaaacacttggtgggcggaacaggactcgccgttctgttttctggcgttctgctttgagtatgctggcgtcatcaatcacggtctgtcgtacaactgtagcttgcctctggcatttgatggtagttgctccggcattcaacatttctcagcgatgttacgcgacgaaattggcggcaaagctgtgaatctcctcccatctgcggaagtgcaggatatttatcgtatcgtcagcgacaaagttaacgaggtactgaaacaagatctgattaacggtacctctaccaccttggaaacggtgactgataagaagacaggcgaaattaccgaacgcacgaaatacgggaccaaagttatggcacagtggtggttagaacacggtgtgaatcgtggcgtcacgaaacgctcggttatgactttggcgtatgggagcaaagagtttggattccgcgatcaagtgctgagtgacaccattcaaccggcgatcgataacggcaaaggtgacatgtttctgaatccgaatcaggctgctggttacatggcgaaactgatctggaacgcagtgtccgtcaccgtagtcgcagcagttgaggcgatgaactggctgaaaagtgcggcgaaattacttgctgctgaagtgaaggataagaagacggatacagttctgcgtggccgctgcgcagtacattgggtgactcccgacggcttccctgtgtggcaggaatacaagaagcctattcagacgcgcttgaacctgatgttcctcggtcagttccgcttacagcctaccattaacaccaacaaagatagcgagattgatgcacacaaacaggagtctggtatcgctcctaactttgtacacagccaagacggtaaccaccttcgtatgactgtagtgtgggcacacgagaagtacggaatcgaatcttttgcactgattcacgactccttcggtaccattccggctgacgctgcgaacctgttcaaagcagtgcgcgaaactatggtttcgacatatgagtcttgtgatgtactggctgatttctacgaccagttcgctgaccagttgcacgagtctcaattggacaaaatgccagcacttccggctaaaggtaacttgaacctccgtgacatcttaaaatcggacttcgcgttcgcg

SEQ ID NO: 72 - protein, 890 aa, synthetic construct
  REGION 1..890: note = Variant of RNA polymerase
MHHHHHHMNTINIAKNDFSDIELAAIPFNTLADHYGERLAREQLALEHESYEMGEARFRKMFERQLKAGEVADNAAAKPLITTLLPKMIARINDWFEEVKAKRGKRPTAFQFLQEIKPEAVAYITIKTTLACLTSADNTTVQAVASAIGRAIEDEARFGRIRDLEAKHFKKNVEEQLNKRVGHVYKKAFMQVVEADVLSKGLLGGEAWSSWHKEDSIHVGVRCIEMLIESTGMVSLHRQNAGVVGQDSETIELAPEYAEAIATRAGALAGISPMFQPCVVPPKPWTGITGGGYWAAGRKPLQLVRTRSLAALRRYEEVSMPEVIKAVNIAQNTAWRVNKKVLDVANAITQWQHCPVADVPAMDRGEMPARPLDIDTNEIALKAWKKEASAFYRKDKARVSRRLSMEFMLSQANKFANYKAIWFPQNMDWRGRVYAVPMFNPQGNDMTKGLLTFAQGKPIGEDGFYWLKIHGANTAGVDKVPFPQRIKFVEDNHTNIMECAKAPLENTWWAEQDSPFCFLAFCFEYAGVINHGLSYNCSLPLAFDGSCSGIQHFSAMLRDEIGGKAVNLLPSAEVQDIYRIVSDKVNEVLKQDLINGTSTTLETVTDKKTGEITERTKYGTKVMAQWWLEHGVNRGVTKRSVMTLAYGSKEFGFRDQVLSDTIQPAIDNGKGDMFLNPNQAAGYMAKLIWNAVSVTVVAAVEAMNWLKSAAKLLAAEVKDKKTDTVLRGRCAVHWVTPDGFPVWQEYKKPIQTRLNLMFLGQFRLQPTINTNKDSEIDAHKQESGIAPNFVHSQDGNHLRMTVVWAHEKYGIESFALIHDSFGTIPADAANLFKAVRETMVSTYESCDVLADFYDQFADQLHESQLDKMPALPAKGNLNLRDILKSDFAFA

SEQ ID NO: 73 - DNA, 2670 bp, synthetic construct
  misc_feature 1..2670: note = Variant of RNA polymerase
  source 1..2670: mol_type = other DNA
atgcaccatcaccatcaccatatgaacacgattaacatcgctaagaacgacttctctgacatcgaactggctgctatcccgttcaacactctggctgaccattacggtgagcgtttagctcgcgaacagttggcccttgagcatgagtcttacgagatgggtgaagcacgcttccgcaagatgtttgagcgtcaacttaaagctggtgaggttgcggataacgctaccgccaagcctctcatcactaccctactccctaagatgattgcacgcatcaacgactggtttgaggaagtgaaagctaagcgcggcaagcgcccgacagccttccagttcctgcaagaaatcaagccggaagccgtagcgtacatcaccattaagaccactctggcttgcctaaccagtgcggacaatacaaccgttcaggctgtagcaagcgcaatcggtcgggccattgaggacgaggctcgcttcggtcgtatccgtgaccttgaagctaagcacttcaagaaaaacgttgaggaacaactcaacaagcgcgtagggcacgtctacaagaaagcatttatgcaagttgtcgaggctgacatgctctctaagggtctactcggtggcgaggcgtggtcttcgtggcataaggaagactctattcatgtaggagtacgctgcatcgagatgctcattgagtcaaccggaatggttagcttacaccgccaaaatgctggcgtagtaggtcaagactctgagactatcgaactcgcacctgaatacgctgaggctatcgcaacccgtgcaggtgcgctggctggcatctctccgatgttccaaccttgcgtagttcctcctaagccgtggactggcattactggtggtggctattgggctgcggggcgcaaacccctgcagttagtacgtactcgcagtctggcggcgcttcgccgctatgaagaagtgtcgatgccggaggtcatcaaagcagtcaacattgcgcagaatacagcatggcgtgtgaacaagaaagttctcgacgtagcgaatgcaatcacccaatggcagcactgtccagtcgcggatgtgcctgcgatggatcgtggcgaaatgccagctcgtccgttggacatcgataccaacgagattgcacttaaagcgtggaagaaagaagcttccgcgttctaccgcaaagacaaagcacgcgttagccgtcgtctgtcaatggagtttatgttatctcaggcgaacaagtttgcgaattataaagcaatctggtttccgcaaaacatggattggcgtgggcgcgtgtacgctgtcccgatgttcaatcctcagggcaacgatatgacgaaaggcctgctgacctttgcgcagggtaaacccattggtgaagacggcttctattggctcaagattcatggcgcaaatacagctggagtggataaagtaccgtttccacaacgcatcaaatttgttgaggataaccatacgaatattatggaatgcgcgaaagcaccgctggaaaacacttggtgggcggaacaggactcgccgttctgttttctggcgttctgctttgagtatgctggcgtcatcaatcacggtctgtcgtacaactcgagcttgcctctggcatttgatggtagttgctccggcattcaacatttctcagcgatgttacgcgacgaaattggcggcaaagctgtgaatctcctcccatctgcggaagtgcaggatatttatcgtatcgtcagcgacaaagttaacgaggtactgaaacaagatctgattaacggtacctctaccaccttggaaacggtgactgataagaagacaggcgaaattaccgaacgcacgaaatacgggaccaaagttatggcacagtggtggttagaacacggtgtgaatcgtggcgtcacgaaacgctcggttatgactttggcgtatgggagcaaagagtttggattccgcgatcaagtgctgagtgacaccattcaaccggcgatcgataacggcaaaggtgacatgtttctgaatccgaatcaggctgctggttacatggcgaaactgatctggaacgcagtgtccgtcaccgtagtcgcagcagttgaggcgatgaactggctgaaaagtgcggcgaaattacttgctgctgaagtgaaggataagaagacggatacagttctgcgtggccgctgcgcagtacattgggtgactcccgacggcttccctgtgtggcaggaatacaagaagcctattcagacgcgcttgaacctgatgttcctcggtcagttccgcttacagcctaccattaacaccaacaaagatagcgagattgatgcacacaaacaggagtctggtatcgctcctaactttgtacacagccaagacggtaaccaccttcgtatgactgtagtgtgggcacacgagaagtacggaatcgaatcttttgcactgattcacgactccttcggtaccattccggctgacgctgcgaacctgttcaaagcagtgcgcgaaactatggtttcgacatatgagtcttgtgatgtactggctgatttctacgaccagttcgctgaccagttgcacgagtctcaattggacaaaatgccagcacttccggctaaaggtaacttgaacctccgtgacatcttaaaatcggacttcgcgttcgcg

SEQ ID NO: 74 - protein, 890 aa, synthetic construct
  REGION 1..890: note = Variant of RNA polymerase
MHHHHHHMNTINIAKNDFSDIELAAIPFNTLADHYGERLAREQLALEHESYEMGEARFRKMFERQLKAGEVADNATAKPLITTLLPKMIARINDWFEEVKAKRGKRPTAFQFLQEIKPEAVAYITIKTTLACLTSADNTTVQAVASAIGRAIEDEARFGRIRDLEAKHFKKNVEEQLNKRVGHVYKKAFMQVVEADMLSKGLLGGEAWSSWHKEDSIHVGVRCIEMLIESTGMVSLHRQNAGVVGQDSETIELAPEYAEAIATRAGALAGISPMFQPCVVPPKPWTGITGGGYWAAGRKPLQLVRTRSLAALRRYEEVSMPEVIKAVNIAQNTAWRVNKKVLDVANAITQWQHCPVADVPAMDRGEMPARPLDIDTNEIALKAWKKEASAFYRKDKARVSRRLSMEFMLSQANKFANYKAIWFPQNMDWRGRVYAVPMFNPQGNDMTKGLLTFAQGKPIGEDGFYWLKIHGANTAGVDKVPFPQRIKFVEDNHTNIMECAKAPLENTWWAEQDSPFCFLAFCFEYAGVINHGLSYNSSLPLAFDGSCSGIQHFSAMLRDEIGGKAVNLLPSAEVQDIYRIVSDKVNEVLKQDLINGTSTTLETVTDKKTGEITERTKYGTKVMAQWWLEHGVNRGVTKRSVMTLAYGSKEFGFRDQVLSDTIQPAIDNGKGDMFLNPNQAAGYMAKLIWNAVSVTVVAAVEAMNWLKSAAKLLAAEVKDKKTDTVLRGRCAVHWVTPDGFPVWQEYKKPIQTRLNLMFLGQFRLQPTINTNKDSEIDAHKQESGIAPNFVHSQDGNHLRMTVVWAHEKYGIESFALIHDSFGTIPADAANLFKAVRETMVSTYESCDVLADFYDQFADQLHESQLDKMPALPAKGNLNLRDILKSDFAFA

SEQ ID NO: 75 - DNA, 2670 bp, synthetic construct
  misc_feature 1..2670: note = Variant of RNA polymerase
  source 1..2670: mol_type = other DNA
atgcaccatcaccatcaccatatgaacacgattaacatcgctaagaacgacttctctgacatcgaactggctgctatcccgttcaacactctggctgaccattacggtgagcgtttagctcgcgaacagttggcccttgagcatgagtcttacgagatgggtgaagcacgcttccgcaagatgtttgagcgtcaacttaaagctggtgaggttgcggataacgctgccgccaagcctctcatcactaccctactccctaagatgattgcacgcatcaacgactggtttgaggaagtgaaagctaagcgcggcaagcgcccgacagccttccagttcctgcaagaaatcaagccggaagccgtagcgtacatcaccattaagaccactctggcttgcctaaccagtgcggacaatacaaccgttcaggctgtagcaagcgcaatcggtcgggccattgaggacgaggctcgcttcggtcgtatccgtgaccttgaagctaagcacttcaaggagaacgttgaggaacaactcaacaagcgcgtagggcacgtctacaagaaagcatttatgcaagttgtcgaggctgacatgctctctaagggtctactcggtggcgaggcgtggtcttcgtggcataaggaagactctattcatgtaggagtacgctgcatcgagatgctcattgagtcaaccggaatggttagcttacaccgccaaaatgctggcgtagtaggtcaagactctgagactatcgaactcgcacctgaatacgctgaggctatcgcaacccgtgcaggtgcgctggctggcatctctccgatgttccaaccttgcgtagttcctcctaagccgtggactggcattactggtggtggctattgggctgcggggcgcaaacccctgcagttagtacgtactcgcagtctggcggcgcttcgccgctatgaagaagtgtcgatgccggaggtcatcaaagcagtcaacattgcgcagaatacagcatggcgtgtgaacaagaaagttctcgacgtagcgaatgcaatcacccaatggcagcactgtccagtcgcggatgtgcctgcgatggatcgtggcgaaatgccagctcgtccgttggacatcgataccaacgagattgcacttaaagcgtggaagaaagaagcttccgcgttctaccgcaaagacaaagcacgcgttagccgtcgtctgtcaatggagtttatgttatctcaggcgaacaagtttgcgaattataaagcaatctggtttccgcaaaacatggattggcgtgggcgcgtgtacgctgtcccgatgttcaatcctcagggcaacgatatgacgaaaggcctgctgacctttgcgcagggtaaacccattggtgaagacggcttctattggctcaagattcatggcgcaaatacagctggagtggataaagtaccgtttccacaacgcatcaaatttgttgaggataaccatacgaatattatggaatgcgcgaaagcaccgctggaaaacacttggtgggcggaacaggactcgccgttctgttttctggcgttctgctttgagtatgctggcgtcatcaatcacggtctgtcgtacaactgtagcttgcctctggcatttgatggtagttgctccggcattcaacatttctcagcgatgttacgcgacgaaattggcggcaaagctgtgaatctcctcccatctgcggaagtgcaggatatttatcgtatcgtcagcgacaaagttaacgaggtactgaaacaagatctgattaacggtacctctaccaccttggaaacggtgactgataagaagacaggcgaaattaccgaacgcacgaaatacgggaccaaagttatggcacagtggtggttagaacacggtgtgaatcgtggcgtcacgaaacgctcggttatgactttggcgtatgggagcaaagagtttggattccgcgatcaagtgctgagtgacaccattcaaccggcgatcgataacggcaaaggtgacatgtttctgaatccgaatcaggctgctggttacatggcgaaactgatctggaacgcagtgtccgtcaccgtagtcgcagcagttgaggcgatgaactggctgaaaagtgcggcgaaattacttgctgctgaagtgaaggataagaagacggatacagttctgcgtggccgctgcgcagtacattgggtgactcccgacggcttccctgtgtggcaggaatacaagaagcctattcagacgcgcttgaacctgatgttcctcggtcagttccgcttacagcctaccattaacaccaacaaagatagcgagattgatgcacacaaacaggagtctggtatcgctcctaactttgtacacagccaagacggtaaccaccttcgtatgactgtagtgtgggcacacgagaagtacggaatcgaatcttttgcactgattcacgactccttcggtaccattccggctgacgctgcgaacctgttcaaagcagtgcgcgaaactatggtttcgacatatgagtcttgtgatgtactggctgatttctacgaccagttcgctgaccagttgcacgagtctcaattggacaaaatgccagcacttccggctaaaggtaacttgaacctccgtgacatcttaaaatcggacttcgcgttcgcg

SEQ ID NO: 76 - protein, 890 aa, synthetic construct
  REGION 1..890: note = Variant of RNA polymerase
MHHHHHHMNTINIAKNDFSDIELAAIPFNTLADHYGERLAREQLALEHESYEMGEARFRKMFERQLKAGEVADNAAAKPLITTLLPKMIARINDWFEEVKAKRGKRPTAFQFLQEIKPEAVAYITIKTTLACLTSADNTTVQAVASAIGRAIEDEARFGRIRDLEAKHFKENVEEQLNKRVGHVYKKAFMQVVEADMLSKGLLGGEAWSSWHKEDSIHVGVRCIEMLIESTGMVSLHRQNAGVVGQDSETIELAPEYAEAIATRAGALAGISPMFQPCVVPPKPWTGITGGGYWAAGRKPLQLVRTRSLAALRRYEEVSMPEVIKAVNIAQNTAWRVNKKVLDVANAITQWQHCPVADVPAMDRGEMPARPLDIDTNEIALKAWKKEASAFYRKDKARVSRRLSMEFMLSQANKFANYKAIWFPQNMDWRGRVYAVPMFNPQGNDMTKGLLTFAQGKPIGEDGFYWLKIHGANTAGVDKVPFPQRIKFVEDNHTNIMECAKAPLENTWWAEQDSPFCFLAFCFEYAGVINHGLSYNCSLPLAFDGSCSGIQHFSAMLRDEIGGKAVNLLPSAEVQDIYRIVSDKVNEVLKQDLINGTSTTLETVTDKKTGEITERTKYGTKVMAQWWLEHGVNRGVTKRSVMTLAYGSKEFGFRDQVLSDTIQPAIDNGKGDMFLNPNQAAGYMAKLIWNAVSVTVVAAVEAMNWLKSAAKLLAAEVKDKKTDTVLRGRCAVHWVTPDGFPVWQEYKKPIQTRLNLMFLGQFRLQPTINTNKDSEIDAHKQESGIAPNFVHSQDGNHLRMTVVWAHEKYGIESFALIHDSFGTIPADAANLFKAVRETMVSTYESCDVLADFYDQFADQLHESQLDKMPALPAKGNLNLRDILKSDFAFA

SEQ ID NO: 77 - DNA, 2670 bp, synthetic construct
  misc_feature 1..2670: note = Variant of RNA polymerase
  source 1..2670: mol_type = other DNA
atgcaccatcaccatcaccatatgaacacgattaacatcgctaagaacgacttctctgacatcgaactggctgctatcccgttcaacactctggctgaccattacggtgagcgtttagctcgcgaacagttggcccttgagcatgagtcttacgagatgggtgaagcacgcttccgcaagatgtttgagcgtcaacttaaagctggtgaggttgcggataacgctgccgccaagcctctcatcactaccctactccctaagatgattgcacgcatcaacgactggtttgaggaagtgaaagctaagcgcggcaagcgcccgacagccttccagttcctgcaagaaatcaagccggaagccgtagcgtacatcaccattaagaccactctggcttgcctaaccagtgcggacaatacaaccgttcaggctgtagcaagcgcaatcggtcgggccattgaggacgaggctcgcttcggtcgtatccgtgaccttgaagctaagcacttcaagaaaaacgttgaggaacaactcaacaagcgcgtagggcacgtctacaagaaagcatttatgcaagttgtcgaggctgacatgctctctaagggtctactcggtggcgaggcgtggtcttcgtggcataaggaagactctattcatgtaggagtacgctgcatcgagatgctcattgagtcaaccggaatggttagcttacaccgccaaaatgctggcgtagtaggtcaagactctgagactatcgaactcgcacctgaatacgctgaggctatcgcaacccgtgcaggtgcgctggctggcatctctccgatgttccaaccttgcgtagttcctcctaagccgtggactggcattactggtggtggctattgggctgcggggcgcaaacccctgcagttagtacgtactcgcagtctggcggcgcttcgccgctatgaagaagtgtcgatgccggaggtcatcaaagcagtcaacattgcgcagaatacagcatggcgtgtgaacaagaaagttctcgacgtagcgaatgcaatcacccaatggcagcactgtccagtcgcggatgtgcctgcgatggatcgtggcgaaatgccagctcgtccgttggacatcgataccaacgagattgcacttaaagcgtggaagaaagaagcttccgcgttctaccgcaaagacaaagcacgcgttagccgtcgtctgtcaatggagtttatgttatctcaggcgaacaagtttgcgaatgaaaaagcaatctggtttccgcaaaacatggattggcgtgggcgcgtgtacgctgtcccgatgttcaatcctcagggcaacgatatgacgaaaggcctgctgacctttgcgcagggtaaacccattggtgaagacggcttctattggctcaagattcatggcgcaaatacagctggagtggataaagtaccgtttccacaacgcatcaaatttgttgaggataaccatacgaatattatggaatgcgcgaaagcaccgctggaaaacacttggtgggcggaacaggactcgccgttctgttttctggcgttctgctttgagtatgctggcgtcatcaatcacggtctgtcgtacaactgtagcttgcctctggcatttgatggtagttgctccggcattcaacatttctcagcgatgttacgcgacgaaattggcggcaaagctgtgaatctcctcccatctgcggaagtgcaggatatttatcgtatcgtcagcgacaaagttaacgaggtactgaaacaagatctgattaacggtacctctaccaccttggaaacggtgactgataagaagacaggcgaaattaccgaacgcacgaaatacgggaccaaagttatggcacagtggtggttagaacacggtgtgaatcgtggcgtcacgaaacgctcggttatgactttggcgtatgggagcaaagagtttggattccgcgatcaagtgctgagtgacaccattcaaccggcgatcgataacggcaaaggtgacatgtttctgaatccgaatcaggctgctggttacatggcgaaactgatctggaacgcagtgtccgtcaccgtagtcgcagcagttgaggcgatgaactggctgaaaagtgcggcgaaattacttgctgctgaagtgaaggataagaagacggatacagttctgcgtggccgctgcgcagtacattgggtgactcccgacggcttccctgtgtggcaggaatacaagaagcctattcagacgcgcttgaacctgatgttcctcggtcagttccgcttacagcctaccattaacaccaacaaagatagcgagattgatgcacacaaacaggagtctggtatcgctcctaactttgtacacagccaagacggtaaccaccttcgtatgactgtagtgtgggcacacgagaagtacggaatcgaatcttttgcactgattcacgactccttcggtaccattccggctgacgctgcgaacctgttcaaagcagtgcgcgaaactatggtttcgacatatgagtcttgtgatgtactggctgatttctacgaccagttcgctgaccagttgcacgagtctcaattggacaaaatgccagcacttccggctaaaggtaacttgaacctccgtgacatcttaaaatcggacttcgcgttcgcg

SEQ ID NO: 78 - protein, 890 aa, synthetic construct
  REGION 1..890: note = Variant of RNA polymerase
MHHHHHHMNTINIAKNDFSDIELAAIPFNTLADHYGERLAREQLALEHESYEMGEARFRKMFERQLKAGEVADNAAAKPLITTLLPKMIARINDWFEEVKAKRGKRPTAFQFLQEIKPEAVAYITIKTTLACLTSADNTTVQAVASAIGRAIEDEARFGRIRDLEAKHFKKNVEEQLNKRVGHVYKKAFMQVVEADMLSKGLLGGEAWSSWHKEDSIHVGVRCIEMLIESTGMVSLHRQNAGVVGQDSETIELAPEYAEAIATRAGALAGISPMFQPCVVPPKPWTGITGGGYWAAGRKPLQLVRTRSLAALRRYEEVSMPEVIKAVNIAQNTAWRVNKKVLDVANAITQWQHCPVADVPAMDRGEMPARPLDIDTNEIALKAWKKEASAFYRKDKARVSRRLSMEFMLSQANKFANEKAIWFPQNMDWRGRVYAVPMFNPQGNDMTKGLLTFAQGKPIGEDGFYWLKIHGANTAGVDKVPFPQRIKFVEDNHTNIMECAKAPLENTWWAEQDSPFCFLAFCFEYAGVINHGLSYNCSLPLAFDGSCSGIQHFSAMLRDEIGGKAVNLLPSAEVQDIYRIVSDKVNEVLKQDLINGTSTTLETVTDKKTGEITERTKYGTKVMAQWWLEHGVNRGVTKRSVMTLAYGSKEFGFRDQVLSDTIQPAIDNGKGDMFLNPNQAAGYMAKLIWNAVSVTVVAAVEAMNWLKSAAKLLAAEVKDKKTDTVLRGRCAVHWVTPDGFPVWQEYKKPIQTRLNLMFLGQFRLQPTINTNKDSEIDAHKQESGIAPNFVHSQDGNHLRMTVVWAHEKYGIESFALIHDSFGTIPADAANLFKAVRETMVSTYESCDVLADFYDQFADQLHESQLDKMPALPAKGNLNLRDILKSDFAFA

SEQ ID NO: 79 - DNA, 2670 bp, synthetic construct
  misc_feature 1..2670: note = Variant of RNA polymerase
  source 1..2670: mol_type = other DNA
atgcaccatcaccatcaccatatgaacacgattaacatcgctaagaacgacttctctgacatcgaactggctgctatcccgttcaacactctggctgaccattacggtgagcgtttagctcgcgaacagttggcccttgagcatgagtcttacgagatgggtgaagcacgcttccgcaagatgtttgagcgtcaacttaaagctggtgaggttgcggataacgctgccgccaagcctctcatcactaccctactccctaagatgattgcacgcatcaacgactggtttgaggaagtgaaagctaagcgcggcaagcgcccgacagccttccagttcctgcaagaaatcaagccggaagccgtagcgtacatcaccattaagaccactctggcttgcctaaccagtgcggacaatacaaccgttcaggctgtagcaagcgcaatcggtcgggccattgaggacgaggctcgcttcggtcgtatccgtgaccttgaagctaagcacttcaagaaaaacgttgaggaacaactcaacaagcgcgtagggcacgtctacaagaaagcatttatgcaagttgtcgaggctgacatgctctctaagggtctactcggtggcgaggcgtggtcttcgtggcataaggaagactctattcatgtaggagtacgctgcatcgagatgctcattgagtcaaccggaatggttagcttacaccgccaaaatgctggcgtagtaggtcaagactctgagactatcgaactcgcacctgaatacgctgaggctatcgcaacccgtgcaggtgcgctggctggcatctctccgatgttccaaccttgcgtagttcctcctaagccgtggactggcattactggtggtggctattgggctgcggggcgcaaacccctgcagttagtacgtactcgcagtctggcggcgcttcgccgctatgaagaagtgtcgatgccggaggtcatcaaagcagtcaacattgcgcagaatacagcatggcgtgtgaacaagaaagttctcgacgtagcgaatgcaatcacccaatggcagcactgtccagtcgcggatgtgcctgcgatggatcgtggcgaaatgccagctcgtccgttggacatcgataccaacgagattgcacttaaagcgtggaagaaagaagcttccgcgttctaccgcaaagacaaagcacgcgttagccgtcgtctgtcaatggagtttatgttatctcaggcgaacaagtttgcgaattataaagcaatctggtttccgcaaaacatggattggcgtgggcgcgtgtacgctgtcccgatgttcaatcctcagggcaacgatatgacgaaaggcctgctgacctttgcgcagggtaaacccattggtgaagacggcttctattggctcaagattcatggcgcaaatacagctggagtggataaagtaccgtttccacaacgcatcaaatttgttgaggataaccatacgaatattatggaatgcgcgaaagcaccgctggaaaacacttggtgggcggaacaggactcgccgttctgttttctggcgttctgctttgagtatgctggcgtcatcaatcacggtctgtcgtacaactgtagcttgcctctggcatttgatggtagttgctccggcattcaacatttctcagcgatgttacgcgacgaaattggcggcaaagctgtgaatctcctcccatctgcggaagtgcaggatatttatctgatcgtcagcgacaaagttaacgaggtactgaaacaagatctgattaacggtacctctaccaccttggaaacggtgactgataagaagacaggcgaaattaccgaacgcacgaaatacgggaccaaagttatggcacagtggtggttagaacacggtgtgaatcgtggcgtcacgaaacgctcggttatgactttggcgtatgggagcaaagagtttggattccgcgatcaagtgctgagtgacaccattcaaccggcgatcgataacggcaaaggtgacatgtttctgaatccgaatcaggctgctggttacatggcgaaactgatctggaacgcagtgtccgtcaccgtagtcgcagcagttgaggcgatgaactggctgaaaagtgcggcgaaattacttgctgctgaagtgaaggataagaagacggatacagttctgcgtggccgctgcgcagtacattgggtgactcccgacggcttccctgtgtggcaggaatacaagaagcctattcagacgcgcttgaacctgatgttcctcggtcagttccgcttacagcctaccattaacaccaacaaagatagcgagattgatgcacacaaacaggagtctggtatcgctcctaactttgtacacagccaagacggtaaccaccttcgtatgactgtagtgtgggcacacgagaagtacggaatcgaatcttttgcactgattcacgactccttcggtaccattccggctgacgctgcgaacctgttcaaagcagtgcgcgaaactatggtttcgacatatgagtcttgtgatgtactggctgatttctacgaccagttcgctgaccagttgcacgagtctcaattggacaaaatgccagcacttccggctaaaggtaacttgaacctccgtgacatcttaaaatcggacttcgcgttcgcg

SEQ ID NO: 80 - protein, 890 aa, synthetic construct
  REGION 1..890: note = Variant of RNA polymerase
MHHHHHHMNTINIAKNDFSDIELAAIPFNTLADHYGERLAREQLALEHESYEMGEARFRKMFERQLKAGEVADNAAAKPLITTLLPKMIARINDWFEEVKAKRGKRPTAFQFLQEIKPEAVAYITIKTTLACLTSADNTTVQAVASAIGRAIEDEARFGRIRDLEAKHFKKNVEEQLNKRVGHVYKKAFMQVVEADMLSKGLLGGEAWSSWHKEDSIHVGVRCIEMLIESTGMVSLHRQNAGVVGQDSETIELAPEYAEAIATRAGALAGISPMFQPCVVPPKPWTGITGGGYWAAGRKPLQLVRTRSLAALRRYEEVSMPEVIKAVNIAQNTAWRVNKKVLDVANAITQWQHCPVADVPAMDRGEMPARPLDIDTNEIALKAWKKEASAFYRKDKARVSRRLSMEFMLSQANKFANYKAIWFPQNMDWRGRVYAVPMFNPQGNDMTKGLLTFAQGKPIGEDGFYWLKIHGANTAGVDKVPFPQRIKFVEDNHTNIMECAKAPLENTWWAEQDSPFCFLAFCFEYAGVINHGLSYNCSLPLAFDGSCSGIQHFSAMLRDEIGGKAVNLLPSAEVQDIYLIVSDKVNEVLKQDLINGTSTTLETVTDKKTGEITERTKYGTKVMAQWWLEHGVNRGVTKRSVMTLAYGSKEFGFRDQVLSDTIQPAIDNGKGDMFLNPNQAAGYMAKLIWNAVSVTVVAAVEAMNWLKSAAKLLAAEVKDKKTDTVLRGRCAVHWVTPDGFPVWQEYKKPIQTRLNLMFLGQFRLQPTINTNKDSEIDAHKQESGIAPNFVHSQDGNHLRMTVVWAHEKYGIESFALIHDSFGTIPADAANLFKAVRETMVSTYESCDVLADFYDQFADQLHESQLDKMPALPAKGNLNLRDILKSDFAFA

SEQ ID NO: 81 - DNA, 2670 bp, synthetic construct
  misc_feature 1..2670: note = Variant of RNA polymerase
  source 1..2670: mol_type = other DNA
atgcaccatcaccatcaccatatgaacacgattaacatcgctaagaacgacttctctgacatcgaactggctgctatcccgttcaacactctggctgaccattacggtgagcgtttagctcgcgaacagttggcccttgagcatgagtcttacgagatgggtgaagcacgcttccgcaagatgtttgagcgtcaacttaaagctggtgaggttgcggataacgctgccgccaagcctctcatcactaccctactccctaagatgattgcacgcatcaacgactggtttgaggaagtgaaagctaagcgcggcaagcgcccgacagccttccagttcctgcaagaaatcaagccggaagccgtagcgtacatcaccattaagaccactctggcttgcctaaccagtgcggacaatacaaccgttcaggctgtagcaagcgcaatcggtcgggccattgaggacgaggctcgcttcggtcgtatccgtgaccttgaagctaagcacttcaagaaaaacgttgaggaacaactcaacaagcgcgtagggcacgtctacaagaaagcatttatgcaagttgtcgaggctgacatgctctctaagggtctactcggtggcgaggcgtggtcttcgtggcataaggaagactctattcatgtaggagtacgctgcatcgagatgctcattgagtcaaccggaatggttagcttacaccgccaaaatgctggcgtagtaggtcaagactctgagactatcgaactcgcacctgaatacgctgaggctatcgcaacccgtgcaggtgcgctggctggcatctctccgatgttccaaccttgcgtagttcctcctaagccgtggactggcattactggtggtggctattgggctgcggggcgcaaacccctgcagttagtacgtactcgcagtctggcggcgcttcgccgctatgaagaagtgtcgatgccggaggtcatcaaagcagtcaacattgcgcagaatacagcatggcgtgtgaacaagaaagttctcgacgtagcgaatgcaatcacccaatggcagcactgtccagtcgcggatgtgcctgcgatggatcgtggcgaaatgccagctcgtccgttggacatcgataccaacgagattgcacttaaagcgtggaagaaagaagcttccgcgttctaccgcaaagacaaagcacgcgttagccgtcgtctgtcaatggagtttatgttatctcaggcgaacaagtttgcgaattataaagcaatctggtttccgcaaaacatggattggcgtgggcgcgtgtacgctgtcccgatgttcaatcctcagggcaacgatatgacgaaaggcctgctgacctttgcgcagggtaaacccattggtgaagacggcttctattggctcaagattcatggcgcaaatacagctggagtggataaagtaccgtttccacaacgcatcaaatttgttgaggataaccatacgaatattatggaatgcgcgaaagcaccgctggaaaacacttggtgggcggaacaggactcgccgttctgttttctggcgttctgctttgagtatgctggcgtcatcaatcacggtctgtcgtacaactgtagcttgcctctggcatttgatggtagttgctccggcattcaacatttctcagcgatgttacgcgacgaaattggcggcaaagctgtgaatctcctcccatctgcggaagtgcaggatatttatcgtatcgtcagcgacaaagttaacgaggtactgaaacaagatctgattaacggtacctctaccaccttggaaacggtgactgataagaagacaggcgaaattaccgaacgcacgaaatacgggaccaaagttatggcacagtggtggttagaacacggtgtgaatcgtggcgtcacgaaacgctcggttatgactttggcgtatgggagcaaagagtttggattccgcgatcaagtgctgagtgacaccattcaaccggcgatcgataacggcaaaggtgacatgtttctgaatccgaatcaggctgctggttacatggcgaaactgatctggaacgcagtgtccgtcacctttgtcgcagcagttgaggcgatgaactggctgaaaagtgcggcgaaattacttgctgctgaagtgaaggataagaagacggatacagttctgcgtggccgctgcgcagtacattgggtgactcccgacggcttccctgtgtggcaggaatacaagaagcctattcagacgcgcttgaacctgatgttcctcggtcagttccgcttacagcctaccattaacaccaacaaagatagcgagattgatgcacacaaacaggagtctggtatcgctcctaactttgtacacagccaagacggtaaccaccttcgtatgactgtagtgtgggcacacgagaagtacggaatcgaatcttttgcactgattcacgactccttcggtaccattccggctgacgctgcgaacctgttcaaagcagtgcgcgaaactatggtttcgacatatgagtcttgtgatgtactggctgatttctacgaccagttcgctgaccagttgcacgagtctcaattggacaaaatgccagcacttccggctaaaggtaacttgaacctccgtgacatcttaaaatcggacttcgcgttcgcg

SEQ ID NO: 82 - protein, 890 aa, synthetic construct
  REGION 1..890: note = Variant of RNA polymerase
MHHHHHHMNTINIAKNDFSDIELAAIPFNTLADHYGERLAREQLALEHESYEMGEARFRKMFERQLKAGEVADNAAAKPLITTLLPKMIARINDWFEEVKAKRGKRPTAFQFLQEIKPEAVAYITIKTTLACLTSADNTTVQAVASAIGRAIEDEARFGRIRDLEAKHFKKNVEEQLNKRVGHVYKKAFMQVVEADMLSKGLLGGEAWSSWHKEDSIHVGVRCIEMLIESTGMVSLHRQNAGVVGQDSETIELAPEYAEAIATRAGALAGISPMFQPCVVPPKPWTGITGGGYWAAGRKPLQLVRTRSLAALRRYEEVSMPEVIKAVNIAQNTAWRVNKKVLDVANAITQWQHCPVADVPAMDRGEMPARPLDIDTNEIALKAWKKEASAFYRKDKARVSRRLSMEFMLSQANKFANYKAIWFPQNMDWRGRVYAVPMFNPQGNDMTKGLLTFAQGKPIGEDGFYWLKIHGANTAGVDKVPFPQRIKFVEDNHTNIMECAKAPLENTWWAEQDSPFCFLAFCFEYAGVINHGLSYNCSLPLAFDGSCSGIQHFSAMLRDEIGGKAVNLLPSAEVQDIYRIVSDKVNEVLKQDLINGTSTTLETVTDKKTGEITERTKYGTKVMAQWWLEHGVNRGVTKRSVMTLAYGSKEFGFRDQVLSDTIQPAIDNGKGDMFLNPNQAAGYMAKLIWNAVSVTFVAAVEAMNWLKSAAKLLAAEVKDKKTDTVLRGRCAVHWVTPDGFPVWQEYKKPIQTRLNLMFLGQFRLQPTINTNKDSEIDAHKQESGIAPNFVHSQDGNHLRMTVVWAHEKYGIESFALIHDSFGTIPADAANLFKAVRETMVSTYESCDVLADFYDQFADQLHESQLDKMPALPAKGNLNLRDILKSDFAFA

SEQ ID NO: 83 - DNA, 2670 bp, synthetic construct
  misc_feature 1..2670: note = Variant of RNA polymerase
  source 1..2670: mol_type = other DNA
atgcaccatcaccatcaccatatgaacacgattaacatcgctaagaacgacttctctgacatcgaactggctgctatcccgttcaacactctggctgaccattacggtgagcgtttagctcgcgaacagttggcccttgagcatgagtcttacgagatgggtgaagcacgcttccgcaagatgtttgagcgtcaacttaaagctggtgaggttgcggataacgctgccactaagcctctcatcactaccctactccctaagatgattgcacgcatcaacgactggtttgaggaagtgaaagctaagcgcggcaagcgcccgacagccttccagttcctgcaagaaatcaagccggaagccgtagcgtacatcaccattaagaccactctggcttgcctaaccagtgcggacaatacaaccgttcaggctgtagcaagcgcaatcggtcgggccattgaggacgaggctcgcttcggtcgtatccgtgaccttgaagctaagcacttcaagaaaaacgttgaggaacaactcaacaagcgcgtagggcacgtctacaagaaagcatttatgcaagttgtcgaggctgacatgctctctaagggtctactcggtggcgaggcgtggtcttcgtggcataaggaagactctattcatgtaggagtacgctgcatcgagatgctcattgagtcaaccggaatggttagcttacaccgccaaaatgctggcgtagtaggtcaagactctgagactatcgaactcgcacctgaatacgctgaggctatcgcaacccgtgcaggtgcgctggctggcatctctccgatgttccaaccttgcgtagttcctcctaagccgtggactggcattactggtggtggctattgggctgcggggcgcaaacccctgcagttagtacgtactcgcagtctggcggcgcttcgccgctatgaagaagtgtcgatgccggaggtcatcaaagcagtcaacattgcgcagaatacagcatggcgtgtgaacaagaaagttctcgacgtagcgaatgcaatcacccaatggcagcactgtccagtcgcggatgtgcctgcgatggatcgtggcgaaatgccagctcgtccgttggacatcgataccaacgagattgcacttaaagcgtggaagaaagaagcttccgcgttctaccgcaaagacaaagcacgcgttagccgtcgtctgtcaatggagtttatgttatctcaggcgaacaagtttgcgaattataaagcaatctggtttccgcaaaacatggattggcgtgggcgcgtgtacgctgtcccgatgttcaatcctcagggcaacgatatgacgaaaggcctgctgacctttgcgcagggtaaacccattggtgaagacggcttctattggctcaagattcatggcgcaaatacagctggagtggataaagtaccgtttccacaacgcatcaaatttgttgaggataaccatacgaatattatggaatgcgcgaaagcaccgctggaaaacacttggtgggcggaacaggactcgccgttctgttttctggcgttctgctttgagtatgctggcgtcatcaatcacggtctgtcgtacaactgtagcttgcctctggcatttgatggtagttgctccggcattcaacatttctcagcgatgttacgcgacgaaattggcggcaaagctgtgaatctcctcccatctgcggaagtgcaggatatttatcgtatcgtcagcgacaaagttaacgaggtactgaaacaagatctgattaacggtacctctaccaccttggaaacggtgactgataagaagacaggcgaaattaccgaacgcacgaaatacgggaccaaagttatggcacagtggtggttagaacacggtgtgaatcgtggcgtcacgaaacgctcggttatgactttggcgtatgggagcaaagagtttggattccgcgatcaagtgctgagtgacaccattcaaccggcgatcgataacggcaaaggtgacatgtttctgaatccgaatcaggctgctggttacatggcgaaactgatctggaacgcagtgtccgtcaccgtagtcgcagcagttgaggcgatgaactggctgaaaagtgcggcgaaattacttgctgctgaagtgaaggataagaagacggatacagttctgcgtggccgctgcgcagtacattgggtgactcccgacggcttccctgtgtggcaggaatacaagaagcctattcagacgcgcttgaacctgatgttcctcggtcagttccgcttacagcctaccattaacaccaacaaagatagcgagattgatgcacacaaacaggagtctggtatcgctcctaactttgtacacagccaagacggtaaccaccttcgtatgactgtagtgtgggcacacgagaagtacggaatcgaatcttttgcactgattcacgactccttcggtaccattccggctgacgctgcgaacctgttcaaagcagtgcgcgaaactatggtttcgacatatgagtcttgtgatgtactggctgatttctacgaccagttcgctgaccagttgcacgagtctcaattggacaaaatgccagcacttccggctaaaggtaacttgaacctccgtgacatcttaaaatcggacttcgcgttcgcg

SEQ ID NO: 84 - protein, 890 aa, synthetic construct
  REGION 1..890: note = Variant of RNA polymerase
MHHHHHHMNTINIAKNDFSDIELAAIPFNTLADHYGERLAREQLALEHESYEMGEARFRKMFERQLKAGEVADNAATKPLITTLLPKMIARINDWFEEVKAKRGKRPTAFQFLQEIKPEAVAYITIKTTLACLTSADNTTVQAVASAIGRAIEDEARFGRIRDLEAKHFKKNVEEQLNKRVGHVYKKAFMQVVEADMLSKGLLGGEAWSSWHKEDSIHVGVRCIEMLIESTGMVSLHRQNAGVVGQDSETIELAPEYAEAIATRAGALAGISPMFQPCVVPPKPWTGITGGGYWAAGRKPLQLVRTRSLAALRRYEEVSMPEVIKAVNIAQNTAWRVNKKVLDVANAITQWQHCPVADVPAMDRGEMPARPLDIDTNEIALKAWKKEASAFYRKDKARVSRRLSMEFMLSQANKFANYKAIWFPQNMDWRGRVYAVPMFNPQGNDMTKGLLTFAQGKPIGEDGFYWLKIHGANTAGVDKVPFPQRIKFVEDNHTNIMECAKAPLENTWWAEQDSPFCFLAFCFEYAGVINHGLSYNCSLPLAFDGSCSGIQHFSAMLRDEIGGKAVNLLPSAEVQDIYRIVSDKVNEVLKQDLINGTSTTLETVTDKKTGEITERTKYGTKVMAQWWLEHGVNRGVTKRSVMTLAYGSKEFGFRDQVLSDTIQPAIDNGKGDMFLNPNQAAGYMAKLIWNAVSVTVVAAVEAMNWLKSAAKLLAAEVKDKKTDTVLRGRCAVHWVTPDGFPVWQEYKKPIQTRLNLMFLGQFRLQPTINTNKDSEIDAHKQESGIAPNFVHSQDGNHLRMTVVWAHEKYGIESFALIHDSFGTIPADAANLFKAVRETMVSTYESCDVLADFYDQFADQLHESQLDKMPALPAKGNLNLRDILKSDFAFA

SEQ ID NO: 85 - DNA, 2670 bp, synthetic construct
  misc_feature 1..2670: note = Variant of RNA polymerase
  source 1..2670: mol_type = other DNA
atgcaccatcaccatcaccatatgaacacgattaacatcgctaagaacgacttctctgacatcgaactggctgctatcccgttcaacactctggctgaccattacggtgagcgtttagctcgcgaacagttggcccttgagcatgagtcttacgagatgggtgaagcacgcttccgcaagatgtttgagcgtcaacttaaagctggtgaggttgcggataacgctgccgccaagcctctcatcactaccctactccctaagatgattgcacgcatcaacgactggtttgaggaagtgaaagctaagcgcggcaagcgcccgacagccttccagttcctgcaagaaatcaagccggaagccgtagcgtacatcaccattaagaccactctggcttgcctaaccagtgcggacaatacaaccgttcaggctgtagcaagcgcaatcggtcgggccattgaggacgaggctcgcttcggtcgtatccgtgaccttgaagctaagcacttcaagaaaaacgttgaggaacaactcaacaagcgcgtagggcacgtctacaagaaagcatttatgcaagttgtcgaggctgacatgctctctaagggtctactcggtggcgaggcgtggtcttcgtggcataaggaagactctattcatgtaggagtacgctgcatcgagatgctcattgagtcaaccggaatggttagcttacaccgccaaaatgctggcgtagtaggtcaagactctgagactatcgaactcgcacctgaatacgctgaggctatcgcaacccgtgcaggtgcgctggctggcatctctccgatgttccaaccttgcgtagttcctcctaagccgtggactggcattactggtggtggctattgggctgcggggcgcaaacccctgcagttagtacgtactcgcagtctggcggcgcttcgccgctatgaagaagtgtcgatgccggaggtcatcaaagcagtcaacattgcgcagaatacagcatggcgtattaacaagaaagttctcgacgtagcgaatgcaatcacccaatggcagcactgtccagtcgcggatgtgcctgcgatggatcgtggcgaaatgccagctcgtccgttggacatcgataccaacgagattgcacttaaagcgtggaagaaagaagcttccgcgttctaccgcaaagacaaagcacgcgttagccgtcgtctgtcaatggagtttatgttatctcaggcgaacaagtttgcgaattataaagcaatctggtttccgcaaaacatggattggcgtgggcgcgtgtacgctgtcccgatgttcaatcctcagggcaacgatatgacgaaaggcctgctgacctttgcgcagggtaaacccattggtgaagacggcttctattggctcaagattcatggcgcaaatacagctggagtggataaagtaccgtttccacaacgcatcaaatttgttgaggataaccatacgaatattatggaatgcgcgaaagcaccgctggaaaacacttggtgggcggaacaggactcgccgttctgttttctggcgttctgctttgagtatgctggcgtcatcaatcacggtctgtcgtacaactgtagcttgcctctggcatttgatggtagttgctccggcattcaacatttctcagcgatgttacgcgacgaaattggcggcaaagctgtgaatctcctcccatctgcggaagtgcaggatatttatcgtatcgtcagcgacaaagttaacgaggtactgaaacaagatctgattaacggtacctctaccaccttggaaacggtgactgataagaagacaggcgaaattaccgaacgcacgaaatacgggaccaaagttatggcacagtggtggttagaacacggtgtgaatcgtggcgtcacgaaacgctcggttatgactttggcgtatgggagcaaagagtttggattccgcgatcaagtgctgagtgacaccattcaaccggcgatcgataacggcaaaggtgacatgtttctgaatccgaatcaggctgctggttacatggcgaaactgatctggaacgcagtgtccgtcaccgtagtcgcagcagttgaggcgatgaactggctgaaaagtgcggcgaaattacttgctgctgaagtgaaggataagaagacggatacagttctgcgtggccgctgcgcagtacattgggtgactcccgacggcttccctgtgtggcaggaatacaagaagcctattcagacgcgcttgaacctgatgttcctcggtcagttccgcttacagcctaccattaacaccaacaaagatagcgagattgatgcacacaaacaggagtctggtatcgctcctaactttgtacacagccaagacggtaaccaccttcgtatgactgtagtgtgggcacacgagaagtacggaatcgaatcttttgcactgattcacgactccttcggtaccattccggctgacgctgcgaacctgttcaaagcagtgcgcgaaactatggtttcgacatatgagtcttgtgatgtactggctgatttctacgaccagttcgctgaccagttgcacgagtctcaattggacaaaatgccagcacttccggctaaaggtaacttgaacctccgtgacatcttaaaatcggacttcgcgttcgcg

SEQ ID NO: 86 - protein, 890 aa, synthetic construct
  REGION 1..890: note = Variant of RNA polymerase
MHHHHHHMNTINIAKNDFSDIELAAIPFNTLADHYGERLAREQLALEHESYEMGEARFRKMFERQLKAGEVADNAAAKPLITTLLPKMIARINDWFEEVKAKRGKRPTAFQFLQEIKPEAVAYITIKTTLACLTSADNTTVQAVASAIGRAIEDEARFGRIRDLEAKHFKKNVEEQLNKRVGHVYKKAFMQVVEADMLSKGLLGGEAWSSWHKEDSIHVGVRCIEMLIESTGMVSLHRQNAGVVGQDSETIELAPEYAEAIATRAGALAGISPMFQPCVVPPKPWTGITGGGYWAAGRKPLQLVRTRSLAALRRYEEVSMPEVIKAVNIAQNTAWRINKKVLDVANAITQWQHCPVADVPAMDRGEMPARPLDIDTNEIALKAWKKEASAFYRKDKARVSRRLSMEFMLSQANKFANYKAIWFPQNMDWRGRVYAVPMFNPQGNDMTKGLLTFAQGKPIGEDGFYWLKIHGANTAGVDKVPFPQRIKFVEDNHTNIMECAKAPLENTWWAEQDSPFCFLAFCFEYAGVINHGLSYNCSLPLAFDGSCSGIQHFSAMLRDEIGGKAVNLLPSAEVQDIYRIVSDKVNEVLKQDLINGTSTTLETVTDKKTGEITERTKYGTKVMAQWWLEHGVNRGVTKRSVMTLAYGSKEFGFRDQVLSDTIQPAIDNGKGDMFLNPNQAAGYMAKLIWNAVSVTVVAAVEAMNWLKSAAKLLAAEVKDKKTDTVLRGRCAVHWVTPDGFPVWQEYKKPIQTRLNLMFLGQFRLQPTINTNKDSEIDAHKQESGIAPNFVHSQDGNHLRMTVVWAHEKYGIESFALIHDSFGTIPADAANLFKAVRETMVSTYESCDVLADFYDQFADQLHESQLDKMPALPAKGNLNLRDILKSDFAFA

SEQ ID NO: 87 - DNA, 2670 bp, synthetic construct
  misc_feature 1..2670: note = Variant of RNA polymerase
  source 1..2670: mol_type = other DNA
atgcaccatcaccatcaccatatgaacacggagaacatcgctaagaacgacttctctgacatcgaactggctgctatcccgttcaacactctggctgaccattacggtgagcgtttagctcgcgaacagttggcccttgagcatgagtcttacgagatgggtgaagcacgcttccgcaagatgtttgagcgtcaacttaaagctggtgaggttgcggataacgctgccgccaagcctctcatcactaccctactccctaagatgattgcacgcatcaacgactggtttgaggaagtgaaagctaagcgcggcaagcgcccgacagccttccagttcctgcaagaaatcaagccggaagccgtagcgtacatcaccattaagaccactctggcttgcctaaccagtgcggacaatacaaccgttcaggctgtagcaagcgcaatcggtcgggccattgaggacgaggctcgcttcggtcgtatccgtgaccttgaagctaagcacttcaagaaaaacgttgaggaacaactcaacaagcgcgtagggcacgtctacaagaaagcatttatgcaagttgtcgaggctgacatgctctctaagggtctactcggtggcgaggcgtggtcttcgtggcataaggaagactctattcatgtaggagtacgctgcatcgagatgctcattgagtcaaccggaatggttagcttacaccgccaaaatgctggcgtagtaggtcaagactctgagactatcgaactcgcacctgaatacgctgaggctatcgcaacccgtgcaggtgcgctggctggcatctctccgatgttccaaccttgcgtagttcctcctaagccgtggactggcattactggtggtggctattgggctgcggggcgcaaacccctgcagttagtacgtactcgcagtctggcggcgcttcgccgctatgaagaagtgtcgatgccggaggtcatcaaagcagtcaacattgcgcagaatacagcatggcgtgtgaacaagaaagttctcgacgtagcgaatgcaatcacccaatggcagcactgtccagtcgcggatgtgcctgcgatggatcgtggcgaaatgccagctcgtccgttggacatcgataccaacgagattgcacttaaagcgtggaagaaagaagcttccgcgttctaccgcaaagacaaagcacgcgttagccgtcgtctgtcaatggagtttatgttatctcaggcgaacaagtttgcgaattataaagcaatctggtttccgcaaaacatggattggcgtgggcgcgtgtacgctgtcccgatgttcaatcctcagggcaacgatatgacgaaaggcctgctgacctttgcgcagggtaaacccattggtgaagacggcttctattggctcaagattcatggcgcaaatacagctggagtggataaagtaccgtttccacaacgcatcaaatttgttgaggataaccatacgaatattatggaatgcgcgaaagcaccgctggaaaacacttggtgggcggaacaggactcgccgttctgttttctggcgttctgctttgagtatgctggcgtcatcaatcacggtctgtcgtacaactgtagcttgcctctggcatttgatggtagttgctccggcattcaacatttctcagcgatgttacgcgacgaaattggcggcaaagctgtgaatctcctcccatctgcggaagtgcaggatatttatcgtatcgtcagcgacaaagttaacgaggtactgaaacaagatctgattaacggtacctctaccaccttggaaacggtgactgataagaagacaggcgaaattaccgaacgcacgaaatacgggaccaaagttatggcacagtggtggttagaacacggtgtgaatcgtggcgtcacgaaacgctcggttatgactttggcgtatgggagcaaagagtttggattccgcgatcaagtgctgagtgacaccattcaaccggcgatcgataacggcaaaggtgacatgtttctgaatccgaatcaggctgctggttacatggcgaaactgatctggaacgcagtgtccgtcaccgtagtcgcagcagttgaggcgatgaactggctgaaaagtgcggcgaaattacttgctgctgaagtgaaggataagaagacggatacagttctgcgtggccgctgcgcagtacattgggtgactcccgacggcttccctgtgtggcaggaatacaagaagcctattcagacgcgcttgaacctgatgttcctcggtcagttccgcttacagcctaccattaacaccaacaaagatagcgagattgatgcacacaaacaggagtctggtatcgctcctaactttgtacacagccaagacggtaaccaccttcgtatgactgtagtgtgggcacacgagaagtacggaatcgaatcttttgcactgattcacgactccttcggtaccattccggctgacgctgcgaacctgttcaaagcagtgcgcgaaactatggtttcgacatatgagtcttgtgatgtactggctgatttctacgaccagttcgctgaccagttgcacgagtctcaattggacaaaatgccagcacttccggctaaaggtaacttgaacctccgtgacatcttaaaatcggacttcgcgttcgcg

SEQ ID NO: 88 - protein, 890 aa, synthetic construct
  REGION 1..890: note = Variant of RNA polymerase
MHHHHHHMNTENIAKNDFSDIELAAIPFNTLADHYGERLAREQLALEHESYEMGEARFRKMFERQLKAGEVADNAAAKPLITTLLPKMIARINDWFEEVKAKRGKRPTAFQFLQEIKPEAVAYITIKTTLACLTSADNTTVQAVASAIGRAIEDEARFGRIRDLEAKHFKKNVEEQLNKRVGHVYKKAFMQVVEADMLSKGLLGGEAWSSWHKEDSIHVGVRCIEMLIESTGMVSLHRQNAGVVGQDSETIELAPEYAEAIATRAGALAGISPMFQPCVVPPKPWTGITGGGYWAAGRKPLQLVRTRSLAALRRYEEVSMPEVIKAVNIAQNTAWRVNKKVLDVANAITQWQHCPVADVPAMDRGEMPARPLDIDTNEIALKAWKKEASAFYRKDKARVSRRLSMEFMLSQANKFANYKAIWFPQNMDWRGRVYAVPMFNPQGNDMTKGLLTFAQGKPIGEDGFYWLKIHGANTAGVDKVPFPQRIKFVEDNHTNIMECAKAPLENTWWAEQDSPFCFLAFCFEYAGVINHGLSYNCSLPLAFDGSCSGIQHFSAMLRDEIGGKAVNLLPSAEVQDIYRIVSDKVNEVLKQDLINGTSTTLETVTDKKTGEITERTKYGTKVMAQWWLEHGVNRGVTKRSVMTLAYGSKEFGFRDQVLSDTIQPAIDNGKGDMFLNPNQAAGYMAKLIWNAVSVTVVAAVEAMNWLKSAAKLLAAEVKDKKTDTVLRGRCAVHWVTPDGFPVWQEYKKPIQTRLNLMFLGQFRLQPTINTNKDSEIDAHKQESGIAPNFVHSQDGNHLRMTVVWAHEKYGIESFALIHDSFGTIPADAANLFKAVRETMVSTYESCDVLADFYDQFADQLHESQLDKMPALPAKGNLNLRDILKSDFAFA

SEQ ID NO: 89 - DNA, 2670 bp, synthetic construct
  misc_feature 1..2670: note = Variant of RNA polymerase
  source 1..2670: mol_type = other DNA
atgcaccatcaccatcaccatatgaacacgattaacatcgctaagaacgacttctctgacatcgaactggctgctatcccgttcaacactctggctgaccattacggtgagcgtttagctcgcgaacagttggcccttgagcatgagtcttacgagatgggtgaagcacgcttccgcaagatgtttgagcgtcaacttaaagctggtgaggttgcggataacgctgccgccaagcctctcatcactaccctactccctaagatgattgcacgcatcaacgactggtttgaggaagtgaaagctaagcgcggcaagcgcccgacagccttccagttcctgcaagaaatcaagccggaagccgtagcgtacatcaccattaagaccactctggcttgcctaaccagtgcggacaatacaaccgttcaggctgtagcaagcgcaatcggtcgggccattgaggacgaggctcgcttcggtcgtatccgtgaccttgaagctaagcacttcaagaaaaacgttgaggaacaactcaacaagcgcgtagggcacgtctacaagaaagcatttatgcaagttgtcgaggctgaccagctctctaagggtctactcggtggcgaggcgtggtcttcgtggcataaggaagactctattcatgtaggagtacgctgcatcgagatgctcattgagtcaaccggaatggttagcttacaccgccaaaatgctggcgtagtaggtcaagactctgagactatcgaactcgcacctgaatacgctgaggctatcgcaacccgtgcaggtgcgctggctggcatctctccgatgttccaaccttgcgtagttcctcctaagccgtggactggcattactggtggtggctattgggctgcggggcgcaaacccctgcagttagtacgtactcgcagtctggcggcgcttcgccgctatgaagaagtgtcgatgccggaggtcatcaaagcagtcaacattgcgcagaatacagcatggcgtgtgaacaagaaagttctcgacgtagcgaatgcaatcacccaatggcagcactgtccagtcgcggatgtgcctgcgatggatcgtggcgaaatgccagctcgtccgttggacatcgataccaacgagattgcacttaaagcgtggaagaaagaagcttccgcgttctaccgcaaagacaaagcacgcgttagccgtcgtctgtcaatggagtttatgttatctcaggcgaacaagtttgcgaattataaagcaatctggtttccgcaaaacatggattggcgtgggcgcgtgtacgctgtcccgatgttcaatcctcagggcaacgatatgacgaaaggcctgctgacctttgcgcagggtaaacccattggtgaagacggcttctattggctcaagattcatggcgcaaatacagctggagtggataaagtaccgtttccacaacgcatcaaatttgttgaggataaccatacgaatattatggaatgcgcgaaagcaccgctggaaaacacttggtgggcggaacaggactcgccgttctgttttctggcgttctgctttgagtatgctggcgtcatcaatcacggtctgtcgtacaactgtagcttgcctctggcatttgatggtagttgctccggcattcaacatttctcagcgatgttacgcgacgaaattggcggcaaagctgtgaatctcctcccatctgcggaagtgcaggatatttatcgtatcgtcagcgacaaagttaacgaggtactgaaacaagatctgattaacggtacctctaccaccttggaaacggtgactgataagaagacaggcgaaattaccgaacgcacgaaatacgggaccaaagttatggcacagtggtggttagaacacggtgtgaatcgtggcgtcacgaaacgctcggttatgactttggcgtatgggagcaaagagtttggattccgcgatcaagtgctgagtgacaccattcaaccggcgatcgataacggcaaaggtgacatgtttctgaatccgaatcaggctgctggttacatggcgaaactgatctggaacgcagtgtccgtcaccgtagtcgcagcagttgaggcgatgaactggctgaaaagtgcggcgaaattacttgctgctgaagtgaaggataagaagacggatacagttctgcgtggccgctgcgcagtacattgggtgactcccgacggcttccctgtgtggcaggaatacaagaagcctattcagacgcgcttgaacctgatgttcctcggtcagttccgcttacagcctaccattaacaccaacaaagatagcgagattgatgcacacaaacaggagtctggtatcgctcctaactttgtacacagccaagacggtaaccaccttcgtatgactgtagtgtgggcacacgagaagtacggaatcgaatcttttgcactgattcacgactccttcggtaccattccggctgacgctgcgaacctgttcaaagcagtgcgcgaaactatggtttcgacatatgagtcttgtgatgtactggctgatttctacgaccagttcgctgaccagttgcacgagtctcaattggacaaaatgccagcacttccggctaaaggtaacttgaacctccgtgacatcttaaaatcggacttcgcgttcgcg

SEQ ID NO: 90 - protein, 890 aa, synthetic construct
  REGION 1..890: note = Variant of RNA polymerase
MHHHHHHMNTINIAKNDFSDIELAAIPFNTLADHYGERLAREQLALEHESYEMGEARFRKMFERQLKAGEVADNAAAKPLITTLLPKMIARINDWFEEVKAKRGKRPTAFQFLQEIKPEAVAYITIKTTLACLTSADNTTVQAVASAIGRAIEDEARFGRIRDLEAKHFKKNVEEQLNKRVGHVYKKAFMQVVEADQLSKGLLGGEAWSSWHKEDSIHVGVRCIEMLIESTGMVSLHRQNAGVVGQDSETIELAPEYAEAIATRAGALAGISPMFQPCVVPPKPWTGITGGGYWAAGRKPLQLVRTRSLAALRRYEEVSMPEVIKAVNIAQNTAWRVNKKVLDVANAITQWQHCPVADVPAMDRGEMPARPLDIDTNEIALKAWKKEASAFYRKDKARVSRRLSMEFMLSQANKFANYKAIWFPQNMDWRGRVYAVPMFNPQGNDMTKGLLTFAQGKPIGEDGFYWLKIHGANTAGVDKVPFPQRIKFVEDNHTNIMECAKAPLENTWWAEQDSPFCFLAFCFEYAGVINHGLSYNCSLPLAFDGSCSGIQHFSAMLRDEIGGKAVNLLPSAEVQDIYRIVSDKVNEVLKQDLINGTSTTLETVTDKKTGEITERTKYGTKVMAQWWLEHGVNRGVTKRSVMTLAYGSKEFGFRDQVLSDTIQPAIDNGKGDMFLNPNQAAGYMAKLIWNAVSVTVVAAVEAMNWLKSAAKLLAAEVKDKKTDTVLRGRCAVHWVTPDGFPVWQEYKKPIQTRLNLMFLGQFRLQPTINTNKDSEIDAHKQESGIAPNFVHSQDGNHLRMTVVWAHEKYGIESFALIHDSFGTIPADAANLFKAVRETMVSTYESCDVLADFYDQFADQLHESQLDKMPALPAKGNLNLRDILKSDFAFA

SEQ ID NO: 91 - DNA, 2670 bp, synthetic construct
  misc_feature 1..2670: note = Variant of RNA polymerase
  source 1..2670: mol_type = other DNA
atgcaccatcaccatcaccatatgaacacgattaacatcgctaagaacgacttctctgacatcgaactggctgctatcccgttcaacactctggctgaccattacggtgagcgtttagctcgcgaacagttggcccttgagcatgagtcttacgagatgggtgaagcacgcttccgcaagatgtttgagcgtcaacttaaagctggtgaggttgcggataacgctgccgccaagcctctcatcactaccctactccctaagatgattgcacgcatcaacgactggtttgaggaagtgaaagctaagcgcggcaagcgcccgacagccttccagttcctgcaagaaatcaagccggaagccgtagcgtacatcaccattaagaccactctggcttgcctaaccagtgcggacaatacaaccgttcaggctgtagcaagcgcaatcggtcgggccattgaggacgaggctcgcttcggtcgtatccgtgaccttgaagctaagcacttcaagaaaaacgttgaggaacaactcaacaagcgcgtagggcacgtctacaagaaagcatttatgcaagttgtcgaggctgacatgctctctctgggtctactcggtggcgaggcgtggtcttcgtggcataaggaagactctattcatgtaggagtacgctgcatcgagatgctcattgagtcaaccggaatggttagcttacaccgccaaaatgctggcgtagtaggtcaagactctgagactatcgaactcgcacctgaatacgctgaggctatcgcaacccgtgcaggtgcgctggctggcatctctccgatgttccaaccttgcgtagttcctcctaagccgtggactggcattactggtggtggctattgggctgcggggcgcaaacccctgcagttagtacgtactcgcagtctggcggcgcttcgccgctatgaagaagtgtcgatgccggaggtcatcaaagcagtcaacattgcgcagaatacagcatggcgtgtgaacaagaaagttctcgacgtagcgaatgcaatcacccaatggcagcactgtccagtcgcggatgtgcctgcgatggatcgtggcgaaatgccagctcgtccgttggacatcgataccaacgagattgcacttaaagcgtggaagaaagaagcttccgcgttctaccgcaaagacaaagcacgcgttagccgtcgtctgtcaatggagtttatgttatctcaggcgaacaagtttgcgaattataaagcaatctggtttccgcaaaacatggattggcgtgggcgcgtgtacgctgtcccgatgttcaatcctcagggcaacgatatgacgaaaggcctgctgacctttgcgcagggtaaacccattggtgaagacggcttctattggctcaagattcatggcgcaaatacagctggagtggataaagtaccgtttccacaacgcatcaaatttgttgaggataaccatacgaatattatggaatgcgcgaaagcaccgctggaaaacacttggtgggcggaacaggactcgccgttctgttttctggcgttctgctttgagtatgctggcgtcatcaatcacggtctgtcgtacaactgtagcttgcctctggcatttgatggtagttgctccggcattcaacatttctcagcgatgttacgcgacgaaattggcggcaaagctgtgaatctcctcccatctgcggaagtgcaggatatttatcgtatcgtcagcgacaaagttaacgaggtactgaaacaagatctgattaacggtacctctaccaccttggaaacggtgactgataagaagacaggcgaaattaccgaacgcacgaaatacgggaccaaagttatggcacagtggtggttagaacacggtgtgaatcgtggcgtcacgaaacgctcggttatgactttggcgtatgggagcaaagagtttggattccgcgatcaagtgctgagtgacaccattcaaccggcgatcgataacggcaaaggtgacatgtttctgaatccgaatcaggctgctggttacatggcgaaactgatctggaacgcagtgtccgtcaccgtagtcgcagcagttgaggcgatgaactggctgaaaagtgcggcgaaattacttgctgctgaagtgaaggataagaagacggatacagttctgcgtggccgctgcgcagtacattgggtgactcccgacggcttccctgtgtggcaggaatacaagaagcctattcagacgcgcttgaacctgatgttcctcggtcagttccgcttacagcctaccattaacaccaacaaagatagcgagattgatgcacacaaacaggagtctggtatcgctcctaactttgtacacagccaagacggtaaccaccttcgtatgactgtagtgtgggcacacgagaagtacggaatcgaatcttttgcactgattcacgactccttcggtaccattccggctgacgctgcgaacctgttcaaagcagtgcgcgaaactatggtttcgacatatgagtcttgtgatgtactggctgatttctacgaccagttcgctgaccagttgcacgagtctcaattggacaaaatgccagcacttccggctaaaggtaacttgaacctccgtgacatcttaaaatcggacttcgcgttcgcg

SEQ ID NO: 92 - protein, 890 aa, synthetic construct
  REGION 1..890: note = Variant of RNA polymerase
MHHHHHHMNTINIAKNDFSDIELAAIPFNTLADHYGERLAREQLALEHESYEMGEARFRKMFERQLKAGEVADNAAAKPLITTLLPKMIARINDWFEEVKAKRGKRPTAFQFLQEIKPEAVAYITIKTTLACLTSADNTTVQAVASAIGRAIEDEARFGRIRDLEAKHFKKNVEEQLNKRVGHVYKKAFMQVVEADMLSLGLLGGEAWSSWHKEDSIHVGVRCIEMLIESTGMVSLHRQNAGVVGQDSETIELAPEYAEAIATRAGALAGISPMFQPCVVPPKPWTGITGGGYWAAGRKPLQLVRTRSLAALRRYEEVSMPEVIKAVNIAQNTAWRVNKKVLDVANAITQWQHCPVADVPAMDRGEMPARPLDIDTNEIALKAWKKEASAFYRKDKARVSRRLSMEFMLSQANKFANYKAIWFPQNMDWRGRVYAVPMFNPQGNDMTKGLLTFAQGKPIGEDGFYWLKIHGANTAGVDKVPFPQRIKFVEDNHTNIMECAKAPLENTWWAEQDSPFCFLAFCFEYAGVINHGLSYNCSLPLAFDGSCSGIQHFSAMLRDEIGGKAVNLLPSAEVQDIYRIVSDKVNEVLKQDLINGTSTTLETVTDKKTGEITERTKYGTKVMAQWWLEHGVNRGVTKRSVMTLAYGSKEFGFRDQVLSDTIQPAIDNGKGDMFLNPNQAAGYMAKLIWNAVSVTVVAAVEAMNWLKSAAKLLAAEVKDKKTDTVLRGRCAVHWVTPDGFPVWQEYKKPIQTRLNLMFLGQFRLQPTINTNKDSEIDAHKQESGIAPNFVHSQDGNHLRMTVVWAHEKYGIESFALIHDSFGTIPADAANLFKAVRETMVSTYESCDVLADFYDQFADQLHESQLDKMPALPAKGNLNLRDILKSDFAFA

SEQ ID NO: 93 - DNA, 2670 bp, synthetic construct
  misc_feature 1..2670: note = Variant of RNA polymerase
  source 1..2670: mol_type = other DNA
atgcaccatcaccatcaccatatgaacacgattaacatcgctaagaacgacttctctgacatcgaactggctgctatcccgttcaacactctggctgaccattacggtgagcgtttagctcgcgaacagttggcccttgagcatgagtcttacgagatgggtgaagcacgcttccgcaagatgtttgagcgtcaacttaaagctggtgaggttgcggataacgctgccgccaagcctctcatcactaccctactccctaagatgattgcacgcatcaacgactggtttgaggaagtgaaagctaagcgcggcaagcgcccgacagccttccagttcctgcaagaaatcaagccggaagccgtagcgtacatcaccattaagaccactctggcttgcctaaccagtgcggacaatacaaccgttcaggctgtagcaagcgcaatcggtcgggccattgaggacgaggctcgcttcggtcgtatccgtgaccttgaagctaagcacttcaagaaaaacgttgaggaacaactcaacaagcgcgtagggcacgtctactgtaaagcatttatgcaagttgtcgaggctgacatgctctctaagggtctactcggtggcgaggcgtggtcttcgtggcataaggaagactctattcatgtaggagtacgctgcatcgagatgctcattgagtcaaccggaatggttagcttacaccgccaaaatgctggcgtagtaggtcaagactctgagactatcgaactcgcacctgaatacgctgaggctatcgcaacccgtgcaggtgcgctggctggcatctctccgatgttccaaccttgcgtagttcctcctaagccgtggactggcattactggtggtggctattgggctgcggggcgcaaacccctgcagttagtacgtactcgcagtctggcggcgcttcgccgctatgaagaagtgtcgatgccggaggtcatcaaagcagtcaacattgcgcagaatacagcatggcgtgtgaacaagaaagttctcgacgtagcgaatgcaatcacccaatggcagcactgtccagtcgcggatgtgcctgcgatggatcgtggcgaaatgccagctcgtccgttggacatcgataccaacgagattgcacttaaagcgtggaagaaagaagcttccgcgttctaccgcaaagacaaagcacgcgttagccgtcgtctgtcaatggagtttatgttatctcaggcgaacaagtttgcgaattataaagcaatctggtttccgcaaaacatggattggcgtgggcgcgtgtacgctgtcccgatgttcaatcctcagggcaacgatatgacgaaaggcctgctgacctttgcgcagggtaaacccattggtgaagacggcttctattggctcaagattcatggcgcaaatacagctggagtggataaagtaccgtttccacaacgcatcaaatttgttgaggataaccatacgaatattatggaatgcgcgaaagcaccgctggaaaacacttggtgggcggaacaggactcgccgttctgttttctggcgttctgctttgagtatgctggcgtcatcaatcacggtctgtcgtacaactgtagcttgcctctggcatttgatggtagttgctccggcattcaacatttctcagcgatgttacgcgacgaaattggcggcaaagctgtgaatctcctcccatctgcggaagtgcaggatatttatcgtatcgtcagcgacaaagttaacgaggtactgaaacaagatctgattaacggtacctctaccaccttggaaacggtgactgataagaagacaggcgaaattaccgaacgcacgaaatacgggaccaaagttatggcacagtggtggttagaacacggtgtgaatcgtggcgtcacgaaacgctcggttatgactttggcgtatgggagcaaagagtttggattccgcgatcaagtgctgagtgacaccattcaaccggcgatcgataacggcaaaggtgacatgtttctgaatccgaatcaggctgctggttacatggcgaaactgatctggaacgcagtgtccgtcaccgtagtcgcagcagttgaggcgatgaactggctgaaaagtgcggcgaaattacttgctgctgaagtgaaggataagaagacggatacagttctgcgtggccgctgcgcagtacattgggtgactcccgacggcttccctgtgtggcaggaatacaagaagcctattcagacgcgcttgaacctgatgttcctcggtcagttccgcttacagcctaccattaacaccaacaaagatagcgagattgatgcacacaaacaggagtctggtatcgctcctaactttgtacacagccaagacggtaaccaccttcgtatgactgtagtgtgggcacacgagaagtacggaatcgaatcttttgcactgattcacgactccttcggtaccattccggctgacgctgcgaacctgttcaaagcagtgcgcgaaactatggtttcgacatatgagtcttgtgatgtactggctgatttctacgaccagttcgctgaccagttgcacgagtctcaattggacaaaatgccagcacttccggctaaaggtaacttgaacctccgtgacatcttaaaatcggacttcgcgttcgcg

SEQ ID NO: 94 - protein, 890 aa, synthetic construct
  REGION 1..890: note = Variant of RNA polymerase
MHHHHHHMNTINIAKNDFSDIELAAIPFNTLADHYGERLAREQLALEHESYEMGEARFRKMFERQLKAGEVADNAAAKPLITTLLPKMIARINDWFEEVKAKRGKRPTAFQFLQEIKPEAVAYITIKTTLACLTSADNTTVQAVASAIGRAIEDEARFGRIRDLEAKHFKKNVEEQLNKRVGHVYCKAFMQVVEADMLSKGLLGGEAWSSWHKEDSIHVGVRCIEMLIESTGMVSLHRQNAGVVGQDSETIELAPEYAEAIATRAGALAGISPMFQPCVVPPKPWTGITGGGYWAAGRKPLQLVRTRSLAALRRYEEVSMPEVIKAVNIAQNTAWRVNKKVLDVANAITQWQHCPVADVPAMDRGEMPARPLDIDTNEIALKAWKKEASAFYRKDKARVSRRLSMEFMLSQANKFANYKAIWFPQNMDWRGRVYAVPMFNPQGNDMTKGLLTFAQGKPIGEDGFYWLKIHGANTAGVDKVPFPQRIKFVEDNHTNIMECAKAPLENTWWAEQDSPFCFLAFCFEYAGVINHGLSYNCSLPLAFDGSCSGIQHFSAMLRDEIGGKAVNLLPSAEVQDIYRIVSDKVNEVLKQDLINGTSTTLETVTDKKTGEITERTKYGTKVMAQWWLEHGVNRGVTKRSVMTLAYGSKEFGFRDQVLSDTIQPAIDNGKGDMFLNPNQAAGYMAKLIWNAVSVTVVAAVEAMNWLKSAAKLLAAEVKDKKTDTVLRGRCAVHWVTPDGFPVWQEYKKPIQTRLNLMFLGQFRLQPTINTNKDSEIDAHKQESGIAPNFVHSQDGNHLRMTVVWAHEKYGIESFALIHDSFGTIPADAANLFKAVRETMVSTYESCDVLADFYDQFADQLHESQLDKMPALPAKGNLNLRDILKSDFAFA

SEQ ID NO: 95 - DNA, 2670 bp, synthetic construct
  misc_feature 1..2670: note = Variant of RNA polymerase
  source 1..2670: mol_type = other DNA
atgcaccatcaccatcaccatatgaacacgattaacatcgctaagaacgacttctctgacatcgaactggctgctatcccgttcaacactctggctgaccattacggtgagcgtttagctcgcgaacagttggcccttgagcatgagtcttacgagatgggtgaagcacgcttccgcaagatgtttgaggatcaacttaaagctggtgaggttgcggataacgctgccgccaagcctctcatcactaccctactccctaagatgattgcacgcatcaacgactggtttgaggaagtgaaagctaagcgcggcaagcgcccgacagccttccagttcctgcaagaaatcaagccggaagccgtagcgtacatcaccattaagaccactctggcttgcctaaccagtgcggacaatacaaccgttcaggctgtagcaagcgcaatcggtcgggccattgaggacgaggctcgcttcggtcgtatccgtgaccttgaagctaagcacttcaagaaaaacgttgaggaacaactcaacaagcgcgtagggcacgtctacaagaaagcatttatgcaagttgtcgaggctgacatgctctctaagggtctactcggtggcgaggcgtggtcttcgtggcataaggaagactctattcatgtaggagtacgctgcatcgagatgctcattgagtcaaccggaatggttagcttacaccgccaaaatgctggcgtagtaggtcaagactctgagactatcgaactcgcacctgaatacgctgaggctatcgcaacccgtgcaggtgcgctggctggcatctctccgatgttccaaccttgcgtagttcctcctaagccgtggactggcattactggtggtggctattgggctgtggggcgcaaacccctgcagttagtacgtactcgcagtctggcggcgcttcgccgctatgaagaagtgtcgatgccggaggtcatcaaagcagtcaacattgcgcagaatacagcatggcgtgtgaacaagaaagttctcgacgtagcgaatgcaatcacccaatggcagcactgtccagtcgcggatgtgcctgcgatggatcgtggcgaaatgccagctcgtccgttggacatcgataccaacgagattgcacttaaagcgtggaagaaagaagcttccgcgttctaccgcaaagacaaagcacgcgttagccgtcgtctgtcaatggagtttatgttatctcaggcgaacaagtttgcgaattataaagcaatctggtttccgcaaaacatggattggcgtgggcgcgtgtacgctgtcccgatgttcaatcctcagggcaacgatatgacgaaaggcctgctgacctttgcgcagggtaaacccattggtgaagacggcttctattggctcaagattcatggcgcaaatacagctggagtggataaagtaccgtttccacaacgcatcaaatttgttgaggataaccatacgaatattatggaatgcgcgaaagcaccgctggaaaacacttggtgggcggaacaggactcgccgttctgttttctggcgttctgctttgagtatgctggcgtcatcaatcacggtctgtcgtacaactgtagcttgcctctggcatttgatggtagttgctccggcattcaacatttctcagcgatgttacgcgacgaaattggcggcaaagctgtgaatctcctcccatctgcggaagtgcaggatatttatcgtatcgtcagcgacaaagttaacgaggtactgaaacaagatctgattaacggtacctctaccaccttggaaacggtgactgataagaagacaggcgaaattaccgaacgcacgaaatacgggaccaaagttatggcacagtggtggttagaacacggtgtgaatcgtggcgtcacgaaacgctcggttatgactttggcgtatgggagcaaagagtttggattccgcgatcaagtgctgagtgacaccattcaaccggcgatcgataacggcaaaggtgacatgtttctgaatccgaatcaggctgctggttacatggcgaaactgatctggaacgcagtgtccgtcaccgtagtcgcagcagttgaggcgatgaactggctgaaaagtgcggcgaaattacttgctgctgaagtgaaggataagaagacggatacagttctgcgtggccgctgcgcagtacattgggtgactcccgacggcttccctgtgtggcaggaatacaagaagcctattcagacgcgcttgaacctgatgttcctcggtcagttccgcttacagcctaccattaacaccaacaaagatagcgagattgatgcacacaaacaggagtctggtatcgctcctaactttgtacacagccaagacggtaaccaccttcgtatgactgtagtgtgggcacacgagaagtacggaatcgaatcttttgcactgattcacgactccttcggtaccattccggctgacgctgcgaacctgttcaaagcagtgcgcgaaactatggtttcgacatatgagtcttgtgatgtactggctgatttctacgaccagttcgctgaccagttgcacgagtctcaattggacaaaatgccagcacttccggctaaaggtaacttgaacctccgtgacatcttaaaatcggacttcgcgttcgcg

SEQ ID NO: 96 - protein, 890 aa, synthetic construct
  REGION 1..890: note = Variant of RNA polymerase
MHHHHHHMNTINIAKNDFSDIELAAIPFNTLADHYGERLAREQLALEHESYEMGEARFRKMFEDQLKAGEVADNAAAKPLITTLLPKMIARINDWFEEVKAKRGKRPTAFQFLQEIKPEAVAYITIKTTLACLTSADNTTVQAVASAIGRAIEDEARFGRIRDLEAKHFKKNVEEQLNKRVGHVYKKAFMQVVEADMLSKGLLGGEAWSSWHKEDSIHVGVRCIEMLIESTGMVSLHRQNAGVVGQDSETIELAPEYAEAIATRAGALAGISPMFQPCVVPPKPWTGITGGGYWAVGRKPLQLVRTRSLAALRRYEEVSMPEVIKAVNIAQNTAWRVNKKVLDVANAITQWQHCPVADVPAMDRGEMPARPLDIDTNEIALKAWKKEASAFYRKDKARVSRRLSMEFMLSQANKFANYKAIWFPQNMDWRGRVYAVPMFNPQGNDMTKGLLTFAQGKPIGEDGFYWLKIHGANTAGVDKVPFPQRIKFVEDNHTNIMECAKAPLENTWWAEQDSPFCFLAFCFEYAGVINHGLSYNCSLPLAFDGSCSGIQHFSAMLRDEIGGKAVNLLPSAEVQDIYRIVSDKVNEVLKQDLINGTSTTLETVTDKKTGEITERTKYGTKVMAQWWLEHGVNRGVTKRSVMTLAYGSKEFGFRDQVLSDTIQPAIDNGKGDMFLNPNQAAGYMAKLIWNAVSVTVVAAVEAMNWLKSAAKLLAAEVKDKKTDTVLRGRCAVHWVTPDGFPVWQEYKKPIQTRLNLMFLGQFRLQPTINTNKDSEIDAHKQESGIAPNFVHSQDGNHLRMTVVWAHEKYGIESFALIHDSFGTIPADAANLFKAVRETMVSTYESCDVLADFYDQFADQLHESQLDKMPALPAKGNLNLRDILKSDFAFA

SEQ ID NO: 97 - DNA, 2670 bp, synthetic construct
  misc_feature 1..2670: note = Variant of RNA polymerase
  source 1..2670: mol_type = other DNA
atgcaccatcaccatcaccatatgaacacgattaacatcgctaagaacgacttctctgacatcgaactggctgctatcccgttcaacactctggctgaccattacggtgagcgtttagctcgcgaacagttggcccttgagcatgagtcttacgagatgggtgaagcacgcttccgcaagatgtttgagcgtcaacttaaagctggtgaggttgcggataacgctgccgccaagcctctcatcactaccctactccctaagatgattgcacgcatcaacgactggtttgaggaagtgaaagctaagcgcggcaagcgcccgacagccttccagttcctgcaagaaatcaagccggaagccgtagcgtacatcaccattaagaccactctggcttgcctaaccagtgcggacaatacaaccgttcaggctgtagcaagcgcaatcggtcgggccattgaggacgaggctcgcttcggtcgtatccgtgaccttgaagctaagcacttcaagaaaaacgttgaggaacaactcaacaagcgcgtagggcacgtctacaagaaagcatttatgcaagttgtcgaggctgactggctctctaagggtctactcggtggcgaggcgtggtcttcgtggcataaggaagactctattcatgtaggagtacgctgcatcgagatgctcattgagtcaaccggaatggttagcttacaccgccaaaatgctggcgtagtaggtcaagactctgagactatcgaactcgcacctgaatacgctgaggctatcgcaacccgtgcaggtgcgctggctggcatctctccgatgttccaaccttgcgtagttcctcctaagccgtggactggcattactggtggtggctattgggctgcggggcgcaaacccctgcagttagtacgtactcgcagtctggcggcgcttcgccgctatgaagaagtgtcgatgccggaggtcatcaaagcagtcaacattgcgcagaatacagcatggcgtgtgaacaagaaagttctcgacgtagcgaatgcaatcacccaatggcagcactgtccagtcgcggatgtgcctgcgatggatcgtggcgaaatgccagctcgtccgttggacatcgataccaacgagattgcacttaaagcgtggaagaaagaagcttccgcgttctaccgcaaagacaaagcacgcgttagccgtcgtctgtcaatggagtttatgttatctcaggcgaacaagtttgcgaattataaagcaatctggtttccgcaaaacatggattggcgtgggcgcgtgtacgctgtcccgatgttcaatcctcagggcaacgatatgacgaaaggcctgctgacctttgcgcagggtaaacccattggtgaagacggcttctattggctcaagattcatggcgcaaatacagctggagtggataaagtaccgtttccacaacgcatcaaatttgttgaggataaccatacgaatattatggaatgcgcgaaagcaccgctggaaaacacttggtgggcggaacaggactcgccgttctgttttctggcgttctgctttgagtatgctggcgtcatcaatcacggtctgtcgtacaactgtagcttgcctctggcatttgatggtagttgctccggcattcaacatttctcagcgatgttacgcgacgaaattggcggcaaagctgtgaatctcctcccatctgcggaagtgcaggatatttatcgtatcgtcagcgacaaagttaacgaggtactgaaacaagatctgattaacggtacctctaccaccttggaaacggtgactgataagaagacaggcgaaattaccgaacgcacgaaatacgggaccaaagttatggcacagtggtggttagaacacggtgtgaatcgtggcgtcacgaaacgctcggttatgactttggcgtatgggagcaaagagtttggattccgcgatcaagtgctgagtgacaccattcaaccggcgatcgataacggcaaaggtgacatgtttctgaatccgaatcaggctgctggttacatggcgaaactgatctggaacgcagtgtccgtcaccgtagtcgcagcagttgaggcgatgaactggctgaaaagtgcggcgaaattacttgctgctgaagtgaaggataagaagacggatacagttctgcgtggccgctgcgcagtacattgggtgactcccgacggcttccctgtgtggcaggaatacaagaagcctattcagacgcgcttgaacctgatgttcctcggtcagttccgcttacagcctaccattaacaccaacaaagatagcgagattgatgcacacaaacaggagtctggtatcgctcctaactttgtacacagccaagacggtaaccaccttcgtatgactgtagtgtgggcacacgagaagtacggaatcgaatcttttgcactgattcacgactccttcggtaccattccggctgacgctgcgaacctgttcaaagcagtgcgcgaaactatggtttcgacatatgagtcttgtgatgtactggctgatttctacgaccagttcgctgaccagttgcacgagtctcaattggacaaaatgccagcacttccggctaaaggtaacttgaacctccgtgacatcttaaaatcggacttcgcgttcgcg

SEQ ID NO: 98 - protein, 890 aa, synthetic construct
  REGION 1..890: note = Variant of RNA polymerase
MHHHHHHMNTINIAKNDFSDIELAAIPFNTLADHYGERLAREQLALEHESYEMGEARFRKMFERQLKAGEVADNAAAKPLITTLLPKMIARINDWFEEVKAKRGKRPTAFQFLQEIKPEAVAYITIKTTLACLTSADNTTVQAVASAIGRAIEDEARFGRIRDLEAKHFKKNVEEQLNKRVGHVYKKAFMQVVEADWLSKGLLGGEAWSSWHKEDSIHVGVRCIEMLIESTGMVSLHRQNAGVVGQDSETIELAPEYAEAIATRAGALAGISPMFQPCVVPPKPWTGITGGGYWAAGRKPLQLVRTRSLAALRRYEEVSMPEVIKAVNIAQNTAWRVNKKVLDVANAITQWQHCPVADVPAMDRGEMPARPLDIDTNEIALKAWKKEASAFYRKDKARVSRRLSMEFMLSQANKFANYKAIWFPQNMDWRGRVYAVPMFNPQGNDMTKGLLTFAQGKPIGEDGFYWLKIHGANTAGVDKVPFPQRIKFVEDNHTNIMECAKAPLENTWWAEQDSPFCFLAFCFEYAGVINHGLSYNCSLPLAFDGSCSGIQHFSAMLRDEIGGKAVNLLPSAEVQDIYRIVSDKVNEVLKQDLINGTSTTLETVTDKKTGEITERTKYGTKVMAQWWLEHGVNRGVTKRSVMTLAYGSKEFGFRDQVLSDTIQPAIDNGKGDMFLNPNQAAGYMAKLIWNAVSVTVVAAVEAMNWLKSAAKLLAAEVKDKKTDTVLRGRCAVHWVTPDGFPVWQEYKKPIQTRLNLMFLGQFRLQPTINTNKDSEIDAHKQESGIAPNFVHSQDGNHLRMTVVWAHEKYGIESFALIHDSFGTIPADAANLFKAVRETMVSTYESCDVLADFYDQFADQLHESQLDKMPALPAKGNLNLRDILKSDFAFA

SEQ ID NO: 99 - DNA, 2670 bp, synthetic construct
  misc_feature 1..2670: note = Variant of RNA polymerase
  source 1..2670: mol_type = other DNA
atgcaccatcaccatcaccatatgaacacgattaacatcgctaagaacgacttctctgacatcgaactggctgctatcccgttcaacactctggctgaccattacggtgagcgtttagctcgcgaacagttggcccttgagcatgagtcttacgagatgggtgaagcacgcttccgcaagatgtttgagcgtcaacttaaagctggtgaggttgcggataacgctgccgccaagcctctcatcactaccctactccctaagatgattgcacgcatcaacgactggtttgaggaagtgaaagctaagcgcggcaagcgcccgacagccttccagttcctgcaagaaatcaagccggaagccgtagcgtacatcaccattaagaccactctggcttgcctaaccagtgcggacaatacaaccgttcaggctgtagcaagcgcaatcggtcgggccattgaggacgaggctcgcttcggtcgtatccgtgaccttgaagctaagcacttcaagaaaaacgttgaggaacaactcaacaagcgcgtagggcacgtctacaagaaagcatttatgcaagttgtcgaggctgacatgctctctacgggtctactcggtggcgaggcgtggtcttcgtggcataaggaagactctattcatgtaggagtacgctgcatcgagatgctcattgagtcaaccggaatggttagcttacaccgccaaaatgctggcgtagtaggtcaagactctgagactatcgaactcgcacctgaatacgctgaggctatcgcaacccgtgcaggtgcgctggctggcatctctccgatgttccaaccttgcgtagttcctcctaagccgtggactggcattactggtggtggctattgggctgcggggcgcaaacccctgcagttagtacgtactcgcagtctggcggcgcttcgccgctatgaagaagtgtcgatgccggaggtcatcaaagcagtcaacattgcgcagaatacagcatggcgtgtgaacaagaaagttctcgacgtagcgaatgcaatcacccaatggcagcactgtccagtcgcggatgtgcctgcgatggatcgtggcgaaatgccagctcgtccgttggacatcgataccaacgagattgcacttaaagcgtggaagaaagaagcttccgcgttctaccgcaaagacaaagcacgcgttagccgtcgtctgtcaatggagtttatgttatctcaggcgaacaagtttgcgaattataaagcaatctggtttccgcaaaacatggattggcgtgggcgcgtgtacgctgtcccgatgttcaatcctcagggcaacgatatgacgaaaggcctgctgacctttgcgcagggtaaacccattggtgaagacggcttctattggctcaagattcatggcgcaaatacagctggagtggataaagtaccgtttccacaacgcatcaaatttgttgaggataaccatacgaatattatggaatgcgcgaaagcaccgctggaaaacacttggtgggcggaacaggactcgccgttctgttttctggcgttctgctttgagtatgctggcgtcatcaatcacggtctgtcgtacaactgtagcttgcctctggcatttgatggtagttgctccggcattcaacatttctcagcgatgttacgcgacgaaattggcggcaaagctgtgaatctcctcccatctgcggaagtgcaggatatttatcgtatcgtcagcgacaaagttaacgaggtactgaaacaagatctgattaacggtacctctaccaccttggaaacggtgactgataagaagacaggcgaaattaccgaacgcacgaaatacgggaccaaagttatggcacagtggtggttagaacacggtgtgaatcgtggcgtcacgaaacgctcggttatgactttggcgtatgggagcaaagagtttggattccgcgatcaagtgctgagtgacaccattcaaccggcgatcgataacggcaaaggtgacatgtttctgaatccgaatcaggctgctggttacatggcgaaactgatctggaacgcagtgtccgtcaccgtagtcgcagcagttgaggcgatgaactggctgaaaagtgcggcgaaattacttgctgctgaagtgaaggataagaagacggatacagttctgcgtggccgctgcgcagtacattgggtgactcccgacggcttccctgtgtggcaggaatacaagaagcctattcagacgcgcttgaacctgatgttcctcggtcagttccgcttacagcctaccattaacaccaacaaagatagcgagattgatgcacacaaacaggagtctggtatcgctcctaactttgtacacagccaagacggtaaccaccttcgtatgactgtagtgtgggcacacgagaagtacggaatcgaatcttttgcactgattcacgactccttcggtaccattccggctgacgctgcgaacctgttcaaagcagtgcgcgaaactatggtttcgacatatgagtcttgtgatgtactggctgatttctacgaccagttcgctgaccagttgcacgagtctcaattggacaaaatgccagcacttccggctaaaggtaacttgaacctccgtgacatcttaaaatcggacttcgcgttcgcg

SEQ ID NO: 100 - protein, 890 aa, synthetic construct
  REGION 1..890: note = Variant of RNA polymerase
MHHHHHHMNTINIAKNDFSDIELAAIPFNTLADHYGERLAREQLALEHESYEMGEARFRKMFERQLKAGEVADNAAAKPLITTLLPKMIARINDWFEEVKAKRGKRPTAFQFLQEIKPEAVAYITIKTTLACLTSADNTTVQAVASAIGRAIEDEARFGRIRDLEAKHFKKNVEEQLNKRVGHVYKKAFMQVVEADMLSTGLLGGEAWSSWHKEDSIHVGVRCIEMLIESTGMVSLHRQNAGVVGQDSETIELAPEYAEAIATRAGALAGISPMFQPCVVPPKPWTGITGGGYWAAGRKPLQLVRTRSLAALRRYEEVSMPEVIKAVNIAQNTAWRVNKKVLDVANAITQWQHCPVADVPAMDRGEMPARPLDIDTNEIALKAWKKEASAFYRKDKARVSRRLSMEFMLSQANKFANYKAIWFPQNMDWRGRVYAVPMFNPQGNDMTKGLLTFAQGKPIGEDGFYWLKIHGANTAGVDKVPFPQRIKFVEDNHTNIMECAKAPLENTWWAEQDSPFCFLAFCFEYAGVINHGLSYNCSLPLAFDGSCSGIQHFSAMLRDEIGGKAVNLLPSAEVQDIYRIVSDKVNEVLKQDLINGTSTTLETVTDKKTGEITERTKYGTKVMAQWWLEHGVNRGVTKRSVMTLAYGSKEFGFRDQVLSDTIQPAIDNGKGDMFLNPNQAAGYMAKLIWNAVSVTVVAAVEAMNWLKSAAKLLAAEVKDKKTDTVLRGRCAVHWVTPDGFPVWQEYKKPIQTRLNLMFLGQFRLQPTINTNKDSEIDAHKQESGIAPNFVHSQDGNHLRMTVVWAHEKYGIESFALIHDSFGTIPADAANLFKAVRETMVSTYESCDVLADFYDQFADQLHESQLDKMPALPAKGNLNLRDILKSDFAFA

SEQ ID NO: 101 - DNA, 2670 bp, synthetic construct
  misc_feature 1..2670: note = Variant of RNA polymerase
  source 1..2670: mol_type = other DNA
atgcaccatcaccatcaccatatgaacacgattaacatcgctaagaacgacttctctgacatcgaactggctgctatcccgttcaacactctggctgaccattacggtgagcgtttagctcgcgaacagttggcccttgagcatgagtcttacgagatgggtgaagcacgcttccgcaagatgtttgagcgtcaacttaaagctggtgaggttgcggataacgctgccgccaagcctctcatcactaccctactccctaagatgattgcacgcatcaacgactggtttgaggaagtgaaagctaagcgcggcaagcgcccgacagccttccagttcctgcaagaaatcaagccggaagccgtagcgtacatcaccattaagaccactctggcttgcctaaccagtgcggacaatacaaccgttcaggctgtagcaagcgcaatcggtcgggccattgaggacgaggctcgcttcggtcgtatccgtgaccttgaagctaagcacttcaagaaaaacgttgaggaacaactcaacaagcgcgtagggcacgtctacaagaaagcatttatgcaagttgtcgaggctgacatgctctctaagggtctactcggtggcgaggcgtggtcttcgtggcataaggaagactctattcatgtaggagtacgctgcatcgagatgctcattgagtcaaccggaatggttagcttacaccgccaaaatgctggcgtagtaggtcaagactctgagactatcgaactcgcacctgaatacgctgaggctatcgcaacccgtgcaggtgcgctggctggcatctctccgatgttccaaccttgcgtagttcctcctaagccgtggactggcattactggtggtggctattgggctgcggggcgcaaacccctgcagttagtacgtactcgcagtctggcggcgcttcgccgctatgaagaagtgtcgatgccggaggtcatcaaagcagtcaacattgcgcagaatacagcatggcgtgtgaacaagaaagttctcgacgtagcgaatgcaatcacccaatggcagcactgtccagtcgcggatgtgcctgcgatggatcgtggcgaaatgccagctcgtccgttggacatcgataccaacgagattgcacttaaagcgtggaagaaagaagcttccgcgttctaccgcaaagacaaagcacgcgttagccgtcgtctgtcaatggagtttatgttatctcaggcgaacaagtttgcgaattataaagcaatctggtttccgcaaaacatggattggcgtgggcgcgtgtacgctgtcccgatgttcaatcctcagggcaacgatatgacgaaaggcctgctgacctttgcgcagggtaaacccattggtgaagacggcttctattggctcaagattcatggcgcaaatacagctggagtggataaagtaccgtttccacaacgcatcaaatttgttgaggataaccatacgaatattatggaatgcgcgaaagcaccgctggaaaacacttggtgggcggaacaggactcgccgttctgttttctggcgttctgctttgagtatgctggcgtcatcaatcacggtctgtcgtacaactgtagcttgcctctggcatttgatggtagttgctccggcattcaacatttctcagcgatgttacgcgacgaaattggcggcaaagctgtgaatctcctcccatctgcggaagtgcaggatatttatcgtatcgtcagcgacaaagttaacgaggtactgaaacaagatctgattaacggtacctctaccaccttggaaacggtgactgataagaagacaggcgaaattaccgaacgcacgaaatacgggaccaaagttatggcacagtggtggttagaacacggtgtgaatcgtggcgtcacgaaacgctcggttatgactttggcgtatgggagcaaagagtttggattccgcgatcaagtgctgagtgacaccattcaaccggcgatcgataacggcaaaggtgacatgtttctgaatccgaatcaggctgctggttacatggcgaaactgatctggaacgcagtgtccgtcaccgtagtcgcagcagttgaggcgatgaactggctgaaaagtgcggcgaaattacttgctgctgaagtgaaggataagaagacggatgaggttctgcgtggccgctgcgcagtacattgggtgactcccgacggcttccctgtgtggcaggaatacaagaagcctattcagacgcgcttgaacctgatgttcctcggtcagttccgcttacagcctaccattaacaccaacaaagatagcgagattgatgcacacaaacaggagtctggtatcgctcctaactttgtacacagccaagacggtaaccaccttcgtatgactgtagtgtgggcacacgagaagtacggaatcgaatcttttgcactgattcacgactccttcggtaccattccggctgacgctgcgaacctgttcaaagcagtgcgcgaaactatggtttcgacatatgagtcttgtgatgtactggctgatttctacgaccagttcgctgaccagttgcacgagtctcaattggacaaaatgccagcacttccggctaaaggtaacttgaacctccgtgacatcttaaaatcggacttcgcgttcgcg

SEQ ID NO: 102 - protein, 890 aa, synthetic construct
  REGION 1..890: note = Variant of RNA polymerase
MHHHHHHMNTINIAKNDFSDIELAAIPFNTLADHYGERLAREQLALEHESYEMGEARFRKMFERQLKAGEVADNAAAKPLITTLLPKMIARINDWFEEVKAKRGKRPTAFQFLQEIKPEAVAYITIKTTLACLTSADNTTVQAVASAIGRAIEDEARFGRIRDLEAKHFKKNVEEQLNKRVGHVYKKAFMQVVEADMLSKGLLGGEAWSSWHKEDSIHVGVRCIEMLIESTGMVSLHRQNAGVVGQDSETIELAPEYAEAIATRAGALAGISPMFQPCVVPPKPWTGITGGGYWAAGRKPLQLVRTRSLAALRRYEEVSMPEVIKAVNIAQNTAWRVNKKVLDVANAITQWQHCPVADVPAMDRGEMPARPLDIDTNEIALKAWKKEASAFYRKDKARVSRRLSMEFMLSQANKFANYKAIWFPQNMDWRGRVYAVPMFNPQGNDMTKGLLTFAQGKPIGEDGFYWLKIHGANTAGVDKVPFPQRIKFVEDNHTNIMECAKAPLENTWWAEQDSPFCFLAFCFEYAGVINHGLSYNCSLPLAFDGSCSGIQHFSAMLRDEIGGKAVNLLPSAEVQDIYRIVSDKVNEVLKQDLINGTSTTLETVTDKKTGEITERTKYGTKVMAQWWLEHGVNRGVTKRSVMTLAYGSKEFGFRDQVLSDTIQPAIDNGKGDMFLNPNQAAGYMAKLIWNAVSVTVVAAVEAMNWLKSAAKLLAAEVKDKKTDEVLRGRCAVHWVTPDGFPVWQEYKKPIQTRLNLMFLGQFRLQPTINTNKDSEIDAHKQESGIAPNFVHSQDGNHLRMTVVWAHEKYGIESFALIHDSFGTIPADAANLFKAVRETMVSTYESCDVLADFYDQFADQLHESQLDKMPALPAKGNLNLRDILKSDFAFA

SEQ ID NO: 103 - DNA, 2670 bp, synthetic construct
  misc_feature 1..2670: note = Variant of RNA polymerase
  source 1..2670: mol_type = other DNA
atgcaccatcaccatcaccatatgaacacgattaacatcgctaagaacgacttctctgacatcgaactggctgctatcccgttcaacactctggctgaccattacggtgagcgtttagctcgcgaacagttggcccttgagcatgagtcttacgagatgggtgaagcacgcttccgcaagatgtttgagcgtcaacttaaagctggtgaggttgcggataacgctgccgccaagcctctcatcactaccctactccctaagatgattgcacgcatcaacgactggtttgaggaagtgaaagctaagcgcggcaagcgcccgacagccttccagttcctgcaagaaatcaagccggaagccgtagcgtacatcaccattaagaccactctggcttgcctaaccagtgcggacaatacaaccgttcaggctgtagcaagcgcaatcggtcgggccattgaggacgaggctcgcttcggtcgtatccgtgaccttgaagctaagcacttcaagaaaaacgttgaggaacaactcaacaagcgcgtagggcacgtctacaagaaagcatttatgcaagttgtcgaggctgacatggtttctaagggtctactcggtggcgaggcgtggtcttcgtggcataaggaagactctattcatgtaggagtacgctgcatcgagatgctcattgagtcaaccggaatggttagcttacaccgccaaaatgctggcgtagtaggtcaagactctgagactatcgaactcgcacctgaatacgctgaggctatcgcaacccgtgcaggtgcgctggctggcatctctccgatgttccaaccttgcgtagttcctcctaagccgtggactggcattactggtggtggctattgggctgcggggcgcaaacccctgcagttagtacgtactcgcagtctggcggcgcttcgccgctatgaagaagtgtcgatgccggaggtcatcaaagcagtcaacattgcgcagaatacagcatggcgtgtgaacaagaaagttctcgacgtagcgaatgcaatcacccaatggcagcactgtccagtcgcggatgtgcctgcgatggatcgtggcgaaatgccagctcgtccgttggacatcgataccaacgagattgcacttaaagcgtggaagaaagaagcttccgcgttctaccgcaaagacaaagcacgcgttagccgtcgtctgtcaatggagtttatgttatctcaggcgaacaagtttgcgaattataaagcaatctggtttccgcaaaacatggattggcgtgggcgcgtgtacgctgtcccgatgttcaatcctcagggcaacgatatgacgaaaggcctgctgacctttgcgcagggtaaacccattggtgaagacggcttctattggctcaagattcatggcgcaaatacagctggagtggataaagtaccgtttccacaacgcatcaaatttgttgaggataaccatacgaatattatggaatgcgcgaaagcaccgctggaaaacacttggtgggcggaacaggactcgccgttctgttttctggcgttctgctttgagtatgctggcgtcatcaatcacggtctgtcgtacaactgtagcttgcctctggcatttgatggtagttgctccggcattcaacatttctcagcgatgttacgcgacgaaattggcggcaaagctgtgaatctcctcccatctgcggaagtgcaggatatttatcgtatcgtcagcgacaaagttaacgaggtactgaaacaagatctgattaacggtacctctaccaccttggaaacggtgactgataagaagacaggcgaaattaccgaacgcacgaaatacgggaccaaagttatggcacagtggtggttagaacacggtgtgaatcgtggcgtcacgaaacgctcggttatgactttggcgtatgggagcaaagagtttggattccgcgatcaagtgctgagtgacaccattcaaccggcgatcgataacggcaaaggtgacatgtttctgaatccgaatcaggctgctggttacatggcgaaactgatctggaacgcagtgtccgtcaccgtagtcgcagcagttgaggcgatgaactggctgaaaagtgcggcgaaattacttgctgctgaagtgaaggataagaagacggatacagttctgcgtggccgctgcgcagtacattgggtgactcccgacggcttccctgtgtggcaggaatacaagaagcctattcagacgcgcttgaacctgatgttcctcggtcagttccgcttacagcctaccattaacaccaacaaagatagcgagattgatgcacacaaacaggagtctggtatcgctcctaactttgtacacagccaagacggtaaccaccttcgtatgactgtagtgtgggcacacgagaagtacggaatcgaatcttttgcactgattcacgactccttcggtaccattccggctgacgctgcgaacctgttcaaagcagtgcgcgaaactatggtttcgacatatgagtcttgtgatgtactggctgatttctacgaccagttcgctgaccagttgcacgagtctcaattggacaaaatgccagcacttccggctaaaggtaacttgaacctccgtgacatcttaaaatcggacttcgcgttcgcg

SEQ ID NO: 104 - protein, 890 aa, synthetic construct
  REGION 1..890: note = Variant of RNA polymerase
MHHHHHHMNTINIAKNDFSDIELAAIPFNTLADHYGERLAREQLALEHESYEMGEARFRKMFERQLKAGEVADNAAAKPLITTLLPKMIARINDWFEEVKAKRGKRPTAFQFLQEIKPEAVAYITIKTTLACLTSADNTTVQAVASAIGRAIEDEARFGRIRDLEAKHFKKNVEEQLNKRVGHVYKKAFMQVVEADMVSKGLLGGEAWSSWHKEDSIHVGVRCIEMLIESTGMVSLHRQNAGVVGQDSETIELAPEYAEAIATRAGALAGISPMFQPCVVPPKPWTGITGGGYWAAGRKPLQLVRTRSLAALRRYEEVSMPEVIKAVNIAQNTAWRVNKKVLDVANAITQWQHCPVADVPAMDRGEMPARPLDIDTNEIALKAWKKEASAFYRKDKARVSRRLSMEFMLSQANKFANYKAIWFPQNMDWRGRVYAVPMFNPQGNDMTKGLLTFAQGKPIGEDGFYWLKIHGANTAGVDKVPFPQRIKFVEDNHTNIMECAKAPLENTWWAEQDSPFCFLAFCFEYAGVINHGLSYNCSLPLAFDGSCSGIQHFSAMLRDEIGGKAVNLLPSAEVQDIYRIVSDKVNEVLKQDLINGTSTTLETVTDKKTGEITERTKYGTKVMAQWWLEHGVNRGVTKRSVMTLAYGSKEFGFRDQVLSDTIQPAIDNGKGDMFLNPNQAAGYMAKLIWNAVSVTVVAAVEAMNWLKSAAKLLAAEVKDKKTDTVLRGRCAVHWVTPDGFPVWQEYKKPIQTRLNLMFLGQFRLQPTINTNKDSEIDAHKQESGIAPNFVHSQDGNHLRMTVVWAHEKYGIESFALIHDSFGTIPADAANLFKAVRETMVSTYESCDVLADFYDQFADQLHESQLDKMPALPAKGNLNLRDILKSDFAFA

SEQ ID NO: 105 - DNA, 2670 bp, synthetic construct
  misc_feature 1..2670: note = Variant of RNA polymerase
  source 1..2670: mol_type = other DNA
atgcaccatcaccatcaccatatgaacacgattaacggggctaagaacgacttctctgacatcgaactggctgctatcccgttcaacactctggctgaccattacggtgagcgtttagctcgcgaacagttggcccttgagcatgagtcttacgagatgggtgaagcacgcttccgcaagatgtttgagcgtcaacttaaagctggtgaggttgcggataacgctgccgccaagcctctcatcactaccctactccctaagatgattgcacgcatcaacgactggtttgaggaagtgaaagctaagcgcggcaagcgcccgacagccttccagttcctgcaagaaatcaagccggaagccgtagcgtacatcaccattaagaccactctggcttgcctaaccagtgcggacaatacaaccgttcaggctgtagcaagcgcaatcggtcgggccattgaggacgaggctcgcttcggtcgtatccgtgaccttgaagctaagcacttcaagaaaaacgttgaggaacaactcaacaagcgcgtagggcacgtctacaagaaagcatttatgcaagttgtcgaggctgacatgctctctaagggtctactcggtggcgaggcgtggtcttcgtggcataaggaagactctattcatgtaggagtacgctgcatcgagatgctcattgagtcaaccggaatggttagcttacaccgccaaaatgctggcgtagtaggtcaagactctgagactatcgaactcgcacctgaatacgctgaggctatcgcaacccgtgcaggtgcgctggctggcatctctccgatgttccaaccttgcgtagttcctcctaagccgtggactggcattactggtggtggctattgggctgcggggcgcaaacccctgcagttagtacgtactcgcagtctggcggcgcttcgccgctatgaagaagtgtcgatgccggaggtcatcaaagcagtcaacattgcgcagaatacagcatggcgtgtgaacaagaaagttctcgacgtagcgaatgcaatcacccaatggcagcactgtccagtcgcggatgtgcctgcgatggatcgtggcgaaatgccagctcgtccgttggacatcgataccaacgagattgcacttaaagcgtggaagaaagaagcttccgcgttctaccgcaaagacaaagcacgcgttagccgtcgtctgtcaatggagtttatgttatctcaggcgaacaagtttgcgaattataaagcaatctggtttccgcaaaacatggattggcgtgggcgcgtgtacgctgtcccgatgttcaatcctcagggcaacgatatgacgaaaggcctgctgacctttgcgcagggtaaacccattggtgaagacggcttctattggctcaagattcatggcgcaaatacagctggagtggataaagtaccgtttccacaacgcatcaaatttgttgaggataaccatacgaatattatggaatgcgcgaaagcaccgctggaaaacacttggtgggcggaacaggactcgccgttctgttttctggcgttctgctttgagtatgctggcgtcatcaatcacggtctgtcgtacaactgtagcttgcctctggcatttgatggtagttgctccggcattcaacatttctcagcgatgttacgcgacgaaattggcggcaaagctgtgaatctcctcccatctgcggaagtgcaggatatttatcgtatcgtcagcgacaaagttaacgaggtactgaaacaagatctgattaacggtacctctaccaccttggaaacggtgactgataagaagacaggcgaaattaccgaacgcacgaaatacgggaccaaagttatggcacagtggtggttagaacacggtgtgaatcgtggcgtcacgaaacgctcggttatgactttggcgtatgggagcaaagagtttggattccgcgatcaagtgctgagtgacaccattcaaccggcgatcgataacggcaaaggtgacatgtttctgaatccgaatcaggctgctggttacatggcgaaactgatctggaacgcagtgtccgtcaccgtagtcgcagcagttgaggcgatgaactggctgaaaagtgcggcgaaattacttgctgctgaagtgaaggataagaagacggatacagttctgcgtggccgctgcgcagtacattgggtgactcccgacggcttccctgtgtggcaggaatacaagaagcctattcagacgcgcttgaacctgatgttcctcggtcagttccgcttacagcctaccattaacaccaacaaagatagcgagattgatgcacacaaacaggagtctggtatcgctcctaactttgtacacagccaagacggtaaccaccttcgtatgactgtagtgtgggcacacgagaagtacggaatcgaatcttttgcactgattcacgactccttcggtaccattccggctgacgctgcgaacctgttcaaagcagtgcgcgaaactatggtttcgacatatgagtcttgtgatgtactggctgatttctacgaccagttcgctgaccagttgcacgagtctcaattggacaaaatgccagcacttccggctaaaggtaacttgaacctccgtgacatcttaaaatcggacttcgcgttcgcg

SEQ ID NO: 106 - protein, 890 aa, synthetic construct
  REGION 1..890: note = Variant of RNA polymerase
MHHHHHHMNTINGAKNDFSDIELAAIPFNTLADHYGERLAREQLALEHESYEMGEARFRKMFERQLKAGEVADNAAAKPLITTLLPKMIARINDWFEEVKAKRGKRPTAFQFLQEIKPEAVAYITIKTTLACLTSADNTTVQAVASAIGRAIEDEARFGRIRDLEAKHFKKNVEEQLNKRVGHVYKKAFMQVVEADMLSKGLLGGEAWSSWHKEDSIHVGVRCIEMLIESTGMVSLHRQNAGVVGQDSETIELAPEYAEAIATRAGALAGISPMFQPCVVPPKPWTGITGGGYWAAGRKPLQLVRTRSLAALRRYEEVSMPEVIKAVNIAQNTAWRVNKKVLDVANAITQWQHCPVADVPAMDRGEMPARPLDIDTNEIALKAWKKEASAFYRKDKARVSRRLSMEFMLSQANKFANYKAIWFPQNMDWRGRVYAVPMFNPQGNDMTKGLLTFAQGKPIGEDGFYWLKIHGANTAGVDKVPFPQRIKFVEDNHTNIMECAKAPLENTWWAEQDSPFCFLAFCFEYAGVINHGLSYNCSLPLAFDGSCSGIQHFSAMLRDEIGGKAVNLLPSAEVQDIYRIVSDKVNEVLKQDLINGTSTTLETVTDKKTGEITERTKYGTKVMAQWWLEHGVNRGVTKRSVMTLAYGSKEFGFRDQVLSDTIQPAIDNGKGDMFLNPNQAAGYMAKLIWNAVSVTVVAAVEAMNWLKSAAKLLAAEVKDKKTDTVLRGRCAVHWVTPDGFPVWQEYKKPIQTRLNLMFLGQFRLQPTINTNKDSEIDAHKQESGIAPNFVHSQDGNHLRMTVVWAHEKYGIESFALIHDSFGTIPADAANLFKAVRETMVSTYESCDVLADFYDQFADQLHESQLDKMPALPAKGNLNLRDILKSDFAFA

SEQ ID NO: 107 - DNA, 2670 bp, synthetic construct
  misc_feature 1..2670: note = Variant of RNA polymerase
  source 1..2670: mol_type = other DNA
atgcaccatcaccatcaccatatgaacacgattaacatcgctaagaacgacttctctgacatcgaactggctgctatcccgttcaacactctggctgaccattacggtgagcgtttagctcgcgaacagttggcccttgagcatgagtcttacgagatgggtgaagcacgcttccgcaagatgtttgagcgtcaacttaaagctggtgaggttgcggataacgctgccgccaagcctctcatcactaccctactccctaagatgattgcacgcatcaacgactggtttgaggaagtgaaagctaagcgcggcaagcgcccgacagccttccagttcctgcaagaaatcaagccggaagccgtagcgtacatcaccattaagaccactctggcttgcctaaccagtgcggacaatacaaccgttcaggctgtagcaagcgcaatcggtcgggccattgaggacgaggctcgcttcggtcgtatccgtgaccttgaagctaagcacttcaagaaaaacgttgaggaacaactcaacaagcgcgtagggcacgtctacgctaaagcatttatgcaagttgtcgaggctgacatgctctctaagggtctactcggtggcgaggcgtggtcttcgtggcataaggaagactctattcatgtaggagtacgctgcatcgagatgctcattgagtcaaccggaatggttagcttacaccgccaaaatgctggcgtagtaggtcaagactctgagactatcgaactcgcacctgaatacgctgaggctatcgcaacccgtgcaggtgcgctggctggcatctctccgatgttccaaccttgcgtagttcctcctaagccgtggactggcattactggtggtggctattgggctgcggggcgcaaacccctgcagttagtacgtactcgcagtctggcggcgcttcgccgctatgaagaagtgtcgatgccggaggtcatcaaagcagtcaacattgcgcagaatacagcatggcgtgtgaacaagaaagttctcgacgtagcgaatgcaatcacccaatggcagcactgtccagtcgcggatgtgcctgcgatggatcgtggcgaaatgccagctcgtccgttggacatcgataccaacgagattgcacttaaagcgtggaagaaagaagcttccgcgttctaccgcaaagacaaagcacgcgttagccgtcgtctgtcaatggagtttatgttatctcaggcgaacaagtttgcgaattataaagcaatctggtttccgcaaaacatggattggcgtgggcgcgtgtacgctgtcccgatgttcaatcctcagggcaacgatatgacgaaaggcctgctgacctttgcgcagggtaaacccattggtgaagacggcttctattggctcaagattcatggcgcaaatacagctggagtggataaagtaccgtttccacaacgcatcaaatttgttgaggataaccatacgaatattatggaatgcgcgaaagcaccgctggaaaacacttggtgggcggaacaggactcgccgttctgttttctggcgttctgctttgagtatgctggcgtcatcaatcacggtctgtcgtacaactgtagcttgcctctggcatttgatggtagttgctccggcattcaacatttctcagcgatgttacgcgacgaaattggcggcaaagctgtgaatctcctcccatctgcggaagtgcaggatatttatcgtatcgtcagcgacaaagttaacgaggtactgaaacaagatctgattaacggtacctctaccaccttggaaacggtgactgataagaagacaggcgaaattaccgaacgcacgaaatacgggaccaaagttatggcacagtggtggttagaacacggtgtgaatcgtggcgtcacgaaacgctcggttatgactttggcgtatgggagcaaagagtttggattccgcgatcaagtgctgagtgacaccattcaaccggcgatcgataacggcaaaggtgacatgtttctgaatccgaatcaggctgctggttacatggcgaaactgatctggaacgcagtgtccgtcaccgtagtcgcagcagttgaggcgatgaactggctgaaaagtgcggcgaaattacttgctgctgaagtgaaggataagaagacggatacagttctgcgtggccgctgcgcagtacattgggtgactcccgacggcttccctgtgtggcaggaatacaagaagcctattcagacgcgcttgaacctgatgttcctcggtcagttccgcttacagcctaccattaacaccaacaaagatagcgagattgatgcacacaaacaggagtctggtatcgctcctaactttgtacacagccaagacggtaaccaccttcgtatgactgtagtgtgggcacacgagaagtacggaatcgaatcttttgcactgattcacgactccttcggtaccattccggctgacgctgcgaacctgttcaaagcagtgcgcgaaactatggtttcgacatatgagtcttgtgatgtactggctgatttctacgaccagttcgctgaccagttgcacgagtctcaattggacaaaatgccagcacttccggctaaaggtaacttgaacctccgtgacatcttaaaatcggacttcgcgttcgcg

SEQ ID NO: 108 - protein, 890 aa, synthetic construct
  REGION 1..890: note = Variant of RNA polymerase
MHHHHHHMNTINIAKNDFSDIELAAIPFNTLADHYGERLAREQLALEHESYEMGEARFRKMFERQLKAGEVADNAAAKPLITTLLPKMIARINDWFEEVKAKRGKRPTAFQFLQEIKPEAVAYITIKTTLACLTSADNTTVQAVASAIGRAIEDEARFGRIRDLEAKHFKKNVEEQLNKRVGHVYAKAFMQVVEADMLSKGLLGGEAWSSWHKEDSIHVGVRCIEMLIESTGMVSLHRQNAGVVGQDSETIELAPEYAEAIATRAGALAGISPMFQPCVVPPKPWTGITGGGYWAAGRKPLQLVRTRSLAALRRYEEVSMPEVIKAVNIAQNTAWRVNKKVLDVANAITQWQHCPVADVPAMDRGEMPARPLDIDTNEIALKAWKKEASAFYRKDKARVSRRLSMEFMLSQANKFANYKAIWFPQNMDWRGRVYAVPMFNPQGNDMTKGLLTFAQGKPIGEDGFYWLKIHGANTAGVDKVPFPQRIKFVEDNHTNIMECAKAPLENTWWAEQDSPFCFLAFCFEYAGVINHGLSYNCSLPLAFDGSCSGIQHFSAMLRDEIGGKAVNLLPSAEVQDIYRIVSDKVNEVLKQDLINGTSTTLETVTDKKTGEITERTKYGTKVMAQWWLEHGVNRGVTKRSVMTLAYGSKEFGFRDQVLSDTIQPAIDNGKGDMFLNPNQAAGYMAKLIWNAVSVTVVAAVEAMNWLKSAAKLLAAEVKDKKTDTVLRGRCAVHWVTPDGFPVWQEYKKPIQTRLNLMFLGQFRLQPTINTNKDSEIDAHKQESGIAPNFVHSQDGNHLRMTVVWAHEKYGIESFALIHDSFGTIPADAANLFKAVRETMVSTYESCDVLADFYDQFADQLHESQLDKMPALPAKGNLNLRDILKSDFAFA

SEQ ID NO: 109 - DNA, 2670 bp, synthetic construct
  misc_feature 1..2670: note = Variant of RNA polymerase
  source 1..2670: mol_type = other DNA
atgcaccatcaccatcaccatatgaacacgattaacatcgctaagaacgacttctctgacatcgaactggctgctatcccgttcaacactctggctgaccattacggtgagcgtttagctcgcgaacagttggcccttgagcatgagtcttacgagatgggtgaagcacgcttccgcaagatgtttgagcgtcaacttaaagctggtgaggttgcggataacgctgccgccaagcctctcatcactaccctactccctaagatgattgcacgcatcaacgactggtttgaggaagtgaaagctaagcgcggcaagcgcccgacagccttccagttcctgcaagaaatcaagccggaagccgtagcgtacatcaccattaagaccactctggcttgcctaaccagtgcggacaatacaaccgttcaggctgtagcaagcgcaatcggtcgggccattgaggacgaggctcgcttcggtcgtatccgtgaccttgaagctaagcacttcaagaaaaacgttgaggaacaactcaacaagcgcgtagggcacgtctacaagaaagcatttatgcaagttgtcgaggctgacatgctctctaagggtctactcggtggcgaggcgtggtcttcgtggcataaggaagactctattcatgtaggagtacgctgcatcgagatgctcattgagtcaaccggaatggttagcttacaccgccaaaatgctggcgtagtaggtcaagactctgagactatcgaactcgcacctgaatacgctgaggctatcgcaacccgtgcaggtgcgctggctggcatctctccgatgttccaaccttgcgtagttcctcctaagccgtggactggcattactggtggtggctattgggctgcggggcgcaaacccctgcagttagtacgtactcgcagtctggcggcgcttcgccgctatgaagaagtgtcgatgccggaggtcatcaaagcagtcaacattgcgcagaatacagcatggcgtgtgaacaagaaagttctcgacgtagcgaatgcaatcacccaatggcagcactgtccagtcgcggatgtgcctgcgatggatcgtggcgaaatgccagctcgtccgttggacatcgataccaacgagattgcacttaaagcgtggaagaaagaagcttccgcgttctaccgcaaagacaaagcacgcgttagccgtcgtctgtcaatggagtttatgttatctcaggcgaacaagtttgcgaattataaagcaatctggtttccgcaaaacatggattggcgtgggcgcgtgtacgctgtcccgatgttcaatcctcagggcaacgatatgacgaaaggcctgctgacctttgcgcagggtaaacccattggtgaagacggcttctattggctcaagattcatggcgcaaatacagctggagtggataaagtaccgtttccacaacgcatcaaatttgttgaggataaccatacgaatattatggaatgcgcgaaagcaccgctggaaaacacttggtgggcggaacaggactcgccgttctgttttctggcgttctgctttgagtatgctggcgtcactaatcacggtctgtcgtacaactgtagcttgcctctggcatttgatggtagttgctccggcattcaacatttctcagcgatgttacgcgacgaaattggcggcaaagctgtgaatctcctcccatctgcggaagtgcaggatatttatcgtatcgtcagcgacaaagttaacgaggtactgaaacaagatctgattaacggtacctctaccaccttggaaacggtgactgataagaagacaggcgaaattaccgaacgcacgaaatacgggaccaaagttatggcacagtggtggttagaacacggtgtgaatcgtggcgtcacgaaacgctcggttatgactttggcgtatgggagcaaagagtttggattccgcgatcaagtgctgagtgacaccattcaaccggcgatcgataacggcaaaggtgacatgtttctgaatccgaatcaggctgctggttacatggcgaaactgatctggaacgcagtgtccgtcaccgtagtcgcagcagttgaggcgatgaactggctgaaaagtgcggcgaaattacttgctgctgaagtgaaggataagaagacggatacagttctgcgtggccgctgcgcagtacattgggtgactcccgacggcttccctgtgtggcaggaatacaagaagcctattcagacgcgcttgaacctgatgttcctcggtcagttccgcttacagcctaccattaacaccaacaaagatagcgagattgatgcacacaaacaggagtctggtatcgctcctaactttgtacacagccaagacggtaaccaccttcgtatgactgtagtgtgggcacacgagaagtacggaatcgaatcttttgcactgattcacgactccttcggtaccattccggctgacgctgcgaacctgttcaaagcagtgcgcgaaactatggtttcgacatatgagtcttgtgatgtactggctgatttctacgaccagttcgctgaccagttgcacgagtctcaattggacaaaatgccagcacttccggctaaaggtaacttgaacctccgtgacatcttaaaatcggacttcgcgttcgcg

SEQ ID NO: 110 - protein, 890 aa, synthetic construct
  REGION 1..890: note = Variant of RNA polymerase
MHHHHHHMNTINIAKNDFSDIELAAIPFNTLADHYGERLAREQLALEHESYEMGEARFRKMFERQLKAGEVADNAAAKPLITTLLPKMIARINDWFEEVKAKRGKRPTAFQFLQEIKPEAVAYITIKTTLACLTSADNTTVQAVASAIGRAIEDEARFGRIRDLEAKHFKKNVEEQLNKRVGHVYKKAFMQVVEADMLSKGLLGGEAWSSWHKEDSIHVGVRCIEMLIESTGMVSLHRQNAGVVGQDSETIELAPEYAEAIATRAGALAGISPMFQPCVVPPKPWTGITGGGYWAAGRKPLQLVRTRSLAALRRYEEVSMPEVIKAVNIAQNTAWRVNKKVLDVANAITQWQHCPVADVPAMDRGEMPARPLDIDTNEIALKAWKKEASAFYRKDKARVSRRLSMEFMLSQANKFANYKAIWFPQNMDWRGRVYAVPMFNPQGNDMTKGLLTFAQGKPIGEDGFYWLKIHGANTAGVDKVPFPQRIKFVEDNHTNIMECAKAPLENTWWAEQDSPFCFLAFCFEYAGVTNHGLSYNCSLPLAFDGSCSGIQHFSAMLRDEIGGKAVNLLPSAEVQDIYRIVSDKVNEVLKQDLINGTSTTLETVTDKKTGEITERTKYGTKVMAQWWLEHGVNRGVTKRSVMTLAYGSKEFGFRDQVLSDTIQPAIDNGKGDMFLNPNQAAGYMAKLIWNAVSVTVVAAVEAMNWLKSAAKLLAAEVKDKKTDTVLRGRCAVHWVTPDGFPVWQEYKKPIQTRLNLMFLGQFRLQPTINTNKDSEIDAHKQESGIAPNFVHSQDGNHLRMTVVWAHEKYGIESFALIHDSFGTIPADAANLFKAVRETMVSTYESCDVLADFYDQFADQLHESQLDKMPALPAKGNLNLRDILKSDFAFA

SEQ ID NO: 111 - DNA, 2670 bp, synthetic construct
  misc_feature 1..2670: note = Variant of RNA polymerase
  source 1..2670: mol_type = other DNA
atgcaccatcaccatcaccatatgaacacgattaacatcgctaagaacgacttctctgacatcgaactggctgctatcccgttcaacactctggctgaccattacggtgagcgtttagctcgcgaacagttggcccttgagcatgagtcttacgagatgggtgaagcacgcttccgcaagatgtttgagcgtcaacttaaagctggtgaggttgcggataacgctgccgccaagcctctcatcactaccctactccctaagatgattgcacgcatcaacgactggtttgaggaagtgaaagctaagcgcggcaagcgcccgacagccttccagttcctgcaagaaatcaagccggaagccgtagcgtacatcaccattaagaccactctggcttgcctaaccagtgcggacaatacaaccgttcaggctgtagcaagcgcaatcggtcgggccattgaggacgaggctcgcttcggtcgtatccgtgaccttgaagctaagcacttcaagaaaaacgttgaggaacaactcaacaagcgcgtagggcacgtctacaagaaagcatttatgcaagttgtcgaggctgacatgctctctaagggtctactcggtggcgaggcgtggtcttcgtggcataaggaagactctattcatgtaggagtacgctgcatcgagatgctcattgagtcaaccggaatggttagcttacaccgccaaaatgctggcgtagtaggtcaagactctgagactatcgaactcgcacctgaatacgctgaggctatcgcaacccgtgcaggtgcgctggctggcatctctccgatgttccaaccttgcgtagttcctcctaagccgtggactggcattactggtggtggctattgggctgcggggcgcaaacccctgcagttagtacgtactcgcagtctggcggcgcttcgccgctatgaagaagtgtcgatgccggaggtcatcaaagcagtcaacattgcgcagaatacagcatggcgtgtgaacaagaaagttctcgacgtagcgaatgcaatcacccaatggcagcactgtccagtcgcggatgtgcctgcgatggatcgtggcgaaatgccagctcgtccgttggacatcgataccaacgagattgcacttaaagcgtggaagaaagaagcttccgcgttctaccgcaaagacaaagcacgcgttagccgtcgtctgtcaatggagtttatgttatctcaggcgaacaagtttgcgaattatgaggcaatctggtttccgcaaaacatggattggcgtgggcgcgtgtacgctgtcccgatgttcaatcctcagggcaacgatatgacgaaaggcctgctgacctttgcgcagggtaaacccattggtgaagacggcttctattggctcaagattcatggcgcaaatacagctggagtggataaagtaccgtttccacaacgcatcaaatttgttgaggataaccatacgaatattatggaatgcgcgaaagcaccgctggaaaacacttggtgggcggaacaggactcgccgttctgttttctggcgttctgctttgagtatgctggcgtcatcaatcacggtctgtcgtacaactgtagcttgcctctggcatttgatggtagttgctccggcattcaacatttctcagcgatgttacgcgacgaaattggcggcaaagctgtgaatctcctcccatctgcggaagtgcaggatatttatcgtatcgtcagcgacaaagttaacgaggtactgaaacaagatctgattaacggtacctctaccaccttggaaacggtgactgataagaagacaggcgaaattaccgaacgcacgaaatacgggaccaaagttatggcacagtggtggttagaacacggtgtgaatcgtggcgtcacgaaacgctcggttatgactttggcgtatgggagcaaagagtttggattccgcgatcaagtgctgagtgacaccattcaaccggcgatcgataacggcaaaggtgacatgtttctgaatccgaatcaggctgctggttacatggcgaaactgatctggaacgcagtgtccgtcaccgtagtcgcagcagttgaggcgatgaactggctgaaaagtgcggcgaaattacttgctgctgaagtgaaggataagaagacggatacagttctgcgtggccgctgcgcagtacattgggtgactcccgacggcttccctgtgtggcaggaatacaagaagcctattcagacgcgcttgaacctgatgttcctcggtcagttccgcttacagcctaccattaacaccaacaaagatagcgagattgatgcacacaaacaggagtctggtatcgctcctaactttgtacacagccaagacggtaaccaccttcgtatgactgtagtgtgggcacacgagaagtacggaatcgaatcttttgcactgattcacgactccttcggtaccattccggctgacgctgcgaacctgttcaaagcagtgcgcgaaactatggtttcgacatatgagtcttgtgatgtactggctgatttctacgaccagttcgctgaccagttgcacgagtctcaattggacaaaatgccagcacttccggctaaaggtaacttgaacctccgtgacatcttaaaatcggacttcgcgttcgcg

SEQ ID NO: 112 - protein, 890 aa, synthetic construct
  REGION 1..890: note = Variant of RNA polymerase
MHHHHHHMNTINIAKNDFSDIELAAIPFNTLADHYGERLAREQLALEHESYEMGEARFRKMFERQLKAGEVADNAAAKPLITTLLPKMIARINDWFEEVKAKRGKRPTAFQFLQEIKPEAVAYITIKTTLACLTSADNTTVQAVASAIGRAIEDEARFGRIRDLEAKHFKKNVEEQLNKRVGHVYKKAFMQVVEADMLSKGLLGGEAWSSWHKEDSIHVGVRCIEMLIESTGMVSLHRQNAGVVGQDSETIELAPEYAEAIATRAGALAGISPMFQPCVVPPKPWTGITGGGYWAAGRKPLQLVRTRSLAALRRYEEVSMPEVIKAVNIAQNTAWRVNKKVLDVANAITQWQHCPVADVPAMDRGEMPARPLDIDTNEIALKAWKKEASAFYRKDKARVSRRLSMEFMLSQANKFANYEAIWFPQNMDWRGRVYAVPMFNPQGNDMTKGLLTFAQGKPIGEDGFYWLKIHGANTAGVDKVPFPQRIKFVEDNHTNIMECAKAPLENTWWAEQDSPFCFLAFCFEYAGVINHGLSYNCSLPLAFDGSCSGIQHFSAMLRDEIGGKAVNLLPSAEVQDIYRIVSDKVNEVLKQDLINGTSTTLETVTDKKTGEITERTKYGTKVMAQWWLEHGVNRGVTKRSVMTLAYGSKEFGFRDQVLSDTIQPAIDNGKGDMFLNPNQAAGYMAKLIWNAVSVTVVAAVEAMNWLKSAAKLLAAEVKDKKTDTVLRGRCAVHWVTPDGFPVWQEYKKPIQTRLNLMFLGQFRLQPTINTNKDSEIDAHKQESGIAPNFVHSQDGNHLRMTVVWAHEKYGIESFALIHDSFGTIPADAANLFKAVRETMVSTYESCDVLADFYDQFADQLHESQLDKMPALPAKGNLNLRDILKSDFAFA

SEQ ID NO: 113 - DNA, 2670 bp, synthetic construct
  misc_feature 1..2670: note = Variant of RNA polymerase
  source 1..2670: mol_type = other DNA
atgcaccatcaccatcaccatatgaacacgattaacatcgctaagaacgacttctctgacatcgaactggctgctatcccgttcaacactctggctgaccattacggtgagcgtttagctcgcgaacagttggcccttgagcatgagtcttacgagatgggtgaagcacgcttccgcaagatgtttgagcgtcaacttaaagctggtgaggttgcggataacgctgccgccaagcctctcatcactaccctactccctaagatgattgcacgcatcaacgactggtttgaggaagtgaaagctaagcgcggcaagcgcccgacagccttccagttcctgcaagaaatcaagccggaagccgtagcgtacatcaccattaagaccactctggcttgcctaaccagtgcggacaatacaaccgttcaggctgtagcaagcgcaatcggtcgggccattgaggacgaggctcgcttcggtcgtatccgtgaccttgaagctaagcacttcaagaaaaacgttgaggaacaactcaacaagcgcgtagggcacgtctacaagaaagcatttatgcaagttgtcgaggctgacatgagttctaagggtctactcggtggcgaggcgtggtcttcgtggcataaggaagactctattcatgtaggagtacgctgcatcgagatgctcattgagtcaaccggaatggttagcttacaccgccaaaatgctggcgtagtaggtcaagactctgagactatcgaactcgcacctgaatacgctgaggctatcgcaacccgtgcaggtgcgctggctggcatctctccgatgttccaaccttgcgtagttcctcctaagccgtggactggcattactggtggtggctattgggctgcggggcgcaaacccctgcagttagtacgtactcgcagtctggcggcgcttcgccgctatgaagaagtgtcgatgccggaggtcatcaaagcagtcaacattgcgcagaatacagcatggcgtgtgaacaagaaagttctcgacgtagcgaatgcaatcacccaatggcagcactgtccagtcgcggatgtgcctgcgatggatcgtggcgaaatgccagctcgtccgttggacatcgataccaacgagattgcacttaaagcgtggaagaaagaagcttccgcgttctaccgcaaagacaaagcacgcgttagccgtcgtctgtcaatggagtttatgttatctcaggcgaacaagtttgcgaattataaagcaatctggtttccgcaaaacatggattggcgtgggcgcgtgtacgctgtcccgatgttcaatcctcagggcaacgatatgacgaaaggcctgctgacctttgcgcagggtaaacccattggtgaagacggcttctattggctcaagattcatggcgcaaatacagctggagtggataaagtaccgtttccacaacgcatcaaatttgttgaggataaccatacgaatattatggaatgcgcgaaagcaccgctggaaaacacttggtgggcggaacaggactcgccgttctgttttctggcgttctgctttgagtatgctggcgtcatcaatcacggtctgtcgtacaactgtagcttgcctctggcatttgatggtagttgctccggcattcaacatttctcagcgatgttacgcgacgaaattggcggcaaagctgtgaatctcctcccatctgcggaagtgcaggatatttatcgtatcgtcagcgacaaagttaacgaggtactgaaacaagatctgattaacggtacctctaccaccttggaaacggtgactgataagaagacaggcgaaattaccgaacgcacgaaatacgggaccaaagttatggcacagtggtggttagaacacggtgtgaatcgtggcgtcacgaaacgctcggttatgactttggcgtatgggagcaaagagtttggattccgcgatcaagtgctgagtgacaccattcaaccggcgatcgataacggcaaaggtgacatgtttctgaatccgaatcaggctgctggttacatggcgaaactgatctggaacgcagtgtccgtcaccgtagtcgcagcagttgaggcgatgaactggctgaaaagtgcggcgaaattacttgctgctgaagtgaaggataagaagacggatacagttctgcgtggccgctgcgcagtacattgggtgactcccgacggcttccctgtgtggcaggaatacaagaagcctattcagacgcgcttgaacctgatgttcctcggtcagttccgcttacagcctaccattaacaccaacaaagatagcgagattgatgcacacaaacaggagtctggtatcgctcctaactttgtacacagccaagacggtaaccaccttcgtatgactgtagtgtgggcacacgagaagtacggaatcgaatcttttgcactgattcacgactccttcggtaccattccggctgacgctgcgaacctgttcaaagcagtgcgcgaaactatggtttcgacatatgagtcttgtgatgtactggctgatttctacgaccagttcgctgaccagttgcacgagtctcaattggacaaaatgccagcacttccggctaaaggtaacttgaacctccgtgacatcttaaaatcggacttcgcgttcgcg

SEQ ID NO: 114 - protein, 890 aa, synthetic construct
  REGION 1..890: note = Variant of RNA polymerase
MHHHHHHMNTINIAKNDFSDIELAAIPFNTLADHYGERLAREQLALEHESYEMGEARFRKMFERQLKAGEVADNAAAKPLITTLLPKMIARINDWFEEVKAKRGKRPTAFQFLQEIKPEAVAYITIKTTLACLTSADNTTVQAVASAIGRAIEDEARFGRIRDLEAKHFKKNVEEQLNKRVGHVYKKAFMQVVEADMSSKGLLGGEAWSSWHKEDSIHVGVRCIEMLIESTGMVSLHRQNAGVVGQDSETIELAPEYAEAIATRAGALAGISPMFQPCVVPPKPWTGITGGGYWAAGRKPLQLVRTRSLAALRRYEEVSMPEVIKAVNIAQNTAWRVNKKVLDVANAITQWQHCPVADVPAMDRGEMPARPLDIDTNEIALKAWKKEASAFYRKDKARVSRRLSMEFMLSQANKFANYKAIWFPQNMDWRGRVYAVPMFNPQGNDMTKGLLTFAQGKPIGEDGFYWLKIHGANTAGVDKVPFPQRIKFVEDNHTNIMECAKAPLENTWWAEQDSPFCFLAFCFEYAGVINHGLSYNCSLPLAFDGSCSGIQHFSAMLRDEIGGKAVNLLPSAEVQDIYRIVSDKVNEVLKQDLINGTSTTLETVTDKKTGEITERTKYGTKVMAQWWLEHGVNRGVTKRSVMTLAYGSKEFGFRDQVLSDTIQPAIDNGKGDMFLNPNQAAGYMAKLIWNAVSVTVVAAVEAMNWLKSAAKLLAAEVKDKKTDTVLRGRCAVHWVTPDGFPVWQEYKKPIQTRLNLMFLGQFRLQPTINTNKDSEIDAHKQESGIAPNFVHSQDGNHLRMTVVWAHEKYGIESFALIHDSFGTIPADAANLFKAVRETMVSTYESCDVLADFYDQFADQLHESQLDKMPALPAKGNLNLRDILKSDFAFA

SEQ ID NO: 115 - DNA, 2670 bp, synthetic construct
  misc_feature 1..2670: note = Variant of RNA polymerase
  source 1..2670: mol_type = other DNA
atgcaccatcaccatcaccatatgaacacgattaacatcgctaagaacgacttctctgacatcgaactggctgctatcccgttcaacactctggctgaccattacggtgagcgtttagctcgcgaacagttggcccttgagcatgagtcttacgagatgggtgaagcacgcttccgcaagatgtttgagcgtcaacttaaagctggtgaggttgcggataacgctgccgccaagcctctcatcactaccctactccctaagatgattgcacgcatcaacgactggtttgaggaagtgaaagctaagcgcggcaagcgcccgacagccttccagttcctgcaagaaatcaagccggaagccgtagcgtacatcaccattaagaccactctggcttgcctaaccagtgcggacaatacaaccgttcaggctgtagcaagcgcaatcggtcgggccattgaggacgaggctcgcttcggtcgtatccgtgaccttgaagctaagcacttcaagaaaaacgttgaggaacaactcaacaagcgcgtagggcacgtctacaagaaagcatttatgcaagttgtcgaggctgacatgctctctaagggtctactcggtggcgaggcgtggtcttcgtggcataaggaagactctattcatgtaggagtacgctgcatcgagatgctcattgagtcaaccggaatggttagcttacaccgccaaaatgctggcgtagtaggtcaagactctgagactatcgaactcgcacctgaatacgctgaggctatcgcaacccgtgcaggtgcgctggctggcatctctccgatgttccaaccttgcgtagttcctcctaagccgtggactggcattactggtggtggctattgggctgcggggcgcaaacccctgcagttagtacgtactcgcagtctggcggcgcttcgccgctatgaagaagtgtcgatgccggaggtcatcaaagcagtcaacattgcgcagaatacagcatggcgtgtgaacaagaaagttctcgacgtagcgaatgcaatcacccaatggcagcactgtccagtcgcggatgtgcctgcgatggatcgtggcgaaatgccagctcgtccgttggacatcgataccaacgagattgcacttaaagcgtggaagaaagaagcttccgcgttctaccgcaaagacaaagcacgcgttagccgtcgtctgtcaatggagtttatgttatctcaggcgaacaagtttgcgaattataaagcaatctggtttccgcaaaacatggattggcgtgggcgcgtgtacgctgtcccgatgttcaatcctcagggcaacgatatgacgaaaggcctgctgacctttgcgcagggtaaacccattggtgaagacggcttctattggctcaagattcatggcgcaaatacagctggagtggataaagtaccgtttccacaacgcatcaaatttgttgaggataaccatacgaatattatggaatgcgcgaaagcaccgctggaaaacacttggtgggcggaacaggactcgccgttctgttttctggcgttctgctttgagtatgctggcgtcatcaatcacggtctgtcgtacaactgtagcttgcctctggcatttgatggtagttgctccggcattcaacatttctcagcgatgttacgcgacgaaattggcggcaaagctgtgaatctcctcccatctgcggaagtgcaggatatttatcgtatcgtcagcgacaaagttaacgaggtactgaaacaagatgctattaacggtacctctaccaccttggaaacggtgactgataagaagacaggcgaaattaccgaacgcacgaaatacgggaccaaagttatggcacagtggtggttagaacacggtgtgaatcgtggcgtcacgaaacgctcggttatgactttggcgtatgggagcaaagagtttggattccgcgatcaagtgctgagtgacaccattcaaccggcgatcgataacggcaaaggtgacatgtttctgaatccgaatcaggctgctggttacatggcgaaactgatctggaacgcagtgtccgtcaccgtagtcgcagcagttgaggcgatgaactggctgaaaagtgcggcgaaattacttgctgctgaagtgaaggataagaagacggatacagttctgcgtggccgctgcgcagtacattgggtgactcccgacggcttccctgtgtggcaggaatacaagaagcctattcagacgcgcttgaacctgatgttcctcggtcagttccgcttacagcctaccattaacaccaacaaagatagcgagattgatgcacacaaacaggagtctggtatcgctcctaactttgtacacagccaagacggtaaccaccttcgtatgactgtagtgtgggcacacgagaagtacggaatcgaatcttttgcactgattcacgactccttcggtaccattccggctgacgctgcgaacctgttcaaagcagtgcgcgaaactatggtttcgacatatgagtcttgtgatgtactggctgatttctacgaccagttcgctgaccagttgcacgagtctcaattggacaaaatgccagcacttccggctaaaggtaacttgaacctccgtgacatcttaaaatcggacttcgcgttcgcg

SEQ ID NO: 116 - protein, 890 aa, synthetic construct
  REGION 1..890: note = Variant of RNA polymerase
MHHHHHHMNTINIAKNDFSDIELAAIPFNTLADHYGERLAREQLALEHESYEMGEARFRKMFERQLKAGEVADNAAAKPLITTLLPKMIARINDWFEEVKAKRGKRPTAFQFLQEIKPEAVAYITIKTTLACLTSADNTTVQAVASAIGRAIEDEARFGRIRDLEAKHFKKNVEEQLNKRVGHVYKKAFMQVVEADMLSKGLLGGEAWSSWHKEDSIHVGVRCIEMLIESTGMVSLHRQNAGVVGQDSETIELAPEYAEAIATRAGALAGISPMFQPCVVPPKPWTGITGGGYWAAGRKPLQLVRTRSLAALRRYEEVSMPEVIKAVNIAQNTAWRVNKKVLDVANAITQWQHCPVADVPAMDRGEMPARPLDIDTNEIALKAWKKEASAFYRKDKARVSRRLSMEFMLSQANKFANYKAIWFPQNMDWRGRVYAVPMFNPQGNDMTKGLLTFAQGKPIGEDGFYWLKIHGANTAGVDKVPFPQRIKFVEDNHTNIMECAKAPLENTWWAEQDSPFCFLAFCFEYAGVINHGLSYNCSLPLAFDGSCSGIQHFSAMLRDEIGGKAVNLLPSAEVQDIYRIVSDKVNEVLKQDAINGTSTTLETVTDKKTGEITERTKYGTKVMAQWWLEHGVNRGVTKRSVMTLAYGSKEFGFRDQVLSDTIQPAIDNGKGDMFLNPNQAAGYMAKLIWNAVSVTVVAAVEAMNWLKSAAKLLAAEVKDKKTDTVLRGRCAVHWVTPDGFPVWQEYKKPIQTRLNLMFLGQFRLQPTINTNKDSEIDAHKQESGIAPNFVHSQDGNHLRMTVVWAHEKYGIESFALIHDSFGTIPADAANLFKAVRETMVSTYESCDVLADFYDQFADQLHESQLDKMPALPAKGNLNLRDILKSDFAFA

SEQ ID NO: 117 - DNA, 2670 bp, synthetic construct
  misc_feature 1..2670: note = Variant of RNA polymerase
  source 1..2670: mol_type = other DNA
atgcaccatcaccatcaccatatgaacacgattaacatcgctaagaacgacttctctgacatcgaactggctgctatcccgttcaacactctggctgaccattacggtgagcgtttagctcgcgaacagttggcccttgagcatgagtcttacgagatgggtgaagcacgcttccgcaagatgtttgagcgtcaacttaaagctggtgaggttgcggataacgctgccgccaagcctctcatcactaccctactccctaagatgattgcacgcatcaacgactggtttgaggaagtgaaagctaagcgcggcaagcgcccgacagccttccagttcctgcaagaaatcaagccggaagccgtagcgtacatcaccattaagaccactctggcttgcctaaccagtgcggacaatacaaccgttcaggctgtagcaagcgcaatcggtcgggccattgaggacgaggctcgcttcggtcgtatccgtgacagggaagctaagcacttcaagaaaaacgttgaggaacaactcaacaagcgcgtagggcacgtctacaagaaagcatttatgcaagttgtcgaggctgacatgctctctaagggtctactcggtggcgaggcgtggtcttcgtggcataaggaagactctattcatgtaggagtacgctgcatcgagatgctcattgagtcaaccggaatggttagcttacaccgccaaaatgctggcgtagtaggtcaagactctgagactatcgaactcgcacctgaatacgctgaggctatcgcaacccgtgcaggtgcgctggctggcatctctccgatgttccaaccttgcgtagttcctcctaagccgtggactggcattactggtggtggctattgggctgcggggcgcaaacccctgcagttagtacgtactcgcagtctggcggcgcttcgccgctatgaagaagtgtcgatgccggaggtcatcaaagcagtcaacattgcgcagaatacagcatggcgtgtgaacaagaaagttctcgacgtagcgaatgcaatcacccaatggcagcactgtccagtcgcggatgtgcctgcgatggatcgtggcgaaatgccagctcgtccgttggacatcgataccaacgagattgcacttaaagcgtggaagaaagaagcttccgcgttctaccgcaaagacaaagcacgcgttagccgtcgtctgtcaatggagtttatgttatctcaggcgaacaagtttgcgaattataaagcaatctggtttccgcaaaacatggattggcgtgggcgcgtgtacgctgtcccgatgttcaatcctcagggcaacgatatgacgaaaggcctgctgacctttgcgcagggtaaacccattggtgaagacggcttctattggctcaagattcatggcgcaaatacagctggagtggataaagtaccgtttccacaacgcatcaaatttgttgaggataaccatacgaatattatggaatgcgcgaaagcaccgctggaaaacacttggtgggcggaacaggactcgccgttctgttttctggcgttctgctttgagtatgctggcgtcatcaatcacggtctgtcgtacaactgtagcttgcctctggcatttgatggtagttgctccggcattcaacatttctcagcgatgttacgcgacgaaattggcggcaaagctgtgaatctcctcccatctgcggaagtgcaggatatttatcgtatcgtcagcgacaaagttaacgaggtactgaaacaagatctgattaacggtacctctaccaccttggaaacggtgactgataagaagacaggcgaaattaccgaacgcacgaaatacgggaccaaagttatggcacagtggtggttagaacacggtgtgaatcgtggcgtcacgaaacgctcggttatgactttggcgtatgggagcaaagagtttggattccgcgatcaagtgctgagtgacaccattcaaccggcgatcgataacggcaaaggtgacatgtttctgaatccgaatcaggctgctggttacatggcgaaactgatctggaacgcagtgtccgtcaccgtagtcgcagcagttgaggcgatgaactggctgaaaagtgcggcgaaattacttgctgctgaagtgaaggataagaagacggatacagttctgcgtggccgctgcgcagtacattgggtgactcccgacggcttccctgtgtggcaggaatacaagaagcctattcagacgcgcttgaacctgatgttcctcggtcagttccgcttacagcctaccattaacaccaacaaagatagcgagattgatgcacacaaacaggagtctggtatcgctcctaactttgtacacagccaagacggtaaccaccttcgtatgactgtagtgtgggcacacgagaagtacggaatcgaatcttttgcactgattcacgactccttcggtaccattccggctgacgctgcgaacctgttcaaagcagtgcgcgaaactatggtttcgacatatgagtcttgtgatgtactggctgatttctacgaccagttcgctgaccagttgcacgagtctcaattggacaaaatgccagcacttccggctaaaggtaacttgaacctccgtgacatcttaaaatcggacttcgcgttcgcg

SEQ ID NO: 118 - protein, 890 aa, synthetic construct
  REGION 1..890: note = Variant of RNA polymerase
MHHHHHHMNTINIAKNDFSDIELAAIPFNTLADHYGERLAREQLALEHESYEMGEARFRKMFERQLKAGEVADNAAAKPLITTLLPKMIARINDWFEEVKAKRGKRPTAFQFLQEIKPEAVAYITIKTTLACLTSADNTTVQAVASAIGRAIEDEARFGRIRDREAKHFKKNVEEQLNKRVGHVYKKAFMQVVEADMLSKGLLGGEAWSSWHKEDSIHVGVRCIEMLIESTGMVSLHRQNAGVVGQDSETIELAPEYAEAIATRAGALAGISPMFQPCVVPPKPWTGITGGGYWAAGRKPLQLVRTRSLAALRRYEEVSMPEVIKAVNIAQNTAWRVNKKVLDVANAITQWQHCPVADVPAMDRGEMPARPLDIDTNEIALKAWKKEASAFYRKDKARVSRRLSMEFMLSQANKFANYKAIWFPQNMDWRGRVYAVPMFNPQGNDMTKGLLTFAQGKPIGEDGFYWLKIHGANTAGVDKVPFPQRIKFVEDNHTNIMECAKAPLENTWWAEQDSPFCFLAFCFEYAGVINHGLSYNCSLPLAFDGSCSGIQHFSAMLRDEIGGKAVNLLPSAEVQDIYRIVSDKVNEVLKQDLINGTSTTLETVTDKKTGEITERTKYGTKVMAQWWLEHGVNRGVTKRSVMTLAYGSKEFGFRDQVLSDTIQPAIDNGKGDMFLNPNQAAGYMAKLIWNAVSVTVVAAVEAMNWLKSAAKLLAAEVKDKKTDTVLRGRCAVHWVTPDGFPVWQEYKKPIQTRLNLMFLGQFRLQPTINTNKDSEIDAHKQESGIAPNFVHSQDGNHLRMTVVWAHEKYGIESFALIHDSFGTIPADAANLFKAVRETMVSTYESCDVLADFYDQFADQLHESQLDKMPALPAKGNLNLRDILKSDFAFA

SEQ ID NO: 119 - DNA, 2670 bp, synthetic construct
  misc_feature 1..2670: note = Variant of RNA polymerase
  source 1..2670: mol_type = other DNA
atgcaccatcaccatcaccatatgaacacgattaacatcgctaagaacgacttctctgacatcgaactggctgctatcccgttcaacactctggctgaccattacggtgagcgtttagctcgcgaacagttggcccttgagcatgagtcttacgagatgggtgaagcacgcttccgcaagatgtttgagcgtcaacttaaagctggtgaggttgcggataacgctgccgccaagcctctcatcactaccctactccctaagatgattgcacgcatcaacgactggtttgaggaagtgaaagctaagcgcggcaagcgcccgacagccttccagttcctgcaagaaatcaagccggaagccgtagcgtacatcaccattaagaccactctggcttgcctaaccagtgcggacaatacaaccgttcaggctgtagcaagcgcaatcggtcgggccattgaggacgaggctcgcttcggtcgtatccgtgaccttgaagctaagcacttcaagaaaaacgttgaggaacaactcaacaagcgcgtagggcacgtctacaagaaagcatttatgcaagttgtcgaggctgacatgctctctaagggtctactcggtggcgaggcgtggtcttcgtggcataaggaagactctattcatgtaggagtacgctgcatcgagatgctcattgagtcaaccggaatggttagcttacaccgccaaaatgctggcgtagtaggtcaagactctgagactatcgaactcgcacctgaatacgctgaggctatcgcaacccgtgcaggtgcgctggctggcatctctccgatgttccaaccttgcgtagttcctcctaagccgtggactggcattactggtggtggctattgggctgcggggcgcaaacccctgcagttagtacgtactcgcagtctggcggcgcttcgccgctatgaagaagtgtcgatgccggaggtcatcaaagcagtcaacattgcgcagaatacagcatggcgtgtgaacaagaaagttctcgacgtagcgaatgcaatcacccaatggcagcactgtccagtcgcggatgtgcctgcgatggatcgtggcgaaatgccagctcgtccgttggacatcgataccaacgagattgcacttaaagcgtggaagaaagaagcttccgcgttctaccgcaaagacaaagcacgcgttagccgtcgtctgtcaatggagtttatgttatctcaggcgaacaagtttgcgaattataaagcaatctggtttccgcaaaacatggattggcgtgggcgcgtgtacgctgtcccgatgttcaatcctcagggcaacgatatgacgaaaggcctgctgacctttgcgcagggtaaacccattggtgaagacggcttctattggctcaagattcatggcgcaaatacagctggagtggataaagtaccgtttccacaacgcatcaaatttgttgaggataaccatacgaatattatggaatgcgcgaaagcaccgctggaaaacacttggtgggcggaacaggactcgccgttctgttttctggcgttctgctttgagtatgctggcgtcatcaatcacggtctgtcgactaactgtagcttgcctctggcatttgatggtagttgctccggcattcaacatttctcagcgatgttacgcgacgaaattggcggcaaagctgtgaatctcctcccatctgcggaagtgcaggatatttatcgtatcgtcagcgacaaagttaacgaggtactgaaacaagatctgattaacggtacctctaccaccttggaaacggtgactgataagaagacaggcgaaattaccgaacgcacgaaatacgggaccaaagttatggcacagtggtggttagaacacggtgtgaatcgtggcgtcacgaaacgctcggttatgactttggcgtatgggagcaaagagtttggattccgcgatcaagtgctgagtgacaccattcaaccggcgatcgataacggcaaaggtgacatgtttctgaatccgaatcaggctgctggttacatggcgaaactgatctggaacgcagtgtccgtcaccgtagtcgcagcagttgaggcgatgaactggctgaaaagtgcggcgaaattacttgctgctgaagtgaaggataagaagacggatacagttctgcgtggccgctgcgcagtacattgggtgactcccgacggcttccctgtgtggcaggaatacaagaagcctattcagacgcgcttgaacctgatgttcctcggtcagttccgcttacagcctaccattaacaccaacaaagatagcgagattgatgcacacaaacaggagtctggtatcgctcctaactttgtacacagccaagacggtaaccaccttcgtatgactgtagtgtgggcacacgagaagtacggaatcgaatcttttgcactgattcacgactccttcggtaccattccggctgacgctgcgaacctgttcaaagcagtgcgcgaaactatggtttcgacatatgagtcttgtgatgtactggctgatttctacgaccagttcgctgaccagttgcacgagtctcaattggacaaaatgccagcacttccggctaaaggtaacttgaacctccgtgacatcttaaaatcggacttcgcgttcgcg

SEQ ID NO: 120 - protein, 890 aa, synthetic construct
  REGION 1..890: note = Variant of RNA polymerase
MHHHHHHMNTINIAKNDFSDIELAAIPFNTLADHYGERLAREQLALEHESYEMGEARFRKMFERQLKAGEVADNAAAKPLITTLLPKMIARINDWFEEVKAKRGKRPTAFQFLQEIKPEAVAYITIKTTLACLTSADNTTVQAVASAIGRAIEDEARFGRIRDLEAKHFKKNVEEQLNKRVGHVYKKAFMQVVEADMLSKGLLGGEAWSSWHKEDSIHVGVRCIEMLIESTGMVSLHRQNAGVVGQDSETIELAPEYAEAIATRAGALAGISPMFQPCVVPPKPWTGITGGGYWAAGRKPLQLVRTRSLAALRRYEEVSMPEVIKAVNIAQNTAWRVNKKVLDVANAITQWQHCPVADVPAMDRGEMPARPLDIDTNEIALKAWKKEASAFYRKDKARVSRRLSMEFMLSQANKFANYKAIWFPQNMDWRGRVYAVPMFNPQGNDMTKGLLTFAQGKPIGEDGFYWLKIHGANTAGVDKVPFPQRIKFVEDNHTNIMECAKAPLENTWWAEQDSPFCFLAFCFEYAGVINHGLSTNCSLPLAFDGSCSGIQHFSAMLRDEIGGKAVNLLPSAEVQDIYRIVSDKVNEVLKQDLINGTSTTLETVTDKKTGEITERTKYGTKVMAQWWLEHGVNRGVTKRSVMTLAYGSKEFGFRDQVLSDTIQPAIDNGKGDMFLNPNQAAGYMAKLIWNAVSVTVVAAVEAMNWLKSAAKLLAAEVKDKKTDTVLRGRCAVHWVTPDGFPVWQEYKKPIQTRLNLMFLGQFRLQPTINTNKDSEIDAHKQESGIAPNFVHSQDGNHLRMTVVWAHEKYGIESFALIHDSFGTIPADAANLFKAVRETMVSTYESCDVLADFYDQFADQLHESQLDKMPALPAKGNLNLRDILKSDFAFA

SEQ ID NO: 121 - DNA, 2670 bp, synthetic construct
  misc_feature 1..2670: note = Variant of RNA polymerase
  source 1..2670: mol_type = other DNA
atgcaccatcaccatcaccatatgaacacgattaacatcgctaagaacgacttctctgacatcgaactggctgctatcccgttcaacactctggctgaccattacggtgagcgtttagctcgcgaacagttggcccttgagcatgagtcttacgagatgggtgaagcacgcttccgcaagatgtttgagcgtcaacttaaagctggtgaggttgcggataacgctgccgccaagcctctcatcactaccctactccctaagatgattgcacgcatcaacgactggtttgaggaagtgaaagctaagcgcggcaagcgcccgacagccttccagttcctgcaagaaatcaagccggaagccgtagcgtacatcaccattaagaccactctggcttgcctaaccagtgcggacaatacaaccgttcaggctgtagcaagcgcaatcggtcgggccattgaggacgaggctcgcttcggtcgtatccgtgaccttgaagctaagcacttcaagaaaaacgttgaggaacaactcaacaagcgcgtagggcacgtctacaagaaagcatttatgcaagttgtcgaggctgacatgctctctaagggtctactcggtggcgaggcgtggtcttcgtggcataaggaagactctattcatgtaggagtacgctgcatcgagatgctcattgagtcaaccggaatggttagcttacaccgccaaaatgctggcgtagtaggtcaagactctgagactatcgaactcgcacctgaatacgctgaggctatcgcaacccgtgcaggtgcgctggctggcatctctccgatgttccaaccttgcgtagttcctcctaagccgtggactggcattactggtggtggctattgggctgcggggcgcaaacccctgcagttagtacgtactcgcagtctggcggcgcttcgccgctatgaagaagtgtcgatgccggaggtcatcaaagcagtcaacattgcgcagaatacagcatggcgtgtgaacaagaaagttctcgacgtagcgaatgcaatcacccaatggcagcactgtccagtcgcggatgtgcctgcgatggatcgtggcgaaatgccagctcgtccgttggacatcgataccaacgagattgcacttaaagcgtggaagaaagaagcttccgcgttctaccgcaaagacaaagcacgcgttagccgtcgtctgtcaatggagtttatgttatctcaggcgaacaagtttgcgaattataaagcaatctggtttccgcaaaacatggattggcgtgggcgcgtgtacgctgtcccgatgttcaatcctcagggcaacgatatgacgaaaggcctgctgacctttgcgcagggtaaacccattggtgaagacggcttctattggctcaagattcatggcgcaaatacagctggagtggataaagtaccgtttccacaacgcatcaaatttgttgaggataaccatacgaatattatggaatgcgcgaaagcaccgctggaaaacacttggtgggcggaacaggactcgccgttctgttttctggcgttctgctttgagtatgctatggtcatcaatcacggtctgtcgtacaactgtagcttgcctctggcatttgatggtagttgctccggcattcaacatttctcagcgatgttacgcgacgaaattggcggcaaagctgtgaatctcctcccatctgcggaagtgcaggatatttatcgtatcgtcagcgacaaagttaacgaggtactgaaacaagatctgattaacggtacctctaccaccttggaaacggtgactgataagaagacaggcgaaattaccgaacgcacgaaatacgggaccaaagttatggcacagtggtggttagaacacggtgtgaatcgtggcgtcacgaaacgctcggttatgactttggcgtatgggagcaaagagtttggattccgcgatcaagtgctgagtgacaccattcaaccggcgatcgataacggcaaaggtgacatgtttctgaatccgaatcaggctgctggttacatggcgaaactgatctggaacgcagtgtccgtcaccgtagtcgcagcagttgaggcgatgaactggctgaaaagtgcggcgaaattacttgctgctgaagtgaaggataagaagacggatacagttctgcgtggccgctgcgcagtacattgggtgactcccgacggcttccctgtgtggcaggaatacaagaagcctattcagacgcgcttgaacctgatgttcctcggtcagttccgcttacagcctaccattaacaccaacaaagatagcgagattgatgcacacaaacaggagtctggtatcgctcctaactttgtacacagccaagacggtaaccaccttcgtatgactgtagtgtgggcacacgagaagtacggaatcgaatcttttgcactgattcacgactccttcggtaccattccggctgacgctgcgaacctgttcaaagcagtgcgcgaaactatggtttcgacatatgagtcttgtgatgtactggctgatttctacgaccagttcgctgaccagttgcacgagtctcaattggacaaaatgccagcacttccggctaaaggtaacttgaacctccgtgacatcttaaaatcggacttcgcgttcgcg

SEQ ID NO: 122 - protein, 890 aa, synthetic construct
  REGION 1..890: note = Variant of RNA polymerase
MHHHHHHMNTINIAKNDFSDIELAAIPFNTLADHYGERLAREQLALEHESYEMGEARFRKMFERQLKAGEVADNAAAKPLITTLLPKMIARINDWFEEVKAKRGKRPTAFQFLQEIKPEAVAYITIKTTLACLTSADNTTVQAVASAIGRAIEDEARFGRIRDLEAKHFKKNVEEQLNKRVGHVYKKAFMQVVEADMLSKGLLGGEAWSSWHKEDSIHVGVRCIEMLIESTGMVSLHRQNAGVVGQDSETIELAPEYAEAIATRAGALAGISPMFQPCVVPPKPWTGITGGGYWAAGRKPLQLVRTRSLAALRRYEEVSMPEVIKAVNIAQNTAWRVNKKVLDVANAITQWQHCPVADVPAMDRGEMPARPLDIDTNEIALKAWKKEASAFYRKDKARVSRRLSMEFMLSQANKFANYKAIWFPQNMDWRGRVYAVPMFNPQGNDMTKGLLTFAQGKPIGEDGFYWLKIHGANTAGVDKVPFPQRIKFVEDNHTNIMECAKAPLENTWWAEQDSPFCFLAFCFEYAMVINHGLSYNCSLPLAFDGSCSGIQHFSAMLRDEIGGKAVNLLPSAEVQDIYRIVSDKVNEVLKQDLINGTSTTLETVTDKKTGEITERTKYGTKVMAQWWLEHGVNRGVTKRSVMTLAYGSKEFGFRDQVLSDTIQPAIDNGKGDMFLNPNQAAGYMAKLIWNAVSVTVVAAVEAMNWLKSAAKLLAAEVKDKKTDTVLRGRCAVHWVTPDGFPVWQEYKKPIQTRLNLMFLGQFRLQPTINTNKDSEIDAHKQESGIAPNFVHSQDGNHLRMTVVWAHEKYGIESFALIHDSFGTIPADAANLFKAVRETMVSTYESCDVLADFYDQFADQLHESQLDKMPALPAKGNLNLRDILKSDFAFA

SEQ ID NO: 123 - DNA, 2670 bp, synthetic construct
  misc_feature 1..2670: note = Variant of RNA polymerase
  source 1..2670: mol_type = other DNA
atgcaccatcaccatcaccatatgaacacgattaacatcgctaagaacgacttctctgacatcgaactggctgctatcccgttcaacactctggctgaccattacggtgagcgtttagctcgcgaacagttggcccttgagcatgagtcttacgagatgggtgaagcacgcttccgcaagatgtttgagcgtcaacttaaagctggtgaggttgcggataacgctgccgccaagcctctcatcactaccctactccctaagatgattgcacgcatcaacgactggtttgaggaagtgaaagctaagcgcggcaagcgcccgacagccttccagttcctgcaagaaatcaagccggaagccgtagcgtacatcaccattaagaccactctggcttgcctaaccagtgcggacaatacaaccgttcaggctgtagcaagcgcaatcggtcgggccattgaggacgaggctcgcttcggtcgtatccgtgaccttgaagctaagcacttcaagaaaaacgttgaggaacaactcaacaagcgcgtagggcacgtctacaagaaagcatttatgcaagttgtcgaggctgacatgctctctaagggtctactcggtggcgaggcgtggtcttcgtggcataaggaagactctattcatgtaggagtacgctgcatcgagatgctcattgagtcaaccggaatggttagcttacaccgccaaaatgctggcgtagtaggtcaagactctgagactatcgaactcgcacctgaatacgctgaggctatcgcaacccgtgcaggtgcgctggctggcatctctccgatgttccaaccttgcgtagttcctcctaagccgtggactggcattactggtggtggctattgggctgcggggcgcaaacccctgcagttagtacgtactcgcagtctggcggcgcttcgccgctatgaagaagtgtcgatgccggaggtcatcaaagcagtcaacattgcgcagaatacagcatggcgtgtgaacaagaaagttctcgacgtagcgaatgcaatcacccaatggcagcactgtccagtcgcggatgtgcctgcgatggatcgtggcgaaatgccagctcgtccgttggacatcgataccaacgagattgcacttaaagcgtggaagaaagaagcttccgcgttctaccgcaaagacaaagcacgcgttagccgtcgtctgtcaatggagtttatgttatctcaggcgaacaagtttgcgaattataaagcaatctggtttccgcaaaacatggattggcgtgggcgcgtgtacgctgtcccgatgttcaatcctcagggcaacgatatgacgaaaggcctgctgacctttgcgcagggtaaacccattggtgaagacggcctgtattggctcaagattcatggcgcaaatacagctggagtggataaagtaccgtttccacaacgcatcaaatttgttgaggataaccatacgaatattatggaatgcgcgaaagcaccgctggaaaacacttggtgggcggaacaggactcgccgttctgttttctggcgttctgctttgagtatgctggcgtcatcaatcacggtctgtcgtacaactgtagcttgcctctggcatttgatggtagttgctccggcattcaacatttctcagcgatgttacgcgacgaaattggcggcaaagctgtgaatctcctcccatctgcggaagtgcaggatatttatcgtatcgtcagcgacaaagttaacgaggtactgaaacaagatctgattaacggtacctctaccaccttggaaacggtgactgataagaagacaggcgaaattaccgaacgcacgaaatacgggaccaaagttatggcacagtggtggttagaacacggtgtgaatcgtggcgtcacgaaacgctcggttatgactttggcgtatgggagcaaagagtttggattccgcgatcaagtgctgagtgacaccattcaaccggcgatcgataacggcaaaggtgacatgtttctgaatccgaatcaggctgctggttacatggcgaaactgatctggaacgcagtgtccgtcaccgtagtcgcagcagttgaggcgatgaactggctgaaaagtgcggcgaaattacttgctgctgaagtgaaggataagaagacggatacagttctgcgtggccgctgcgcagtacattgggtgactcccgacggcttccctgtgtggcaggaatacaagaagcctattcagacgcgcttgaacctgatgttcctcggtcagttccgcttacagcctaccattaacaccaacaaagatagcgagattgatgcacacaaacaggagtctggtatcgctcctaactttgtacacagccaagacggtaaccaccttcgtatgactgtagtgtgggcacacgagaagtacggaatcgaatcttttgcactgattcacgactccttcggtaccattccggctgacgctgcgaacctgttcaaagcagtgcgcgaaactatggtttcgacatatgagtcttgtgatgtactggctgatttctacgaccagttcgctgaccagttgcacgagtctcaattggacaaaatgccagcacttccggctaaaggtaacttgaacctccgtgacatcttaaaatcggacttcgcgttcgcg

SEQ ID NO: 124 - protein, 890 aa, synthetic construct
  REGION 1..890: note = Variant of RNA polymerase
MHHHHHHMNTINIAKNDFSDIELAAIPFNTLADHYGERLAREQLALEHESYEMGEARFRKMFERQLKAGEVADNAAAKPLITTLLPKMIARINDWFEEVKAKRGKRPTAFQFLQEIKPEAVAYITIKTTLACLTSADNTTVQAVASAIGRAIEDEARFGRIRDLEAKHFKKNVEEQLNKRVGHVYKKAFMQVVEADMLSKGLLGGEAWSSWHKEDSIHVGVRCIEMLIESTGMVSLHRQNAGVVGQDSETIELAPEYAEAIATRAGALAGISPMFQPCVVPPKPWTGITGGGYWAAGRKPLQLVRTRSLAALRRYEEVSMPEVIKAVNIAQNTAWRVNKKVLDVANAITQWQHCPVADVPAMDRGEMPARPLDIDTNEIALKAWKKEASAFYRKDKARVSRRLSMEFMLSQANKFANYKAIWFPQNMDWRGRVYAVPMFNPQGNDMTKGLLTFAQGKPIGEDGLYWLKIHGANTAGVDKVPFPQRIKFVEDNHTNIMECAKAPLENTWWAEQDSPFCFLAFCFEYAGVINHGLSYNCSLPLAFDGSCSGIQHFSAMLRDEIGGKAVNLLPSAEVQDIYRIVSDKVNEVLKQDLINGTSTTLETVTDKKTGEITERTKYGTKVMAQWWLEHGVNRGVTKRSVMTLAYGSKEFGFRDQVLSDTIQPAIDNGKGDMFLNPNQAAGYMAKLIWNAVSVTVVAAVEAMNWLKSAAKLLAAEVKDKKTDTVLRGRCAVHWVTPDGFPVWQEYKKPIQTRLNLMFLGQFRLQPTINTNKDSEIDAHKQESGIAPNFVHSQDGNHLRMTVVWAHEKYGIESFALIHDSFGTIPADAANLFKAVRETMVSTYESCDVLADFYDQFADQLHESQLDKMPALPAKGNLNLRDILKSDFAFA

SEQ ID NO: 125 - DNA, 2670 bp, synthetic construct
  misc_feature 1..2670: note = Variant of RNA polymerase
  source 1..2670: mol_type = other DNA
atgcaccatcaccatcaccatatgaacacgattaacatcgctaagaacgacttctctgacatcgaactggctgctatcccgttcaacactctggctgaccattacggtgagcgtttagctcgcgaacagttggcccttgagcatgagtcttacgagatgggtgaagcacgcttccgcaagatgtttgagcgtcaacttaaagctggtgaggttgcggataacgctgccgccaagcctctcatcactaccctactccctaagatgattgcacgcatcaacgactggtttgaggaagtgaaagctaagcgcggcaagcgcccgacagccttccagttcctgcaagaaatcaagccggaagccgtagcgtacatcaccattaagaccactctggcttgcctaaccagtgcggacaatacaaccgttcaggctgtagcaagcgcaatcggtcgggccattgaggacgaggctcgcttcggtcgtatccgtgaccttgaagctaagcacttcaagaaaaacgttgaggaacaactcaacaagcgcgtagggcacgtctacaagaaagcatttatgcaagttgtcgaggctgacatgctctctaagggtctactcggtggcgaggcgtggtcttcgtggcataaggaagactctattcatgtaggagtacgctgcatcgagatgctcattgagtcaaccggaatggttagcttacaccgccaaaatgctggcgtagtaggtcaagactctgagactatcgaactcgcacctgaatacgctgaggctatcgcaacccgtgcaggtgcgctggctggcatctctccgatgttccaaccttgcgtagttcctcctaagccgtggactggcattactggtggtggctattgggctgcggggcgcaaacccctgcagttagtacgtactcgcagtctggcggcgcttcgccgctatgaagaagtgtcgatgccggaggtcatcaaagcagtcaacattgcgcagaatacagcatggcgtgtgaacaagaaagttctcgacgtagcgaatgcaatcacccaatggcagcactgtccagtcgcggatgtgcctgcgatggatcgtggcgaaatgccagctcgtccgttggacatcgataccaacgagattgcacttaaagcgtggaagaaagaagcttccgcgttctaccgcaaagacaaagcacgcgttagccgtcgtctgtcaatggagtttatgttatctcaggcgaacaagtttgcgaattataaagcaatctggtttccgcaaaacatggattggcgtgggcgcgtgtacgctgtcccgatgttcaatcctcagggcaacgatatgacgaaaggcctgctgacctttgcgcagggtaaacccattggtgaagacggcttctattggctcaagattcatggcgcaaatacagctggagtggataaagtaccgtttccacaacgcatcaaatttgttgaggataaccatacgaatattatggaatgcgcgaaagcaccgctggaaaacacttggtgggcggaacaggactcgccgttctgttttctggcgttctgctttgagtatgctggcgtcatcaatcacggtctgtcgtacaactgtagcttgcctctggcatttgatggtagttgctccggcattcaacatttctcagcgatgttacgcgacgaaattggcggcaaagctgtgaatctcctcccatctgcggaagtgcaggatatttatcgtatcgtcagcgacaaagttaacgaggtactgaaacaagatctgattaacggtacctctaccaccttggaaacggtgactgatccgaagacaggcgaaattaccgaacgcacgaaatacgggaccaaagttatggcacagtggtggttagaacacggtgtgaatcgtggcgtcacgaaacgctcggttatgactttggcgtatgggagcaaagagtttggattccgcgatcaagtgctgagtgacaccattcaaccggcgatcgataacggcaaaggtgacatgtttctgaatccgaatcaggctgctggttacatggcgaaactgatctggaacgcagtgtccgtcaccgtagtcgcagcagttgaggcgatgaactggctgaaaagtgcggcgaaattacttgctgctgaagtgaaggataagaagacggatacagttctgcgtggccgctgcgcagtacattgggtgactcccgacggcttccctgtgtggcaggaatacaagaagcctattcagacgcgcttgaacctgatgttcctcggtcagttccgcttacagcctaccattaacaccaacaaagatagcgagattgatgcacacaaacaggagtctggtatcgctcctaactttgtacacagccaagacggtaaccaccttcgtatgactgtagtgtgggcacacgagaagtacggaatcgaatcttttgcactgattcacgactccttcggtaccattccggctgacgctgcgaacctgttcaaagcagtgcgcgaaactatggtttcgacatatgagtcttgtgatgtactggctgatttctacgaccagttcgctgaccagttgcacgagtctcaattggacaaaatgccagcacttccggctaaaggtaacttgaacctccgtgacatcttaaaatcggacttcgcgttcgcg

SEQ ID NO: 126 - protein, 890 aa, synthetic construct
  REGION 1..890: note = Variant of RNA polymerase
MHHHHHHMNTINIAKNDFSDIELAAIPFNTLADHYGERLAREQLALEHESYEMGEARFRKMFERQLKAGEVADNAAAKPLITTLLPKMIARINDWFEEVKAKRGKRPTAFQFLQEIKPEAVAYITIKTTLACLTSADNTTVQAVASAIGRAIEDEARFGRIRDLEAKHFKKNVEEQLNKRVGHVYKKAFMQVVEADMLSKGLLGGEAWSSWHKEDSIHVGVRCIEMLIESTGMVSLHRQNAGVVGQDSETIELAPEYAEAIATRAGALAGISPMFQPCVVPPKPWTGITGGGYWAAGRKPLQLVRTRSLAALRRYEEVSMPEVIKAVNIAQNTAWRVNKKVLDVANAITQWQHCPVADVPAMDRGEMPARPLDIDTNEIALKAWKKEASAFYRKDKARVSRRLSMEFMLSQANKFANYKAIWFPQNMDWRGRVYAVPMFNPQGNDMTKGLLTFAQGKPIGEDGFYWLKIHGANTAGVDKVPFPQRIKFVEDNHTNIMECAKAPLENTWWAEQDSPFCFLAFCFEYAGVINHGLSYNCSLPLAFDGSCSGIQHFSAMLRDEIGGKAVNLLPSAEVQDIYRIVSDKVNEVLKQDLINGTSTTLETVTDPKTGEITERTKYGTKVMAQWWLEHGVNRGVTKRSVMTLAYGSKEFGFRDQVLSDTIQPAIDNGKGDMFLNPNQAAGYMAKLIWNAVSVTVVAAVEAMNWLKSAAKLLAAEVKDKKTDTVLRGRCAVHWVTPDGFPVWQEYKKPIQTRLNLMFLGQFRLQPTINTNKDSEIDAHKQESGIAPNFVHSQDGNHLRMTVVWAHEKYGIESFALIHDSFGTIPADAANLFKAVRETMVSTYESCDVLADFYDQFADQLHESQLDKMPALPAKGNLNLRDILKSDFAFA

SEQ ID NO: 127 - DNA, 2670 bp, synthetic construct
  misc_feature 1..2670: note = Variant of RNA polymerase
  source 1..2670: mol_type = other DNA
atgcaccatcaccatcaccatatgaacacgattaacatcgctaagaacgacttctctgacatcgaactggctgctatcccgttcaacactctggctgaccattacggtgagcgtttagctcgcgaacagttggcccttgagcatgagtcttacgagatgggtgaagcacgcttcctgaagatgtttgagcgtcaacttaaagctggtgaggttgcggataacgctgccgccaagcctctcatcactaccctactccctaagatgattgcacgcatcaacgactggtttgaggaagtgaaagctaagcgcggcaagcgcccgacagccttccagttcctgcaagaaatcaagccggaagccgtagcgtacatcaccattaagaccactctggcttgcctaaccagtgcggacaatacaaccgttcaggctgtagcaagcgcaatcggtcgggccattgaggacgaggctcgcttcggtcgtatccgtgaccttgaagctaagcacttcaagaaaaacgttgaggaacaactcaacaagcgcgtagggcacgtctacaagaaagcatttatgcaagttgtcgaggctgacatgctctctaagggtctactcggtggcgaggcgtggtcttcgtggcataaggaagactctattcatgtaggagtacgctgcatcgagatgctcattgagtcaaccggaatggttagcttacaccgccaaaatgctggcgtagtaggtcaagactctgagactatcgaactcgcacctgaatacgctgaggctatcgcaacccgtgcaggtgcgctggctggcatctctccgatgttccaaccttgcgtagttcctcctaagccgtggactggcattactggtggtggctattgggctgcggggcgcaaacccctgcagttagtacgtactcgcagtctggcggcgcttcgccgctatgaagaagtgtcgatgccggaggtcatcaaagcagtcaacattgcgcagaatacagcatggcgtgtgaacaagaaagttctcgacgtagcgaatgcaatcacccaatggcagcactgtccagtcgcggatgtgcctgcgatggatcgtggcgaaatgccagctcgtccgttggacatcgataccaacgagattgcacttaaagcgtggaagaaagaagcttccgcgttctaccgcaaagacaaagcacgcgttagccgtcgtctgtcaatggagtttatgttatctcaggcgaacaagtttgcgaattataaagcaatctggtttccgcaaaacatggattggcgtgggcgcgtgtacgctgtcccgatgttcaatcctcagggcaacgatatgacgaaaggcctgctgacctttgcgcagggtaaacccattggtgaagacggcttctattggctcaagattcatggcgcaaatacagctggagtggataaagtaccgtttccacaacgcatcaaatttgttgaggataaccatacgaatattatggaatgcgcgaaagcaccgctggaaaacacttggtgggcggaacaggactcgccgttctgttttctggcgttctgctttgagtatgctggcgtcatcaatcacggtctgtcgtacaactgtagcttgcctctggcatttgatggtagttgctccggcattcaacatttctcagcgatgttacgcgacgaaattggcggcaaagctgtgaatctcctcccatctgcggaagtgcaggatatttatcgtatcgtcagcgacaaagttaacgaggtactgaaacaagatctgattaacggtacctctaccaccttggaaacggtgactgataagaagacaggcgaaattaccgaacgcacgaaatacgggaccaaagttatggcacagtggtggttagaacacggtgtgaatcgtggcgtcacgaaacgctcggttatgactttggcgtatgggagcaaagagtttggattccgcgatcaagtgctgagtgacaccattcaaccggcgatcgataacggcaaaggtgacatgtttctgaatccgaatcaggctgctggttacatggcgaaactgatctggaacgcagtgtccgtcaccgtagtcgcagcagttgaggcgatgaactggctgaaaagtgcggcgaaattacttgctgctgaagtgaaggataagaagacggatacagttctgcgtggccgctgcgcagtacattgggtgactcccgacggcttccctgtgtggcaggaatacaagaagcctattcagacgcgcttgaacctgatgttcctcggtcagttccgcttacagcctaccattaacaccaacaaagatagcgagattgatgcacacaaacaggagtctggtatcgctcctaactttgtacacagccaagacggtaaccaccttcgtatgactgtagtgtgggcacacgagaagtacggaatcgaatcttttgcactgattcacgactccttcggtaccattccggctgacgctgcgaacctgttcaaagcagtgcgcgaaactatggtttcgacatatgagtcttgtgatgtactggctgatttctacgaccagttcgctgaccagttgcacgagtctcaattggacaaaatgccagcacttccggctaaaggtaacttgaacctccgtgacatcttaaaatcggacttcgcgttcgcg

SEQ ID NO: 128 - protein, 890 aa, synthetic construct
  REGION 1..890: note = Variant of RNA polymerase
MHHHHHHMNTINIAKNDFSDIELAAIPFNTLADHYGERLAREQLALEHESYEMGEARFLKMFERQLKAGEVADNAAAKPLITTLLPKMIARINDWFEEVKAKRGKRPTAFQFLQEIKPEAVAYITIKTTLACLTSADNTTVQAVASAIGRAIEDEARFGRIRDLEAKHFKKNVEEQLNKRVGHVYKKAFMQVVEADMLSKGLLGGEAWSSWHKEDSIHVGVRCIEMLIESTGMVSLHRQNAGVVGQDSETIELAPEYAEAIATRAGALAGISPMFQPCVVPPKPWTGITGGGYWAAGRKPLQLVRTRSLAALRRYEEVSMPEVIKAVNIAQNTAWRVNKKVLDVANAITQWQHCPVADVPAMDRGEMPARPLDIDTNEIALKAWKKEASAFYRKDKARVSRRLSMEFMLSQANKFANYKAIWFPQNMDWRGRVYAVPMFNPQGNDMTKGLLTFAQGKPIGEDGFYWLKIHGANTAGVDKVPFPQRIKFVEDNHTNIMECAKAPLENTWWAEQDSPFCFLAFCFEYAGVINHGLSYNCSLPLAFDGSCSGIQHFSAMLRDEIGGKAVNLLPSAEVQDIYRIVSDKVNEVLKQDLINGTSTTLETVTDKKTGEITERTKYGTKVMAQWWLEHGVNRGVTKRSVMTLAYGSKEFGFRDQVLSDTIQPAIDNGKGDMFLNPNQAAGYMAKLIWNAVSVTVVAAVEAMNWLKSAAKLLAAEVKDKKTDTVLRGRCAVHWVTPDGFPVWQEYKKPIQTRLNLMFLGQFRLQPTINTNKDSEIDAHKQESGIAPNFVHSQDGNHLRMTVVWAHEKYGIESFALIHDSFGTIPADAANLFKAVRETMVSTYESCDVLADFYDQFADQLHESQLDKMPALPAKGNLNLRDILKSDFAFA

SEQ ID NO: 129 - DNA, 2670 bp, synthetic construct
  misc_feature 1..2670: note = Variant of RNA polymerase
  source 1..2670: mol_type = other DNA
atgcaccatcaccatcaccatatgaacacgattaacatcgctaagaacgacttctctgacatcgaaattgctgctatcccgttcaacactctggctgaccattacggtgagcgtttagctcgcgaacagttggcccttgagcatgagtcttacgagatgggtgaagcacgcttccgcaagatgtttgagcgtcaacttaaagctggtgaggttgcggataacgctgccgccaagcctctcatcactaccctactccctaagatgattgcacgcatcaacgactggtttgaggaagtgaaagctaagcgcggcaagcgcccgacagccttccagttcctgcaagaaatcaagccggaagccgtagcgtacatcaccattaagaccactctggcttgcctaaccagtgcggacaatacaaccgttcaggctgtagcaagcgcaatcggtcgggccattgaggacgaggctcgcttcggtcgtatccgtgaccttgaagctaagcacttcaagaaaaacgttgaggaacaactcaacaagcgcgtagggcacgtctacaagaaagcatttatgcaagttgtcgaggctgacatgctctctaagggtctactcggtggcgaggcgtggtcttcgtggcataaggaagactctattcatgtaggagtacgctgcatcgagatgctcattgagtcaaccggaatggttagcttacaccgccaaaatgctggcgtagtaggtcaagactctgagactatcgaactcgcacctgaatacgctgaggctatcgcaacccgtgcaggtgcgctggctggcatctctccgatgttccaaccttgcgtagttcctcctaagccgtggactggcattactggtggtggctattgggctgcggggcgcaaacccctgcagttagtacgtactcgcagtctggcggcgcttcgccgctatgaagaagtgtcgatgccggaggtcatcaaagcagtcaacattgcgcagaatacagcatggcgtgtgaacaagaaagttctcgacgtagcgaatgcaatcacccaatggcagcactgtccagtcgcggatgtgcctgcgatggatcgtggcgaaatgccagctcgtccgttggacatcgataccaacgagattgcacttaaagcgtggaagaaagaagcttccgcgttctaccgcaaagacaaagcacgcgttagccgtcgtctgtcaatggagtttatgttatctcaggcgaacaagtttgcgaattataaagcaatctggtttccgcaaaacatggattggcgtgggcgcgtgtacgctgtcccgatgttcaatcctcagggcaacgatatgacgaaaggcctgctgacctttgcgcagggtaaacccattggtgaagacggcttctattggctcaagattcatggcgcaaatacagctggagtggataaagtaccgtttccacaacgcatcaaatttgttgaggataaccatacgaatattatggaatgcgcgaaagcaccgctggaaaacacttggtgggcggaacaggactcgccgttctgttttctggcgttctgctttgagtatgctggcgtcatcaatcacggtctgtcgtacaactgtagcttgcctctggcatttgatggtagttgctccggcattcaacatttctcagcgatgttacgcgacgaaattggcggcaaagctgtgaatctcctcccatctgcggaagtgcaggatatttatcgtatcgtcagcgacaaagttaacgaggtactgaaacaagatctgattaacggtacctctaccaccttggaaacggtgactgataagaagacaggcgaaattaccgaacgcacgaaatacgggaccaaagttatggcacagtggtggttagaacacggtgtgaatcgtggcgtcacgaaacgctcggttatgactttggcgtatgggagcaaagagtttggattccgcgatcaagtgctgagtgacaccattcaaccggcgatcgataacggcaaaggtgacatgtttctgaatccgaatcaggctgctggttacatggcgaaactgatctggaacgcagtgtccgtcaccgtagtcgcagcagttgaggcgatgaactggctgaaaagtgcggcgaaattacttgctgctgaagtgaaggataagaagacggatacagttctgcgtggccgctgcgcagtacattgggtgactcccgacggcttccctgtgtggcaggaatacaagaagcctattcagacgcgcttgaacctgatgttcctcggtcagttccgcttacagcctaccattaacaccaacaaagatagcgagattgatgcacacaaacaggagtctggtatcgctcctaactttgtacacagccaagacggtaaccaccttcgtatgactgtagtgtgggcacacgagaagtacggaatcgaatcttttgcactgattcacgactccttcggtaccattccggctgacgctgcgaacctgttcaaagcagtgcgcgaaactatggtttcgacatatgagtcttgtgatgtactggctgatttctacgaccagttcgctgaccagttgcacgagtctcaattggacaaaatgccagcacttccggctaaaggtaacttgaacctccgtgacatcttaaaatcggacttcgcgttcgcg

SEQ ID NO: 130 - protein, 890 aa, synthetic construct
  REGION 1..890: note = Variant of RNA polymerase
MHHHHHHMNTINIAKNDFSDIEIAAIPFNTLADHYGERLAREQLALEHESYEMGEARFRKMFERQLKAGEVADNAAAKPLITTLLPKMIARINDWFEEVKAKRGKRPTAFQFLQEIKPEAVAYITIKTTLACLTSADNTTVQAVASAIGRAIEDEARFGRIRDLEAKHFKKNVEEQLNKRVGHVYKKAFMQVVEADMLSKGLLGGEAWSSWHKEDSIHVGVRCIEMLIESTGMVSLHRQNAGVVGQDSETIELAPEYAEAIATRAGALAGISPMFQPCVVPPKPWTGITGGGYWAAGRKPLQLVRTRSLAALRRYEEVSMPEVIKAVNIAQNTAWRVNKKVLDVANAITQWQHCPVADVPAMDRGEMPARPLDIDTNEIALKAWKKEASAFYRKDKARVSRRLSMEFMLSQANKFANYKAIWFPQNMDWRGRVYAVPMFNPQGNDMTKGLLTFAQGKPIGEDGFYWLKIHGANTAGVDKVPFPQRIKFVEDNHTNIMECAKAPLENTWWAEQDSPFCFLAFCFEYAGVINHGLSYNCSLPLAFDGSCSGIQHFSAMLRDEIGGKAVNLLPSAEVQDIYRIVSDKVNEVLKQDLINGTSTTLETVTDKKTGEITERTKYGTKVMAQWWLEHGVNRGVTKRSVMTLAYGSKEFGFRDQVLSDTIQPAIDNGKGDMFLNPNQAAGYMAKLIWNAVSVTVVAAVEAMNWLKSAAKLLAAEVKDKKTDTVLRGRCAVHWVTPDGFPVWQEYKKPIQTRLNLMFLGQFRLQPTINTNKDSEIDAHKQESGIAPNFVHSQDGNHLRMTVVWAHEKYGIESFALIHDSFGTIPADAANLFKAVRETMVSTYESCDVLADFYDQFADQLHESQLDKMPALPAKGNLNLRDILKSDFAFA

SEQ ID NO: 131 - DNA, 2670 bp, synthetic construct
  misc_feature 1..2670: note = Variant of RNA polymerase
  source 1..2670: mol_type = other DNA
atgcaccatcaccatcaccatatgaacacgattaacatcgctaagaacgacttctctgacatcgaactggctgctatcccgttcaacactctggctgaccattacggtgagcgtttagctcgcgaacagttggcccttgagcatgagtcttacgagatgggtgaagcacgcttccgcaagatgtttgagcgtcaacttaaagctggtgaggttgcggataacgctgccgccaagcctctcatcactaccctactccctaagatgattgcacgcatcaacgactggtttgaggaagtgaaagctaagcgcggcaagcgcccgacagccttccagttcctgcaagaaatcaagccggaagccgtagcgtacatcaccattaagaccactctggcttgcctaaccagtgcggacaatacaaccgttcaggctgtagcaagcgcaatcggtcgggccattgaggacgaggctcgcttcggtcgtatccgtgaccttgaagctaagcacttcaagaaaaacgttgaggaacaactcaacaagcgcgtagggcacgtctacaagaaagcatttatgcaagttgtcgaggctgacatgctctctaagggtctactcggtggcgaggcgtggtcttcgtggcataaggaagactctattcatgtaggagtacgctgcatcgagatgctcattgagtcaaccggaatggttagcttacaccgccaaaatgctggcgtagtaggtcaagactctgagactatcgaactcgcacctgaatacgctgaggctatcgcaacccgtgcaggtgcgctggctggcatctctccgatgttccaaccttgcgtagttcctcctaagccgtggactggcattactggtggtggctattgggctgcggggcgcaaacccctgcagttagtacgtactcgcagtctggcggcgcttcgccgctatgaagaagtgtcgatgccggaggtcatcaaagcagtcaacattgcgcagaatacagcatggcgtgtgaacaagaaagttctcgacgtagcgaatgcaatcacccaatggcagcactgtccagtcgcggatgtgcctgcgatggatcgtggcgaaatgccagctcgtccgttggacatcgataccaacgagattgcacttaaagcgtggaagaaagaagcttccgcgttctaccgcaaagacaaagcacgcgttagccgtcgtctgtcaatggagtttatgttatctcaggcgaacaagtttgcgaattataaagcaatctggtttccgcaaaacatggattggcgtgggcgcgtgtacgctgtcccgatgttcaatcctcagggcaacgatatgacgaaaggcctgctgacctttgcgcagggtaaacccattggtgaagacggcttctattggctcaagattcatggcgcaaatacagctggagtggataaagtaccgtttccacaacgcatcaaatttgttgaggataaccatacgaatattatggaatgcgcgaaagcaccgctggaaaacacttggtgggcggaacaggactcgccgttctgttttctggcgttctgctttgagtatgctggcgtcatcaatcacggtctgtcgtacaactgtagcttgcctctggcatttgatggtagttgctccggcattcaacatttctcagcgatgttacgcgacgaaattggcggcaaagctgtgaatctcctcccatctgcggaagtgcaggatatttatcgtatcgtcagcgacaaagttaacgaggtactgaaacaagatctgattaacggtacctctaccaccttggaaacggtgactgataagaagacaggcgaaattaccgaacgcacgaaatacgggaccaaagttatggcacagtggtggttagaacacggtgtgaatcgtggcgtcacgaaacgctcggttatgactttggcgtatgggagcaaagagtttggattccgcgatcaagtgctgagtgacaccattcaaccggcgatcgataacggcaaaggtgacatgtttctgaatccgaatcaggctgctggttacatggcgaaactgatctggaacgcagtgtccgtcaccgtagtcgcagcagttgaggcgatgaactggctgaaaagtgcggcgaaattacttgctgctgaagtgaaggataagaagacggatacagttctgcgtggccgctgcgcagtacattgggtgactcccgacggcttccctgtgtggcaggaataccgtaagcctattcagacgcgcttgaacctgatgttcctcggtcagttccgcttacagcctaccattaacaccaacaaagatagcgagattgatgcacacaaacaggagtctggtatcgctcctaactttgtacacagccaagacggtaaccaccttcgtatgactgtagtgtgggcacacgagaagtacggaatcgaatcttttgcactgattcacgactccttcggtaccattccggctgacgctgcgaacctgttcaaagcagtgcgcgaaactatggtttcgacatatgagtcttgtgatgtactggctgatttctacgaccagttcgctgaccagttgcacgagtctcaattggacaaaatgccagcacttccggctaaaggtaacttgaacctccgtgacatcttaaaatcggacttcgcgttcgcg

SEQ ID NO: 132 - protein, 890 aa, synthetic construct
  REGION 1..890: note = Variant of RNA polymerase
MHHHHHHMNTINIAKNDFSDIELAAIPFNTLADHYGERLAREQLALEHESYEMGEARFRKMFERQLKAGEVADNAAAKPLITTLLPKMIARINDWFEEVKAKRGKRPTAFQFLQEIKPEAVAYITIKTTLACLTSADNTTVQAVASAIGRAIEDEARFGRIRDLEAKHFKKNVEEQLNKRVGHVYKKAFMQVVEADMLSKGLLGGEAWSSWHKEDSIHVGVRCIEMLIESTGMVSLHRQNAGVVGQDSETIELAPEYAEAIATRAGALAGISPMFQPCVVPPKPWTGITGGGYWAAGRKPLQLVRTRSLAALRRYEEVSMPEVIKAVNIAQNTAWRVNKKVLDVANAITQWQHCPVADVPAMDRGEMPARPLDIDTNEIALKAWKKEASAFYRKDKARVSRRLSMEFMLSQANKFANYKAIWFPQNMDWRGRVYAVPMFNPQGNDMTKGLLTFAQGKPIGEDGFYWLKIHGANTAGVDKVPFPQRIKFVEDNHTNIMECAKAPLENTWWAEQDSPFCFLAFCFEYAGVINHGLSYNCSLPLAFDGSCSGIQHFSAMLRDEIGGKAVNLLPSAEVQDIYRIVSDKVNEVLKQDLINGTSTTLETVTDKKTGEITERTKYGTKVMAQWWLEHGVNRGVTKRSVMTLAYGSKEFGFRDQVLSDTIQPAIDNGKGDMFLNPNQAAGYMAKLIWNAVSVTVVAAVEAMNWLKSAAKLLAAEVKDKKTDTVLRGRCAVHWVTPDGFPVWQEYRKPIQTRLNLMFLGQFRLQPTINTNKDSEIDAHKQESGIAPNFVHSQDGNHLRMTVVWAHEKYGIESFALIHDSFGTIPADAANLFKAVRETMVSTYESCDVLADFYDQFADQLHESQLDKMPALPAKGNLNLRDILKSDFAFA

SEQ ID NO: 133 - DNA, 2670 bp, synthetic construct
  misc_feature 1..2670: note = Variant of RNA polymerase
  source 1..2670: mol_type = other DNA
atgcaccatcaccatcaccatatgaacacgattaacatcgctaagaacgacttctctgacatcgaactggctgctatcccgttcaacactctggctgaccattacggtgagcgtttagctcgcgaacagttggcccttgagcatgagtcttacgagatgggtgaagcacgcttccgcaagatgtttgagcgtcaacttaaagctggtgaggttgcggataacgctgccgccaagcctctcatcactaccctactccctaagatgattgcacgcatcaacgactggtttgaggaagtgaaagctaagcgcggcaagcgcccgacagccttccagttcctgcaagaaatcaagccggaagccgtagcgtacatcaccattaagaccactctggcttgcctaaccagtgcggacaatacaaccgttcaggctgtagcaagcgcaatcggtcgggccattgaggacgaggctcgcttcggtcgtatccgtgaccttgaagctaagcacgtgaagaaaaacgttgaggaacaactcaacaagcgcgtagggcacgtctacaagaaagcatttatgcaagttgtcgaggctgacatgctctctaagggtctactcggtggcgaggcgtggtcttcgtggcataaggaagactctattcatgtaggagtacgctgcatcgagatgctcattgagtcaaccggaatggttagcttacaccgccaaaatgctggcgtagtaggtcaagactctgagactatcgaactcgcacctgaatacgctgaggctatcgcaacccgtgcaggtgcgctggctggcatctctccgatgttccaaccttgcgtagttcctcctaagccgtggactggcattactggtggtggctattgggctgcggggcgcaaacccctgcagttagtacgtactcgcagtctggcggcgcttcgccgctatgaagaagtgtcgatgccggaggtcatcaaagcagtcaacattgcgcagaatacagcatggcgtgtgaacaagaaagttctcgacgtagcgaatgcaatcacccaatggcagcactgtccagtcgcggatgtgcctgcgatggatcgtggcgaaatgccagctcgtccgttggacatcgataccaacgagattgcacttaaagcgtggaagaaagaagcttccgcgttctaccgcaaagacaaagcacgcgttagccgtcgtctgtcaatggagtttatgttatctcaggcgaacaagtttgcgaattataaagcaatctggtttccgcaaaacatggattggcgtgggcgcgtgtacgccgtcccgatgttcaatcctcagggcaacgatatgacgaaaggcctgctgacctttgcgcagggtaaacccattggtgaagacggcttctattggctcaagattcatggcgcaaatacagctggagtggataaagtaccgtttccacaacgcatcaaatttgttgaggataaccatacgaatattatggaatgcgcgaaagcaccgctggaaaacacttggtgggcggaacaggactcgccgttctgttttctggcgttctgctttgagtatgctggcgtcatcaatcacggtctgtcgtacaactgtagcttgcctctggcatttgatggtagttgctccggcattcaacatttctcagcgatgttacgcgacgaaattggcggcaaagctgtgaatctcctcccatctgcggaagtgcaggatatttatcgtatcgtcagcgacaaagttaacgaggtactgaaacaagatctgattaacggtacctctaccaccttggaaacggtgactgataagaagacaggcgaaattaccgaacgcacgaaatacgggaccaaagttatggcacagtggtggttagaacacggtgtgaatcgtggcgtcacgaaacgctcggttatgactttggcgtatgggagcaaagagtttggattccgcgatcaagtgctgagtgacaccattcaaccggcgatcgataacggcaaaggtgacatgtttctgaatccgaatcaggctgctggttacatggcgaaactgatctggaacgcagtgtccgtcaccgtagtcgcagcagttgaggcgatgaactggctgaaaagtgcggcgaaattacttgctgctgaagtgaaggataagaagacggatacagttctgcgtggccgctgcgcagtacattgggtgactcccgacggcttccctgtgtggcaggaatacaagaagcctattcagacgcgcttgaacctgatgttcctcggtcagttccgcttacagcctaccattaacaccaacaaagatagcgagattgatgcacacaaacaggagtctggtatcgctcctaactttgtacacagccaagacggtaaccaccttcgtatgactgtagtgtgggcacacgagaagtacggaatcgaatcttttgcactgattcacgactccttcggtaccattccggctgacgctgcgaacctgttcaaagcagtgcgcgaaactatggtttcgacatatgagtcttgtgatgtactggctgatttctacgaccagttcgctgaccagttgcacgagtctcaattggacaaaatgccagcacttccggctaaaggtaacttgaacctccgtgacatcttaaaatcggacttcgcgttcgcg

SEQ ID NO: 134 - protein, 890 aa, synthetic construct
  REGION 1..890: note = Variant of RNA polymerase
MHHHHHHMNTINIAKNDFSDIELAAIPFNTLADHYGERLAREQLALEHESYEMGEARFRKMFERQLKAGEVADNAAAKPLITTLLPKMIARINDWFEEVKAKRGKRPTAFQFLQEIKPEAVAYITIKTTLACLTSADNTTVQAVASAIGRAIEDEARFGRIRDLEAKHVKKNVEEQLNKRVGHVYKKAFMQVVEADMLSKGLLGGEAWSSWHKEDSIHVGVRCIEMLIESTGMVSLHRQNAGVVGQDSETIELAPEYAEAIATRAGALAGISPMFQPCVVPPKPWTGITGGGYWAAGRKPLQLVRTRSLAALRRYEEVSMPEVIKAVNIAQNTAWRVNKKVLDVANAITQWQHCPVADVPAMDRGEMPARPLDIDTNEIALKAWKKEASAFYRKDKARVSRRLSMEFMLSQANKFANYKAIWFPQNMDWRGRVYAVPMFNPQGNDMTKGLLTFAQGKPIGEDGFYWLKIHGANTAGVDKVPFPQRIKFVEDNHTNIMECAKAPLENTWWAEQDSPFCFLAFCFEYAGVINHGLSYNCSLPLAFDGSCSGIQHFSAMLRDEIGGKAVNLLPSAEVQDIYRIVSDKVNEVLKQDLINGTSTTLETVTDKKTGEITERTKYGTKVMAQWWLEHGVNRGVTKRSVMTLAYGSKEFGFRDQVLSDTIQPAIDNGKGDMFLNPNQAAGYMAKLIWNAVSVTVVAAVEAMNWLKSAAKLLAAEVKDKKTDTVLRGRCAVHWVTPDGFPVWQEYKKPIQTRLNLMFLGQFRLQPTINTNKDSEIDAHKQESGIAPNFVHSQDGNHLRMTVVWAHEKYGIESFALIHDSFGTIPADAANLFKAVRETMVSTYESCDVLADFYDQFADQLHESQLDKMPALPAKGNLNLRDILKSDFAFA

SEQ ID NO: 135 - DNA, 2670 bp, synthetic construct
  misc_feature 1..2670: note = Variant of RNA polymerase
  source 1..2670: mol_type = other DNA
atgcaccatcaccatcaccatatgaacacgattaacatcgctaagaacgacttctctgacatcgaactggctgctatcccgttcaacactctggctgaccattacggtgagcgtttagctcgcgaacagttggcccttgagcatgagtcttacgagatgggtgaagcacgcttccgcaagatgtttgagcgtcaacttaaagctggtgaggaggcggataacgctgccgccaagcctctcatcactaccctactccctaagatgattgcacgcatcaacgactggtttgaggaagtgaaagctaagcgcggcaagcgcccgacagccttccagttcctgcaagaaatcaagccggaagccgtagcgtacatcaccattaagaccactctggcttgcctaaccagtgcggacaatacaaccgttcaggctgtagcaagcgcaatcggtcgggccattgaggacgaggctcgcttcggtcgtatccgtgaccttgaagctaagcacttcaagaaaaacgttgaggaacaactcaacaagcgcgtagggcacgtctacaagaaagcatttatgcaagttgtcgaggctgacatgctctctaagggtctactcggtggcgaggcgtggtcttcgtggcataaggaagactctattcatgtaggagtacgctgcatcgagatgctcattgagtcaaccggaatggttagcttacaccgccaaaatgctggcgtagtaggtcaagactctgagactatcgaactcgcacctgaatacgctgaggctatcgcaacccgtgcaggtgcgctggctggcatctctccgatgttccaaccttgcgtagttcctcctaagccgtggactggcattactggtggtggctattgggctgcggggcgcaaacccctgcagttagtacgtactcgcagtctggcggcgcttcgccgctatgaagaagtgtcgatgccggaggtcatcaaagcagtcaacattgcgcagaatacagcatggcgtgtgaacaagaaagttctcgacgtagcgaatgcaatcacccaatggcagcactgtccagtcgcggatgtgcctgcgatggatcgtggcgaaatgccagctcgtccgttggacatcgataccaacgagattgcacttaaagcgtggaagaaagaagcttccgcgttctaccgcaaagacaaagcacgcgttagccgtcgtctgtcaatggagtttatgttatctcaggcgaacaagtttgcgaattataaagcaatctggtttccgcaaaacatggattggcgtgggcgcgtgtacgctgtcccgatgttcaatcctcagggcaacgatatgacgaaaggcctgctgacctttgcgcagggtaaacccattggtgaagacggcttctattggctcaagattcatggcgcaaatacagctggagtggataaagtaccgtttccacaacgcatcaaatttgttgaggataaccatacgaatattatggaatgcgcgaaagcaccgctggaaaacacttggtgggcggaacaggactcgccgttctgttttctggcgttctgctttgagtatgctggcgtcatcaatcacggtctgtcgtacaactgtagcttgcctctggcatttgatggtagttgctccggcattcaacatttctcagcgatgttacgcgacgaaattggcggcaaagctgtgaatctcctcccatctgcggaagtgcaggatatttatcgtatcgtcagcgacaaagttaacgaggtactgaaacaagatctgattaacggtacctctaccaccttggaaacggtgactgataagaagacaggcgaaattaccgaacgcacgaaatacgggaccaaagttatggcacagtggtggttagaacacggtgtgaatcgtggcgtcacgaaacgctcggttatgactttggcgtatgggagcaaagagtttggattccgcgatcaagtgctgagtgacaccattcaaccggcgatcgataacggcaaaggtgacatgtttctgaatccgaatcaggctgctggttacatggcgaaactgatctggaacgcagtgtccgtcaccgtagtcgcagcagttgaggcgatgaactggctgaaaagtgcggcgaaattacttgctgctgaagtgaaggataagaagacggatacagttctgcgtggccgctgcgcagtacattgggtgactcccgacggcttccctgtgtggcaggaatacaagaagcctattcagacgcgcttgaacctgatgttcctcggtcagttccgcttacagcctaccattaacaccaacaaagatagcgagattgatgcacacaaacaggagtctggtatcgctcctaactttgtacacagccaagacggtaaccaccttcgtatgactgtagtgtgggcacacgagaagtacggaatcgaatcttttgcactgattcacgactccttcggtaccattccggctgacgctgcgaacctgttcaaagcagtgcgcgaaactatggtttcgacatatgagtcttgtgatgtactggctgatttctacgaccagttcgctgaccagttgcacgagtctcaattggacaaaatgccagcacttccggctaaaggtaacttgaacctccgtgacatcttaaaatcggacttcgcgttcgcg

SEQ ID NO: 136 - protein, 890 aa, synthetic construct
  REGION 1..890: note = Variant of RNA polymerase
MHHHHHHMNTINIAKNDFSDIELAAIPFNTLADHYGERLAREQLALEHESYEMGEARFRKMFERQLKAGEEADNAAAKPLITTLLPKMIARINDWFEEVKAKRGKRPTAFQFLQEIKPEAVAYITIKTTLACLTSADNTTVQAVASAIGRAIEDEARFGRIRDLEAKHFKKNVEEQLNKRVGHVYKKAFMQVVEADMLSKGLLGGEAWSSWHKEDSIHVGVRCIEMLIESTGMVSLHRQNAGVVGQDSETIELAPEYAEAIATRAGALAGISPMFQPCVVPPKPWTGITGGGYWAAGRKPLQLVRTRSLAALRRYEEVSMPEVIKAVNIAQNTAWRVNKKVLDVANAITQWQHCPVADVPAMDRGEMPARPLDIDTNEIALKAWKKEASAFYRKDKARVSRRLSMEFMLSQANKFANYKAIWFPQNMDWRGRVYAVPMFNPQGNDMTKGLLTFAQGKPIGEDGFYWLKIHGANTAGVDKVPFPQRIKFVEDNHTNIMECAKAPLENTWWAEQDSPFCFLAFCFEYAGVINHGLSYNCSLPLAFDGSCSGIQHFSAMLRDEIGGKAVNLLPSAEVQDIYRIVSDKVNEVLKQDLINGTSTTLETVTDKKTGEITERTKYGTKVMAQWWLEHGVNRGVTKRSVMTLAYGSKEFGFRDQVLSDTIQPAIDNGKGDMFLNPNQAAGYMAKLIWNAVSVTVVAAVEAMNWLKSAAKLLAAEVKDKKTDTVLRGRCAVHWVTPDGFPVWQEYKKPIQTRLNLMFLGQFRLQPTINTNKDSEIDAHKQESGIAPNFVHSQDGNHLRMTVVWAHEKYGIESFALIHDSFGTIPADAANLFKAVRETMVSTYESCDVLADFYDQFADQLHESQLDKMPALPAKGNLNLRDILKSDFAFA

SEQ ID NO: 137 - DNA, 2670 bp, synthetic construct
  misc_feature 1..2670: note = Variant of RNA polymerase
  source 1..2670: mol_type = other DNA
atgcaccatcaccatcaccatatgaacacgattaacatcgctaagaacgacttctctgacatcgaactggctgctatcccgttcaacactctggctgaccattacggtgagcgtttagctcgcgaacagttggcccttgagcatgagtcttacgagatgggtgaagcacgcttccgcaagatgtttgagcgtcaacttaaagctggtgaggttgcggataacgctgccgccaagcctctcatcactaccctactccctaagatgattgcacgcatcaacgactggtttgaggaagtgaaagctaagcgcggcaagcgcccgacagccttccagttcctgcaagaaatcaagccggaagccgtagcgtacatcaccattaagaccactctggcttgcctaaccagtgcggacaatacaaccgttcaggctgtagcaagcgcaatcggtcgggccattgaggacgaggctcgcttcggttgtatccgtgaccttgaagctaagcacttcaagaaaaacgttgaggaacaactcaacaagcgcgtagggcacgtctacaagaaagcatttatgcaagttgtcgaggctgacatgctctctaagggtctactcggtggcgaggcgtggtcttcgtggcataaggaagactctattcatgtaggagtacgctgcatcgagatgctcattgagtcaaccggaatggttagcttacaccgccaaaatgctggcgtagtaggtcaagactctgagactatcgaactcgcacctgaatacgctgaggctatcgcaacccgtgcaggtgcgctggctggcatctctccgatgttccaaccttgcgtagttcctcctaagccgtggactggcattactggtggtggctattgggctgcggggcgcaaacccctgcagttagtacgtactcgcagtctggcggcgcttcgccgctatgaagaagtgtcgatgccggaggtcatcaaagcagtcaacattgcgcagaatacagcatggcgtgtgaacaagaaagttctcgacgtagcgaatgcaatcacccaatggcagcactgtccagtcgcggatgtgcctgcgatggatcgtggcgaaatgccagctcgtccgttggacatcgataccaacgagattgcacttaaagcgtggaagaaagaagcttccgcgttctaccgcaaagacaaagcacgcgttagccgtcgtctgtcaatggagtttatgttatctcaggcgaacaagtttgcgaattataaagcaatctggtttccgcaaaacatggattggcgtgggcgcgtgtacgctgtcccgatgttcaatcctcagggcaacgatatgacgaaaggcctgctgacctttgcgcagggtaaacccattggtgaagacggcttctattggctcaagattcatggcgcaaatacagctggagtggataaagtaccgtttccacaacgcatcaaatttgttgaggataaccatacgaatattatggaatgcgcgaaagcaccgctggaaaacacttggtgggcggaacaggactcgccgttctgttttctggcgttctgctttgagtatgctggcgtcatcaatcacggtctgtcgtacaactgtagcttgcctctggcatttgatggtagttgctccggcattcaacatttctcagcgatgttacgcgacgaaattggcggcaaagctgtgaatctcctcccatctgcggaagtgcaggatatttatcgtatcgtcagcgacaaagttaacgaggtactgaaacaagatctgattaacggtacctctaccaccttggaaacggtgactgataagaagacaggcgaaattaccgaacgcacgaaatacgggaccaaagttatggcacagtggtggttagaacacggtgtgaatcgtggcgtcacgaaacgctcggttatgactttggcgtatgggagcaaagagtttggattccgcgatcaagtgctgagtgacaccattcaaccggcgatcgataacggcaaaggtgacatgtttctgaatccgaatcaggctgctggttacatggcgaaactgatctggaacgcagtgtccgtcaccgtagtcgcagcagttgaggcgatgaactggctgaaaagtgcggcgaaattacttgctgctgaagtgaaggataagaagacggatacagttctgcgtggccgctgcgcagtacattgggtgactcccgacggcttccctgtgtggcaggaatacaagaagcctattcagacgcgcttgaacctgatgttcctcggtcagttccgcttacagcctaccattaacaccaacaaagatagcgagattgatgcacacaaacaggagtctggtatcgctcctaactttgtacacagccaagacggtaaccaccttcgtatgactgtagtgtgggcacacgagaagtacggaatcgaatcttttgcactgattcacgactccttcggtaccattccggctgacgctgcgaacctgttcaaagcagtgcgcgaaactatggtttcgacatatgagtcttgtgatgtactggctgatttctacgaccagttcgctgaccagttgcacgagtctcaattggacaaaatgccagcacttccggctaaaggtaacttgaacctccgtgacatcttaaaatcggacttcgcgttcgcg

SEQ ID NO: 138 - protein, 890 aa, synthetic construct
  REGION 1..890: note = Variant of RNA polymerase
MHHHHHHMNTINIAKNDFSDIELAAIPFNTLADHYGERLAREQLALEHESYEMGEARFRKMFERQLKAGEVADNAAAKPLITTLLPKMIARINDWFEEVKAKRGKRPTAFQFLQEIKPEAVAYITIKTTLACLTSADNTTVQAVASAIGRAIEDEARFGCIRDLEAKHFKKNVEEQLNKRVGHVYKKAFMQVVEADMLSKGLLGGEAWSSWHKEDSIHVGVRCIEMLIESTGMVSLHRQNAGVVGQDSETIELAPEYAEAIATRAGALAGISPMFQPCVVPPKPWTGITGGGYWAAGRKPLQLVRTRSLAALRRYEEVSMPEVIKAVNIAQNTAWRVNKKVLDVANAITQWQHCPVADVPAMDRGEMPARPLDIDTNEIALKAWKKEASAFYRKDKARVSRRLSMEFMLSQANKFANYKAIWFPQNMDWRGRVYAVPMFNPQGNDMTKGLLTFAQGKPIGEDGFYWLKIHGANTAGVDKVPFPQRIKFVEDNHTNIMECAKAPLENTWWAEQDSPFCFLAFCFEYAGVINHGLSYNCSLPLAFDGSCSGIQHFSAMLRDEIGGKAVNLLPSAEVQDIYRIVSDKVNEVLKQDLINGTSTTLETVTDKKTGEITERTKYGTKVMAQWWLEHGVNRGVTKRSVMTLAYGSKEFGFRDQVLSDTIQPAIDNGKGDMFLNPNQAAGYMAKLIWNAVSVTVVAAVEAMNWLKSAAKLLAAEVKDKKTDTVLRGRCAVHWVTPDGFPVWQEYKKPIQTRLNLMFLGQFRLQPTINTNKDSEIDAHKQESGIAPNFVHSQDGNHLRMTVVWAHEKYGIESFALIHDSFGTIPADAANLFKAVRETMVSTYESCDVLADFYDQFADQLHESQLDKMPALPAKGNLNLRDILKSDFAFA

SEQ ID NO: 139 - DNA, 2670 bp, synthetic construct
  misc_feature 1..2670: note = Variant of RNA polymerase
  source 1..2670: mol_type = other DNA
atgcaccatcaccatcaccatatgaacacgattaacatcgctaagaacgacttctctgacatcgaactggctgctatcccgttcaacactctggctgaccattacggtgagcgtttagctcgcgaacagttggcccttgagcatgagtcttacgagatgggtgaagcacgcttccgcaagatgtttgagcgtcaacttaaagctggtgaggttgcggataacgctgccgccaagcctctcatcactaccctactccctaagatgattgcacgcatcaacgactggtttgaggaagtgaaagctaagcgcggcaagcgcccgacagccttccagttcctgcaagaaatcaagccggaagccgtagcgtacatcaccattaagaccactctggcttgcctaaccagtgcggacaatacaaccgttcaggctgtagcaagcgcaatcggtcgggccattgaggacgaggctcgcttcggtcgtatccgtgaccttgaagctaagcacttcaagaaaaacgttgaggaacaactcaacaagcgcgtagggcacgtctacaagaaagcatttatgcaagttgtcgagacggacatgctctctaagggtctactcggtggcgaggcgtggtcttcgtggcataaggaagactctattcatgtaggagtacgctgcatcgagatgctcattgagtcaaccggaatggttagcttacaccgccaaaatgctggcgtagtaggtcaagactctgagactatcgaactcgcacctgaatacgctgaggctatcgcaacccgtgcaggtgcgctggctggcatctctccgatgttccaaccttgcgtagttcctcctaagccgtggactggcattactggtggtggctattgggctgcggggcgcaaacccctgcagttagtacgtactcgcagtctggcggcgcttcgccgctatgaagaagtgtcgatgccggaggtcatcaaagcagtcaacattgcgcagaatacagcatggcgtgtgaacaagaaagttctcgacgtagcgaatgcaatcacccaatggcagcactgtccagtcgcggatgtgcctgcgatggatcgtggcgaaatgccagctcgtccgttggacatcgataccaacgagattgcacttaaagcgtggaagaaagaagcttccgcgttctaccgcaaagacaaagcacgcgttagccgtcgtctgtcaatggagtttatgttatctcaggcgaacaagtttgcgaattataaagcaatctggtttccgcaaaacatggattggcgtgggcgcgtgtacgctgtcccgatgttcaatcctcagggcaacgatatgacgaaaggcctgctgacctttgcgcagggtaaacccattggtgaagacggcttctattggctcaagattcatggcgcaaatacagctggagtggataaagtaccgtttccacaacgcatcaaatttgttgaggataaccatacgaatattatggaatgcgcgaaagcaccgctggaaaacacttggtgggcggaacaggactcgccgttctgttttctggcgttctgctttgagtatgctggcgtcatcaatcacggtctgtcgtacaactgtagcttgcctctggcatttgatggtagttgctccggcattcaacatttctcagcgatgttacgcgacgaaattggcggcaaagctgtgaatctcctcccatctgcggaagtgcaggatatttatcgtatcgtcagcgacaaagttaacgaggtactgaaacaagatctgattaacggtacctctaccaccttggaaacggtgactgataagaagacaggcgaaattaccgaacgcacgaaatacgggaccaaagttatggcacagtggtggttagaacacggtgtgaatcgtggcgtcacgaaacgctcggttatgactttggcgtatgggagcaaagagtttggattccgcgatcaagtgctgagtgacaccattcaaccggcgatcgataacggcaaaggtgacatgtttctgaatccgaatcaggctgctggttacatggcgaaactgatctggaacgcagtgtccgtcaccgtagtcgcagcagttgaggcgatgaactggctgaaaagtgcggcgaaattacttgctgctgaagtgaaggataagaagacggatacagttctgcgtggccgctgcgcagtacattgggtgactcccgacggcttccctgtgtggcaggaatacaagaagcctattcagacgcgcttgaacctgatgttcctcggtcagttccgcttacagcctaccattaacaccaacaaagatagcgagattgatgcacacaaacaggagtctggtatcgctcctaactttgtacacagccaagacggtaaccaccttcgtatgactgtagtgtgggcacacgagaagtacggaatcgaatcttttgcactgattcacgactccttcggtaccattccggctgacgctgcgaacctgttcaaagcagtgcgcgaaactatggtttcgacatatgagtcttgtgatgtactggctgatttctacgaccagttcgctgaccagttgcacgagtctcaattggacaaaatgccagcacttccggctaaaggtaacttgaacctccgtgacatcttaaaatcggacttcgcgttcgcg

SEQ ID NO: 140 - protein, 890 aa, synthetic construct
  REGION 1..890: note = Variant of RNA polymerase
MHHHHHHMNTINIAKNDFSDIELAAIPFNTLADHYGERLAREQLALEHESYEMGEARFRKMFERQLKAGEVADNAAAKPLITTLLPKMIARINDWFEEVKAKRGKRPTAFQFLQEIKPEAVAYITIKTTLACLTSADNTTVQAVASAIGRAIEDEARFGRIRDLEAKHFKKNVEEQLNKRVGHVYKKAFMQVVETDMLSKGLLGGEAWSSWHKEDSIHVGVRCIEMLIESTGMVSLHRQNAGVVGQDSETIELAPEYAEAIATRAGALAGISPMFQPCVVPPKPWTGITGGGYWAAGRKPLQLVRTRSLAALRRYEEVSMPEVIKAVNIAQNTAWRVNKKVLDVANAITQWQHCPVADVPAMDRGEMPARPLDIDTNEIALKAWKKEASAFYRKDKARVSRRLSMEFMLSQANKFANYKAIWFPQNMDWRGRVYAVPMFNPQGNDMTKGLLTFAQGKPIGEDGFYWLKIHGANTAGVDKVPFPQRIKFVEDNHTNIMECAKAPLENTWWAEQDSPFCFLAFCFEYAGVINHGLSYNCSLPLAFDGSCSGIQHFSAMLRDEIGGKAVNLLPSAEVQDIYRIVSDKVNEVLKQDLINGTSTTLETVTDKKTGEITERTKYGTKVMAQWWLEHGVNRGVTKRSVMTLAYGSKEFGFRDQVLSDTIQPAIDNGKGDMFLNPNQAAGYMAKLIWNAVSVTVVAAVEAMNWLKSAAKLLAAEVKDKKTDTVLRGRCAVHWVTPDGFPVWQEYKKPIQTRLNLMFLGQFRLQPTINTNKDSEIDAHKQESGIAPNFVHSQDGNHLRMTVVWAHEKYGIESFALIHDSFGTIPADAANLFKAVRETMVSTYESCDVLADFYDQFADQLHESQLDKMPALPAKGNLNLRDILKSDFAFA

SEQ ID NO: 141 - DNA, 2670 bp, synthetic construct
  misc_feature 1..2670: note = Variant of RNA polymerase
  source 1..2670: mol_type = other DNA
atgcaccatcaccatcaccatatgaacacgattaacatcgctaagaacgacttctctgacatcgaactggctgctatcccgttcaacactctggctgaccattacggtgagcgtttagctcgcgaacagttggcccttgagcatgagtcttacgagatgggtgaagcacgcttccgcaagatgtttgagcgtcaacttaaagctggtgaggttgcggataacgctgccgccaatcctctcatcactaccctactccctaagatgattgcacgcatcaacgactggtttgaggaagtgaaagctaagcgcggcaagcgcccgacagccttccagttcctgcaagaaatcaagccggaagccgtagcgtacatcaccattaagaccactctggcttgcctaaccagtgcggacaatacaaccgttcaggctgtagcaagcgcaatcggtcgggccattgaggacgaggctcgcttcggtcgtatccgtgaccttgaagctaagcacttcaagaaaaacgttgaggaacaactcaacaagcgcgtagggcacgtctacaagaaagcatttatgcaagttgtcgaggctgacatgctctctaagggtctactcggtggcgaggcgtggtcttcgtggcataaggaagactctattcatgtaggagtacgctgcatcgagatgctcattgagtcaaccggaatggttagcttacaccgccaaaatgctggcgtagtaggtcaagactctgagactatcgaactcgcacctgaatacgctgaggctatcgcaacccgtgcaggtgcgctggctggcatctctccgatgttccaaccttgcgtagttcctcctaagccgtggactggcattactggtggtggctattgggctgcggggcgcaaacccctgcagttagtacgtactcgcagtctggcggcgcttcgccgctatgaagaagtgtcgatgccggaggtcatcaaagcagtcaacattgcgcagaatacagcatggcgtgtgaacaagaaagttctcgacgtagcgaatgcaatcacccaatggcagcactgtccagtcgcggatgtgcctgcgatggatcgtggcgaaatgccagctcgtccgttggacatcgataccaacgagattgcacttaaagcgtggaagaaagaagcttccgcgttctaccgcaaagacaaagcacgcgttagccgtcgtctgtcaatggagtttatgttatctcaggcgaacaagtttgcgaattataaagcaatctggtttccgcaaaacatggattggcgtgggcgcgtgtacgctgtcccgatgttcaatcctcagggcaacgatatgacgaaaggcctgctgacctttgcgcagggtaaacccattggtgaagacggcttctattggctcaagattcatggcgcaaatacagctggagtggataaagtaccgtttccacaacgcatcaaatttgttgaggataaccatacgaatattatggaatgcgcgaaagcaccgctggaaaacacttggtgggcggaacaggactcgccgttctgttttctggcgttctgctttgagtatgctggcgtcatcaatcacggtctgtcgtacaactgtagcttgcctctggcatttgatggtagttgctccggcattcaacatttctcagcgatgttacgcgacgaaattggcggcaaagctgtgaatctcctcccatctgcggaagtgcaggatatttatcgtatcgtcagcgacaaagttaacgaggtactgaaacaagatctgattaacggtacctctaccaccttggaaacggtgactgataagaagacaggcgaaattaccgaacgcacgaaatacgggaccaaagttatggcacagtggtggttagaacacggtgtgaatcgtggcgtcacgaaacgctcggttatgactttggcgtatgggagcaaagagtttggattccgcgatcaagtgctgagtgacaccattcaaccggcgatcgataacggcaaaggtgacatgtttctgaatccgaatcaggctgctggttacatggcgaaactgatctggaacgcagtgtccgtcaccgtagtcgcagcagttgaggcgatgaactggctgaaaagtgcggcgaaattacttgctgctgaagtgaaggataagaagacggatacagttctgcgtggccgctgcgcagtacattgggtgactcccgacggcttccctgtgtggcaggaatacaagaagcctattcagacgcgcttgaacctgatgttcctcggtcagttccgcttacagcctaccattaacaccaacaaagatagcgagattgatgcacacaaacaggagtctggtatcgctcctaactttgtacacagccaagacggtaaccaccttcgtatgactgtagtgtgggcacacgagaagtacggaatcgaatcttttgcactgattcacgactccttcggtaccattccggctgacgctgcgaacctgttcaaagcagtgcgcgaaactatggtttcgacatatgagtcttgtgatgtactggctgatttctacgaccagttcgctgaccagttgcacgagtctcaattggacaaaatgccagcacttccggctaaaggtaacttgaacctccgtgacatcttaaaatcggacttcgcgttcgcg

SEQ ID NO: 142 - protein, 890 aa, synthetic construct
  REGION 1..890: note = Variant of RNA polymerase
MHHHHHHMNTINIAKNDFSDIELAAIPFNTLADHYGERLAREQLALEHESYEMGEARFRKMFERQLKAGEVADNAAANPLITTLLPKMIARINDWFEEVKAKRGKRPTAFQFLQEIKPEAVAYITIKTTLACLTSADNTTVQAVASAIGRAIEDEARFGRIRDLEAKHFKKNVEEQLNKRVGHVYKKAFMQVVEADMLSKGLLGGEAWSSWHKEDSIHVGVRCIEMLIESTGMVSLHRQNAGVVGQDSETIELAPEYAEAIATRAGALAGISPMFQPCVVPPKPWTGITGGGYWAAGRKPLQLVRTRSLAALRRYEEVSMPEVIKAVNIAQNTAWRVNKKVLDVANAITQWQHCPVADVPAMDRGEMPARPLDIDTNEIALKAWKKEASAFYRKDKARVSRRLSMEFMLSQANKFANYKAIWFPQNMDWRGRVYAVPMFNPQGNDMTKGLLTFAQGKPIGEDGFYWLKIHGANTAGVDKVPFPQRIKFVEDNHTNIMECAKAPLENTWWAEQDSPFCFLAFCFEYAGVINHGLSYNCSLPLAFDGSCSGIQHFSAMLRDEIGGKAVNLLPSAEVQDIYRIVSDKVNEVLKQDLINGTSTTLETVTDKKTGEITERTKYGTKVMAQWWLEHGVNRGVTKRSVMTLAYGSKEFGFRDQVLSDTIQPAIDNGKGDMFLNPNQAAGYMAKLIWNAVSVTVVAAVEAMNWLKSAAKLLAAEVKDKKTDTVLRGRCAVHWVTPDGFPVWQEYKKPIQTRLNLMFLGQFRLQPTINTNKDSEIDAHKQESGIAPNFVHSQDGNHLRMTVVWAHEKYGIESFALIHDSFGTIPADAANLFKAVRETMVSTYESCDVLADFYDQFADQLHESQLDKMPALPAKGNLNLRDILKSDFAFA

SEQ ID NO: 143 - DNA, 2670 bp, synthetic construct
  misc_feature 1..2670: note = Variant of RNA polymerase
  source 1..2670: mol_type = other DNA
atgcaccatcaccatcaccatatgaacacgattaacatcgctaagaacgacttctctgacatcgaactggctgctatcccgttcaacactctggctgaccattacggtgagcgtttagctcgcgaacagttggcccttgagcatgagtcttacgagatgggtgaagcacgcttccgcaagatgtttgagcgtcaacttaaagctggtgaggttgcggataacgctgccgccaagcctctcatcactaccctactccctaagatgattgcacgcatcaacgactggtttgaggaagtgaaagctaagcgcggcaagcgcccgacagccttccagttcctgcaagaaatcaagccggaagccgtagcgtacatcaccattaagaccactctggcttgcctaaccagtgcggacaatacaaccgttcaggctgtagcaagcgcaatcggtcgggccattgaggacgaggctcgcttcggtcgtatccgtgaccttgaagctaagcacttcaagaaaaacgttgaggaacaactcaacaagcgcgtagggcacgtctacaagaaagcatttatgcaagttgtcgaggctgacatgctctctaagggtctactcggtggcgaggcgtggtcttcgtggcataaggaagactctattcatgtaggagtacgctgcatcgagatgctcattgagtcaaccggaatggttagcttacaccgccaaaatgctggcgtagtaggtcaagactctgagactatcgaactcgcacctgaatacgctgaggctatcgcaacccgtgcaggtgcgctggctggcatctctccgatgttccaaccttgcgtagttcctcctaagccgtggactggcattactggtggtggctattgggctgcggggcgcaaacccctgcagttagtacgtactcgcagtctggcggcgcttcgccgctatgaagaagtgtcgatgccggaggtcatcaaagcagtcaacattgcgcagaatacagcatggcgtgtgaacaagaaagttctcgacgtagcgaatgcaatcacccaatggcagcactgtccagtcgcggatgtgcctgcgatggatcgtggcgaaatgccagctcgtccgttggacatcgataccaacgagattgcacttaaagcgtggaagaaagaagcttccgcgttctaccgcaaagacaaagcacgcgttagccgtcgtctgtcaatggagtttatgttatctcaggcgaacaagtttgcgaattataaagcaatctggtttccgcaaaacatggattggcgtgggcgcgtgtacgctgtcccgatgttcaatcctcagggcaacgatatgacgaaaggcctgctgacctttgcgcagggtaaacccattggtgaagacggcttctattggctcaagattcatggcgcaaatacagctggagtggataaagtaccgtttccacaacgcatcaaatttgttgaggataaccatacgaatattatggaatgcgcgaaagcaccgctggaaaacacttggtgggcggaacaggactcgccgttctgttttctggcgttctgctttgagtatgctggcgtcatcaatcacggtctgtcgtacaactgtagcttgcctctggcatttgatggtagttgctccggcattcaacatttctcagcgatgttacgcgacgaaattggcggcaaagctgtgaatctcctcccatctgcggaagtgcaggatatttatcgtatcgtcagcgacaaagttaacgaggtactgaaacaagatctgattaacggtacctctaccaccttggaaacggtgactgataagaagacaggcgaaaagaccgaacgcacgaaatacgggaccaaagttatggcacagtggtggttagaacacggtgtgaatcgtggcgtcacgaaacgctcggttatgactttggcgtatgggagcaaagagtttggattccgcgatcaagtgctgagtgacaccattcaaccggcgatcgataacggcaaaggtgacatgtttctgaatccgaatcaggctgctggttacatggcgaaactgatctggaacgcagtgtccgtcaccgtagtcgcagcagttgaggcgatgaactggctgaaaagtgcggcgaaattacttgctgctgaagtgaaggataagaagacggatacagttctgcgtggccgctgcgcagtacattgggtgactcccgacggcttccctgtgtggcaggaatacaagaagcctattcagacgcgcttgaacctgatgttcctcggtcagttccgcttacagcctaccattaacaccaacaaagatagcgagattgatgcacacaaacaggagtctggtatcgctcctaactttgtacacagccaagacggtaaccaccttcgtatgactgtagtgtgggcacacgagaagtacggaatcgaatcttttgcactgattcacgactccttcggtaccattccggctgacgctgcgaacctgttcaaagcagtgcgcgaaactatggtttcgacatatgagtcttgtgatgtactggctgatttctacgaccagttcgctgaccagttgcacgagtctcaattggacaaaatgccagcacttccggctaaaggtaacttgaacctccgtgacatcttaaaatcggacttcgcgttcgcg

SEQ ID NO: 144 - protein, 890 aa, synthetic construct
  REGION 1..890: note = Variant of RNA polymerase
MHHHHHHMNTINIAKNDFSDIELAAIPFNTLADHYGERLAREQLALEHESYEMGEARFRKMFERQLKAGEVADNAAAKPLITTLLPKMIARINDWFEEVKAKRGKRPTAFQFLQEIKPEAVAYITIKTTLACLTSADNTTVQAVASAIGRAIEDEARFGRIRDLEAKHFKKNVEEQLNKRVGHVYKKAFMQVVEADMLSKGLLGGEAWSSWHKEDSIHVGVRCIEMLIESTGMVSLHRQNAGVVGQDSETIELAPEYAEAIATRAGALAGISPMFQPCVVPPKPWTGITGGGYWAAGRKPLQLVRTRSLAALRRYEEVSMPEVIKAVNIAQNTAWRVNKKVLDVANAITQWQHCPVADVPAMDRGEMPARPLDIDTNEIALKAWKKEASAFYRKDKARVSRRLSMEFMLSQANKFANYKAIWFPQNMDWRGRVYAVPMFNPQGNDMTKGLLTFAQGKPIGEDGFYWLKIHGANTAGVDKVPFPQRIKFVEDNHTNIMECAKAPLENTWWAEQDSPFCFLAFCFEYAGVINHGLSYNCSLPLAFDGSCSGIQHFSAMLRDEIGGKAVNLLPSAEVQDIYRIVSDKVNEVLKQDLINGTSTTLETVTDKKTGEKTERTKYGTKVMAQWWLEHGVNRGVTKRSVMTLAYGSKEFGFRDQVLSDTIQPAIDNGKGDMFLNPNQAAGYMAKLIWNAVSVTVVAAVEAMNWLKSAAKLLAAEVKDKKTDTVLRGRCAVHWVTPDGFPVWQEYKKPIQTRLNLMFLGQFRLQPTINTNKDSEIDAHKQESGIAPNFVHSQDGNHLRMTVVWAHEKYGIESFALIHDSFGTIPADAANLFKAVRETMVSTYESCDVLADFYDQFADQLHESQLDKMPALPAKGNLNLRDILKSDFAFA

SEQ ID NO: 145 - DNA, 2670 bp, synthetic construct
  misc_feature 1..2670: note = Variant of RNA polymerase
  source 1..2670: mol_type = other DNA
atgcaccatcaccatcaccatatgaacacgattaacatcgctaagaacgacttctctgacatcgaactggctgctatcccgttcaacactctggctgaccattacggtgagcgtttagctcgcgaacagttggcccttgagcatgagtcttacgagatgggtgaagcacgcttccgcaagatgtttgagcgtcaacttaaagctggtgaggttgcggataacgctgccgccaagcctctcatcactaccctactccctaagatgattgcacgcatcaacgactggtttgaggaagtgaaagctaagcgcggcaagcgcccgacagccttccagttcctgcaagaaatcaagccggaagccgtagcgtacatcaccattaagaccactctggcttgcctaaccagtgcggacaatacaaccgttcaggctgtagcaagcgcaatcggtcgggccattgaggacgaggctcgcttcggtcgtatccgtgaccttgaagctaagcacttcaagaaaaacgttgaggaacaactcaacaagcgcgtagggcacgtctacaagaaagcatttatgcaagttgtcgaggctgacatgctctctaagggtctactcggtggcgaggcgtggtcttcgtggcataaggaagactctattcatgtaggagtacgctgcatcgagatgctcattgagtcaaccggaatggttagcttacaccgccaaaatgctggcgtagtaggtcaagactctgagactatcgaactcgcacctgaatacgctgaggctatcgcaacccgtgcaggtgcgctggctggcatctctccgatgttccaaccttgcgtagttcctcctaagccgtggactggcattactggtggtggctattgggctgcggggcgcaaacccctgcagttagtacgtactcgcagtctggcggcgcttcgccgctatgaagaagtgtcgatgccggaggtcatcaaagcagtcaacattgcgcagaatacagcatggcgtgtgaacaagaaagttctcgacgtagcgaatgcaatcacccaatggcagcactgtccagtcgcggatgtgcctgcgatggatcgtggcgaaatgccagctcgtccgttggacatcgataccaacgagattgcacttaaagcgtggaagaaagaagcttccgcgttctaccgcaaagacaaagcacgcgttagccgtcgtctgtcaatggagtttatgttatctcaggcgaacaagtttgcgaattataaagcaatctggtttccgcaaaacatggattggcgtgggcgcgtgtacgctgtcccgatgttcaatcctcagggcaacgatatgacgaaaggcctgctgacctttgcgcagggtaaacccattggtgaagacggcttctattggctcaagattcatggcgcaaatacagctggagtggataaagtaccgtttccacaacgcatcaaatttgttgaggataaccatacgaatattatggaatgcgcgaaagcaccgctggaaaacacttggtgggcggaacaggactcgccgttctgttttctggcgttctgctttgagtatgctggcgtcatcaatcacggtctgtcgtacaactgtagcttgcctctggcatttgatggtagttgctccggcattcaacatttctcagcgatgttacgcgacgaaattggcggcaaagctgtgaatctcctcccatctgcggaagtgcaggatatttatcgtatcgtcagcgacaaagttaacgagcatctgaaacaagatctgattaacggtacctctaccaccttggaaacggtgactgataagaagacaggcgaaattaccgaacgcacgaaatacgggaccaaagttatggcacagtggtggttagaacacggtgtgaatcgtggcgtcacgaaacgctcggttatgactttggcgtatgggagcaaagagtttggattccgcgatcaagtgctgagtgacaccattcaaccggcgatcgataacggcaaaggtgacatgtttctgaatccgaatcaggctgctggttacatggcgaaactgatctggaacgcagtgtccgtcaccgtagtcgcagcagttgaggcgatgaactggctgaaaagtgcggcgaaattacttgctgctgaagtgaaggataagaagacggatacagttctgcgtggccgctgcgcagtacattgggtgactcccgacggcttccctgtgtggcaggaatacaagaagcctattcagacgcgcttgaacctgatgttcctcggtcagttccgcttacagcctaccattaacaccaacaaagatagcgagattgatgcacacaaacaggagtctggtatcgctcctaactttgtacacagccaagacggtaaccaccttcgtatgactgtagtgtgggcacacgagaagtacggaatcgaatcttttgcactgattcacgactccttcggtaccattccggctgacgctgcgaacctgttcaaagcagtgcgcgaaactatggtttcgacatatgagtcttgtgatgtactggctgatttctacgaccagttcgctgaccagttgcacgagtctcaattggacaaaatgccagcacttccggctaaaggtaacttgaacctccgtgacatcttaaaatcggacttcgcgttcgcg

SEQ ID NO: 146 - protein, 890 aa, synthetic construct
  REGION 1..890: note = Variant of RNA polymerase
MHHHHHHMNTINIAKNDFSDIELAAIPFNTLADHYGERLAREQLALEHESYEMGEARFRKMFERQLKAGEVADNAAAKPLITTLLPKMIARINDWFEEVKAKRGKRPTAFQFLQEIKPEAVAYITIKTTLACLTSADNTTVQAVASAIGRAIEDEARFGRIRDLEAKHFKKNVEEQLNKRVGHVYKKAFMQVVEADMLSKGLLGGEAWSSWHKEDSIHVGVRCIEMLIESTGMVSLHRQNAGVVGQDSETIELAPEYAEAIATRAGALAGISPMFQPCVVPPKPWTGITGGGYWAAGRKPLQLVRTRSLAALRRYEEVSMPEVIKAVNIAQNTAWRVNKKVLDVANAITQWQHCPVADVPAMDRGEMPARPLDIDTNEIALKAWKKEASAFYRKDKARVSRRLSMEFMLSQANKFANYKAIWFPQNMDWRGRVYAVPMFNPQGNDMTKGLLTFAQGKPIGEDGFYWLKIHGANTAGVDKVPFPQRIKFVEDNHTNIMECAKAPLENTWWAEQDSPFCFLAFCFEYAGVINHGLSYNCSLPLAFDGSCSGIQHFSAMLRDEIGGKAVNLLPSAEVQDIYRIVSDKVNEHLKQDLINGTSTTLETVTDKKTGEITERTKYGTKVMAQWWLEHGVNRGVTKRSVMTLAYGSKEFGFRDQVLSDTIQPAIDNGKGDMFLNPNQAAGYMAKLIWNAVSVTVVAAVEAMNWLKSAAKLLAAEVKDKKTDTVLRGRCAVHWVTPDGFPVWQEYKKPIQTRLNLMFLGQFRLQPTINTNKDSEIDAHKQESGIAPNFVHSQDGNHLRMTVVWAHEKYGIESFALIHDSFGTIPADAANLFKAVRETMVSTYESCDVLADFYDQFADQLHESQLDKMPALPAKGNLNLRDILKSDFAFA

SEQ ID NO: 147 - DNA, 2670 bp, synthetic construct
  misc_feature 1..2670: note = Variant of RNA polymerase
  source 1..2670: mol_type = other DNA
atgcaccatcaccatcaccatatgaacacgattaacatcgctaagaacgacttctctgacatcgaactggctgctatcccgttcaacactctggctgaccattacggtgagcgtttagctcgcgaacagttggcccttgagcatgagtcttacgagatgggtgaagcacgcttccgcaagatgtttgagcgtcaacttaaagctggtgaggttgcggataacgctgccgccaagcctctcatcactaccctactccctaagatgattgcacgcatcaacgactggtttgaggaagtgaaagctaagcgcggcaagcgcccgacagccttccagttcctgcaagaaatcaagccggaagccgtagcgtacatcaccattaagaccactctggcttgcctaaccagtgcggacaatacaaccgttcaggctgtagcaagcgcaatcggtcgggccattgaggacgaggctcgcttcggtcgtatccgtgaccttgaagctaagcacttcaagaaaaacgttgaggaacaactcaacaagcgcgtagggcacgtctacaagaaagcatttatgcaagttgtcgaggctgacatgctctctaagggtctactcggtggcgaggcgtggtcttcgtggcataaggaagactctattcatgtaggagtacgctgcatcgagatgctcattgagtcaaccggaatggttagcttacaccgccaaaatgctggcgtagtaggtcaagactctgagactatcgaactcgcacctgaatacgctgaggctatcgcaacccgtgcaggtgcgctggctggcatctctccgatgttccaaccttgcgtagttcctcctaagccgtggactggcattactggtggtggctattgggctgcggggcgcaaacccctgcagttagtacgtactcgcagtctggcggcgcttcgccgctatgaagaagtgtcgatgccggaggtcatcaaagcagtcaacattgcgcagaatacagcatggcgtgtgaacaagaaagttctcgacgtagcgaatgcaatcacccaatggcagcactgtccagtcgcggatgtgcctgcgatggatcgtggcgaaatgccagctcgtccgttggacatcgataccaacgagattgcacttaaagcgtggaagaaagaagcttccgcgttctaccgcaaagacaaagcacgcgttagccgtcgtctgtcaatggagtttatgttatctcaggcgaacaagtttgcgaattataaagcaatctggtttccgcaaaacatggattggcgtgggcgcgtgtacgctgtcccgatgttcaatcctcagggcaacgatatgacgaaaggcctgctgacctttgcgcagggtaaacccattggtgaagacggcttctattggctcaagattcatggcgcaaatacagctggagtggataaagtaccgtttccacaacgcatcaaatttgttgaggataaccatacgaatattatggaatgcgcgaaagcaccgctggaaaacacttggtgggcggaacaggactcgccgttctgttttctggcgttctgctttgagtatgctggcgtcatcaatcacggtctgtcgtacaactctagcttgcctctggcatttgatggtagttgctccggcattcaacatttctcagcgatgttacgcgacgaaattggcggcaaagctgtgaatctcctcccatctgcggaagtgcaggatatttatcgtatcgtcagcgacaaagttaacgaggtactgaaacaagatctgattaacggtacctctaccaccttggaaacggtgactgataagaagacaggcgaaattaccgaacgcacgaaatacgggaccaaagttatggcacagtggtggttagaacacggtgtgaatcgtggcgtcacgaaacgctcggttatgactttggcgtatgggagcaaagagtttggattccgcgatcaagtgctgagtgacaccattcaaccggcgatcgataacggcaaaggtgacatgtttctgaatccgaatcaggctgctggttacatggcgaaactgatctggaacgcagtgtccgtcaccgtagtcgcagcagttgaggcgatgaactggctgaaaagtgcggcgaaattacttgctgctgaagtgaaggataagaagacggatacagttctgcgtggccgctgcgcagtacattgggtgactcccgacggcttccctgtgtggcaggaatacaagaagcctattcagacgcgcttgaacctgatgttcctcggtcagttccgcttacagcctaccattaacaccaacaaagatagcgagattgatgcacacaaacaggagtctggtatcgctcctaactttgtacacagccaagacggtaaccaccttcgtatgactgtagtgtgggcacacgagaagtacggaatcgaatcttttgcactgattcacgactccttcggtaccattccggctgacgctgcgaacctgttcaaagcagtgcgcgaaactatggtttcgacatatgagtcttgtgatgtactggctgatttctacgaccagttcgctgaccagttgcacgagtctcaattggacaaaatgccagcacttccggctaaaggtaacttgaacctccgtgacatcttaaaatcggacttcgcgttcgcg

SEQ ID NO: 148 - protein, 890 aa, synthetic construct
  REGION 1..890: note = Variant of RNA polymerase
MHHHHHHMNTINIAKNDFSDIELAAIPFNTLADHYGERLAREQLALEHESYEMGEARFRKMFERQLKAGEVADNAAAKPLITTLLPKMIARINDWFEEVKAKRGKRPTAFQFLQEIKPEAVAYITIKTTLACLTSADNTTVQAVASAIGRAIEDEARFGRIRDLEAKHFKKNVEEQLNKRVGHVYKKAFMQVVEADMLSKGLLGGEAWSSWHKEDSIHVGVRCIEMLIESTGMVSLHRQNAGVVGQDSETIELAPEYAEAIATRAGALAGISPMFQPCVVPPKPWTGITGGGYWAAGRKPLQLVRTRSLAALRRYEEVSMPEVIKAVNIAQNTAWRVNKKVLDVANAITQWQHCPVADVPAMDRGEMPARPLDIDTNEIALKAWKKEASAFYRKDKARVSRRLSMEFMLSQANKFANYKAIWFPQNMDWRGRVYAVPMFNPQGNDMTKGLLTFAQGKPIGEDGFYWLKIHGANTAGVDKVPFPQRIKFVEDNHTNIMECAKAPLENTWWAEQDSPFCFLAFCFEYAGVINHGLSYNSSLPLAFDGSCSGIQHFSAMLRDEIGGKAVNLLPSAEVQDIYRIVSDKVNEVLKQDLINGTSTTLETVTDKKTGEITERTKYGTKVMAQWWLEHGVNRGVTKRSVMTLAYGSKEFGFRDQVLSDTIQPAIDNGKGDMFLNPNQAAGYMAKLIWNAVSVTVVAAVEAMNWLKSAAKLLAAEVKDKKTDTVLRGRCAVHWVTPDGFPVWQEYKKPIQTRLNLMFLGQFRLQPTINTNKDSEIDAHKQESGIAPNFVHSQDGNHLRMTVVWAHEKYGIESFALIHDSFGTIPADAANLFKAVRETMVSTYESCDVLADFYDQFADQLHESQLDKMPALPAKGNLNLRDILKSDFAFA

SEQ ID NO: 149 - DNA, 2670 bp, synthetic construct
  misc_feature 1..2670: note = Variant of RNA polymerase
  source 1..2670: mol_type = other DNA
atgcaccatcaccatcaccatatgaacacgattaacatcgctaagaacgacttctctgacatcgaactggctgctatcccgttcaacactctggctgaccattacggtgagcgtttagctcgcgaacagttggcccttgagcatgagtcttacgagatgggtgaagcacgcttccgcaagatgtttgagcgtcaacttaaagctggtgaggttgcggatagggctgccgccaagcctctcatcactaccctactccctaagatgattgcacgcatcaacgactggtttgaggaagtgaaagctaagcgcggcaagcgcccgacagccttccagttcctgcaagaaatcaagccggaagccgtagcgtacatcaccattaagaccactctggcttgcctaaccagtgcggacaatacaaccgttcaggctgtagcaagcgcaatcggtcgggccattgaggacgaggctcgcttcggtcgtatccgtgaccttgaagctaagcacttcaagaaaaacgttgaggaacaactcaacaagcgcgtagggcacgtctacaagaaagcatttatgcaagttgtcgaggctgacatgctctctaagggtctactcggtggcgaggcgtggtcttcgtggcataaggaagactctattcatgtaggagtacgctgcatcgagatgctcattgagtcaaccggaatggttagcttacaccgccaaaatgctggcgtagtaggtcaagactctgagactatcgaactcgcacctgaatacgctgaggctatcgcaacccgtgcaggtgcgctggctggcatctctccgatgttccaaccttgcgtagttcctcctaagccgtggactggcattactggtggtggctattgggctgcggggcgcaaacccctgcagttagtacgtactcgcagtctggcggcgcttcgccgctatgaagaagtgtcgatgccggaggtcatcaaagcagtcaacattgcgcagaatacagcatggcgtgtgaacaagaaagttctcgacgtagcgaatgcaatcacccaatggcagcactgtccagtcgcggatgtgcctgcgatggatcgtggcgaaatgccagctcgtccgttggacatcgataccaacgagattgcacttaaagcgtggaagaaagaagcttccgcgttctaccgcaaagacaaagcacgcgttagccgtcgtctgtcaatggagtttatgttatctcaggcgaacaagtttgcgaattataaagcaatctggtttccgcaaaacatggattggcgtgggcgcgtgtacgctgtcccgatgttcaatcctcagggcaacgatatgacgaaaggcctgctgacctttgcgcagggtaaacccattggtgaagacggcttctattggctcaagattcatggcgcaaatacagctggagtggataaagtaccgtttccacaacgcatcaaatttgttgaggataaccatacgaatattatggaatgcgcgaaagcaccgctggaaaacacttggtgggcggaacaggactcgccgttctgttttctggcgttctgctttgagtatgctggcgtcatcaatcacggtctgtcgtacaactgtagcttgcctctggcatttgatggtagttgctccggcattcaacatttctcagcgatgttacgcgacgaaattggcggcaaagctgtgaatctcctcccatctgcggaagtgcaggatatttatcgtatcgtcagcgacaaagttaacgaggtactgaaacaagatctgattaacggtacctctaccaccttggaaacggtgactgataagaagacaggcgaaattaccgaacgcacgaaatacgggaccaaagttatggcacagtggtggttagaacacggtgtgaatcgtggcgtcacgaaacgctcggttatgactttggcgtatgggagcaaagagtttggattccgcgatcaagtgctgagtgacaccattcaaccggcgatcgataacggcaaaggtgacatgtttctgaatccgaatcaggctgctggttacatggcgaaactgatctggaacgcagtgtccgtcaccgtagtcgcagcagttgaggcgatgaactggctgaaaagtgcggcgaaattacttgctgctgaagtgaaggataagaagacggatacagttctgcgtggccgctgcgcagtacattgggtgactcccgacggcttccctgtgtggcaggaatacaagaagcctattcagacgcgcttgaacctgatgttcctcggtcagttccgcttacagcctaccattaacaccaacaaagatagcgagattgatgcacacaaacaggagtctggtatcgctcctaactttgtacacagccaagacggtaaccaccttcgtatgactgtagtgtgggcacacgagaagtacggaatcgaatcttttgcactgattcacgactccttcggtaccattccggctgacgctgcgaacctgttcaaagcagtgcgcgaaactatggtttcgacatatgagtcttgtgatgtactggctgatttctacgaccagttcgctgaccagttgcacgagtctcaattggacaaaatgccagcacttccggctaaaggtaacttgaacctccgtgacatcttaaaatcggacttcgcgttcgcg

SEQ ID NO: 150 - protein, 890 aa, synthetic construct
  REGION 1..890: note = Variant of RNA polymerase
MHHHHHHMNTINIAKNDFSDIELAAIPFNTLADHYGERLAREQLALEHESYEMGEARFRKMFERQLKAGEVADRAAAKPLITTLLPKMIARINDWFEEVKAKRGKRPTAFQFLQEIKPEAVAYITIKTTLACLTSADNTTVQAVASAIGRAIEDEARFGRIRDLEAKHFKKNVEEQLNKRVGHVYKKAFMQVVEADMLSKGLLGGEAWSSWHKEDSIHVGVRCIEMLIESTGMVSLHRQNAGVVGQDSETIELAPEYAEAIATRAGALAGISPMFQPCVVPPKPWTGITGGGYWAAGRKPLQLVRTRSLAALRRYEEVSMPEVIKAVNIAQNTAWRVNKKVLDVANAITQWQHCPVADVPAMDRGEMPARPLDIDTNEIALKAWKKEASAFYRKDKARVSRRLSMEFMLSQANKFANYKAIWFPQNMDWRGRVYAVPMFNPQGNDMTKGLLTFAQGKPIGEDGFYWLKIHGANTAGVDKVPFPQRIKFVEDNHTNIMECAKAPLENTWWAEQDSPFCFLAFCFEYAGVINHGLSYNCSLPLAFDGSCSGIQHFSAMLRDEIGGKAVNLLPSAEVQDIYRIVSDKVNEVLKQDLINGTSTTLETVTDKKTGEITERTKYGTKVMAQWWLEHGVNRGVTKRSVMTLAYGSKEFGFRDQVLSDTIQPAIDNGKGDMFLNPNQAAGYMAKLIWNAVSVTVVAAVEAMNWLKSAAKLLAAEVKDKKTDTVLRGRCAVHWVTPDGFPVWQEYKKPIQTRLNLMFLGQFRLQPTINTNKDSEIDAHKQESGIAPNFVHSQDGNHLRMTVVWAHEKYGIESFALIHDSFGTIPADAANLFKAVRETMVSTYESCDVLADFYDQFADQLHESQLDKMPALPAKGNLNLRDILKSDFAFA

SEQ ID NO: 151 - DNA, 2670 bp, synthetic construct
  misc_feature 1..2670: note = Variant of RNA polymerase
  source 1..2670: mol_type = other DNA
atgcaccatcaccatcaccatatgaacacgattaacatcgctaagaacgacttctctgacatcgaactggctgctatcccgttcaacactctggctgaccattacggtgagcgtttagctcgcgaacagttggcccttgagcatgagtcttacgagatgggtgaagcacgcttccgcaagatgtttgagcgtcaacttaaagctggtgaggttgcggataacgctgccgccaagcctctcatcactaccctactccctaagatgattgcacgcatcaacgactggtttgaggaagtgaaagctaagcgcggcaagcgcccgacagccttccagttcctgcaagaaatcaagccggaagccgtagcgtacatcaccattaagaccactctggcttgcctaaccagtgcggacaatacaaccgttcaggctgtagcaagcgcaatcggtcgggccattgaggacgaggctcgcttcggtcgtatccgtgaccttgaagcttcgcacttcaagaaaaacgttgaggaacaactcaacaagcgcgtagggcacgtctacaagaaagcatttatgcaagttgtcgaggctgacatgctctctaagggtctactcggtggcgaggcgtggtcttcgtggcataaggaagactctattcatgtaggagtacgctgcatcgagatgctcattgagtcaaccggaatggttagcttacaccgccaaaatgctggcgtagtaggtcaagactctgagactatcgaactcgcacctgaatacgctgaggctatcgcaacccgtgcaggtgcgctggctggcatctctccgatgttccaaccttgcgtagttcctcctaagccgtggactggcattactggtggtggctattgggctgcggggcgcaaacccctgcagttagtacgtactcgcagtctggcggcgcttcgccgctatgaagaagtgtcgatgccggaggtcatcaaagcagtcaacattgcgcagaatacagcatggcgtgtgaacaagaaagttctcgacgtagcgaatgcaatcacccaatggcagcactgtccagtcgcggatgtgcctgcgatggatcgtggcgaaatgccagctcgtccgttggacatcgataccaacgagattgcacttaaagcgtggaagaaagaagcttccgcgttctaccgcaaagacaaagcacgcgttagccgtcgtctgtcaatggagtttatgttatctcaggcgaacaagtttgcgaattataaagcaatctggtttccgcaaaacatggattggcgtgggcgcgtgtacgctgtcccgatgttcaatcctcagggcaacgatatgacgaaaggcctgctgacctttgcgcagggtaaacccattggtgaagacggcttctattggctcaagattcatggcgcaaatacagctggagtggataaagtaccgtttccacaacgcatcaaatttgttgaggataaccatacgaatattatggaatgcgcgaaagcaccgctggaaaacacttggtgggcggaacaggactcgccgttctgttttctggcgttctgctttgagtatgctggcgtcatcaatcacggtctgtcgtacaactgtagcttgcctctggcatttgatggtagttgctccggcattcaacatttctcagcgatgttacgcgacgaaattggcggcaaagctgtgaatctcctcccatctgcggaagtgcaggatatttatcgtatcgtcagcgacaaagttaacgaggtactgaaacaagatctgattaacggtacctctaccaccttggaaacggtgactgataagaagacaggcgaaattaccgaacgcacgaaatacgggaccaaagttatggcacagtggtggttagaacacggtgtgaatcgtggcgtcacgaaacgctcggttatgactttggcgtatgggagcaaagagtttggattccgcgatcaagtgctgagtgacaccattcaaccggcgatcgataacggcaaaggtgacatgtttctgaatccgaatcaggctgctggttacatggcgaaactgatctggaacgcagtgtccgtcaccgtagtcgcagcagttgaggcgatgaactggctgaaaagtgcggcgaaattacttgctgctgaagtgaaggataagaagacggatacagttctgcgtggccgctgcgcagtacattgggtgactcccgacggcttccctgtgtggcaggaatacaagaagcctattcagacgcgcttgaacctgatgttcctcggtcagttccgcttacagcctaccattaacaccaacaaagatagcgagattgatgcacacaaacaggagtctggtatcgctcctaactttgtacacagccaagacggtaaccaccttcgtatgactgtagtgtgggcacacgagaagtacggaatcgaatcttttgcactgattcacgactccttcggtaccattccggctgacgctgcgaacctgttcaaagcagtgcgcgaaactatggtttcgacatatgagtcttgtgatgtactggctgatttctacgaccagttcgctgaccagttgcacgagtctcaattggacaaaatgccagcacttccggctaaaggtaacttgaacctccgtgacatcttaaaatcggacttcgcgttcgcg

SEQ ID NO: 152 - protein, 890 aa, synthetic construct
  REGION 1..890: note = Variant of RNA polymerase
MHHHHHHMNTINIAKNDFSDIELAAIPFNTLADHYGERLAREQLALEHESYEMGEARFRKMFERQLKAGEVADNAAAKPLITTLLPKMIARINDWFEEVKAKRGKRPTAFQFLQEIKPEAVAYITIKTTLACLTSADNTTVQAVASAIGRAIEDEARFGRIRDLEASHFKKNVEEQLNKRVGHVYKKAFMQVVEADMLSKGLLGGEAWSSWHKEDSIHVGVRCIEMLIESTGMVSLHRQNAGVVGQDSETIELAPEYAEAIATRAGALAGISPMFQPCVVPPKPWTGITGGGYWAAGRKPLQLVRTRSLAALRRYEEVSMPEVIKAVNIAQNTAWRVNKKVLDVANAITQWQHCPVADVPAMDRGEMPARPLDIDTNEIALKAWKKEASAFYRKDKARVSRRLSMEFMLSQANKFANYKAIWFPQNMDWRGRVYAVPMFNPQGNDMTKGLLTFAQGKPIGEDGFYWLKIHGANTAGVDKVPFPQRIKFVEDNHTNIMECAKAPLENTWWAEQDSPFCFLAFCFEYAGVINHGLSYNCSLPLAFDGSCSGIQHFSAMLRDEIGGKAVNLLPSAEVQDIYRIVSDKVNEVLKQDLINGTSTTLETVTDKKTGEITERTKYGTKVMAQWWLEHGVNRGVTKRSVMTLAYGSKEFGFRDQVLSDTIQPAIDNGKGDMFLNPNQAAGYMAKLIWNAVSVTVVAAVEAMNWLKSAAKLLAAEVKDKKTDTVLRGRCAVHWVTPDGFPVWQEYKKPIQTRLNLMFLGQFRLQPTINTNKDSEIDAHKQESGIAPNFVHSQDGNHLRMTVVWAHEKYGIESFALIHDSFGTIPADAANLFKAVRETMVSTYESCDVLADFYDQFADQLHESQLDKMPALPAKGNLNLRDILKSDFAFA

SEQ ID NO: 153 - DNA, 2670 bp, synthetic construct
  misc_feature 1..2670: note = Variant of RNA polymerase
  source 1..2670: mol_type = other DNA
atgcaccatcaccatcaccatatgaacacgattaacatcgctaagaacgacttctctgacatcgaactggctgctatcccgttcaacactctggctgaccattacggtgagcgtttagctcgcgaacagttggcccttgagcatgagtcttacgagatgggtgaagcacgcttccgcaagatgtttgagcgtcaacttaaagctggtgaggttgcggataacgctgccgccaagcctctcatcactaccctactccctaagatgattgcacgcatcaacgactggtttgaggaagtgaaagctaagcgcggcaagcgcccgacagccttccagttcctgcaagaaatcaagccggaagccgtagcgtacatcaccattaagaccactctggcttgcctaaccagtgcggacaatacaaccgttcaggctgtagcaagcgcaatcggtcgggccattgaggacgaggctcgcttcggtcgtatccgtgaccttgaagctaagcacttcaagaaaaacgttgaggaacaactcaacaagcgcgtagggcacgtctacaagaaagcatttatgcaaactgtcgaggctgacatgctctctaagggtctactcggtggcgaggcgtggtcttcgtggcataaggaagactctattcatgtaggagtacgctgcatcgagatgctcattgagtcaaccggaatggttagcttacaccgccaaaatgctggcgtagtaggtcaagactctgagactatcgaactcgcacctgaatacgctgaggctatcgcaacccgtgcaggtgcgctggctggcatctctccgatgttccaaccttgcgtagttcctcctaagccgtggactggcattactggtggtggctattgggctgcggggcgcaaacccctgcagttagtacgtactcgcagtctggcggcgcttcgccgctatgaagaagtgtcgatgccggaggtcatcaaagcagtcaacattgcgcagaatacagcatggcgtgtgaacaagaaagttctcgacgtagcgaatgcaatcacccaatggcagcactgtccagtcgcggatgtgcctgcgatggatcgtggcgaaatgccagctcgtccgttggacatcgataccaacgagattgcacttaaagcgtggaagaaagaagcttccgcgttctaccgcaaagacaaagcacgcgttagccgtcgtctgtcaatggagtttatgttatctcaggcgaacaagtttgcgaattataaagcaatctggtttccgcaaaacatggattggcgtgggcgcgtgtacgctgtcccgatgttcaatcctcagggcaacgatatgacgaaaggcctgctgacctttgcgcagggtaaacccattggtgaagacggcttctattggctcaagattcatggcgcaaatacagctggagtggataaagtaccgtttccacaacgcatcaaatttgttgaggataaccatacgaatattatggaatgcgcgaaagcaccgctggaaaacacttggtgggcggaacaggactcgccgttctgttttctggcgttctgctttgagtatgctggcgtcatcaatcacggtctgtcgtacaactgtagcttgcctctggcatttgatggtagttgctccggcattcaacatttctcagcgatgttacgcgacgaaattggcggcaaagctgtgaatctcctcccatctgcggaagtgcaggatatttatcgtatcgtcagcgacaaagttaacgaggtactgaaacaagatctgattaacggtacctctaccaccttggaaacggtgactgataagaagacaggcgaaattaccgaacgcacgaaatacgggaccaaagttatggcacagtggtggttagaacacggtgtgaatcgtggcgtcacgaaacgctcggttatgactttggcgtatgggagcaaagagtttggattccgcgatcaagtgctgagtgacaccattcaaccggcgatcgataacggcaaaggtgacatgtttctgaatccgaatcaggctgctggttacatggcgaaactgatctggaacgcagtgtccgtcaccgtagtcgcagcagttgaggcgatgaactggctgaaaagtgcggcgaaattacttgctgctgaagtgaaggataagaagacggatacagttctgcgtggccgctgcgcagtacattgggtgactcccgacggcttccctgtgtggcaggaatacaagaagcctattcagacgcgcttgaacctgatgttcctcggtcagttccgcttacagcctaccattaacaccaacaaagatagcgagattgatgcacacaaacaggagtctggtatcgctcctaactttgtacacagccaagacggtaaccaccttcgtatgactgtagtgtgggcacacgagaagtacggaatcgaatcttttgcactgattcacgactccttcggtaccattccggctgacgctgcgaacctgttcaaagcagtgcgcgaaactatggtttcgacatatgagtcttgtgatgtactggctgatttctacgaccagttcgctgaccagttgcacgagtctcaattggacaaaatgccagcacttccggctaaaggtaacttgaacctccgtgacatcttaaaatcggacttcgcgttcgcg

SEQ ID NO: 154 - protein, 890 aa, synthetic construct
  REGION 1..890: note = Variant of RNA polymerase
MHHHHHHMNTINIAKNDFSDIELAAIPFNTLADHYGERLAREQLALEHESYEMGEARFRKMFERQLKAGEVADNAAAKPLITTLLPKMIARINDWFEEVKAKRGKRPTAFQFLQEIKPEAVAYITIKTTLACLTSADNTTVQAVASAIGRAIEDEARFGRIRDLEAKHFKKNVEEQLNKRVGHVYKKAFMQTVEADMLSKGLLGGEAWSSWHKEDSIHVGVRCIEMLIESTGMVSLHRQNAGVVGQDSETIELAPEYAEAIATRAGALAGISPMFQPCVVPPKPWTGITGGGYWAAGRKPLQLVRTRSLAALRRYEEVSMPEVIKAVNIAQNTAWRVNKKVLDVANAITQWQHCPVADVPAMDRGEMPARPLDIDTNEIALKAWKKEASAFYRKDKARVSRRLSMEFMLSQANKFANYKAIWFPQNMDWRGRVYAVPMFNPQGNDMTKGLLTFAQGKPIGEDGFYWLKIHGANTAGVDKVPFPQRIKFVEDNHTNIMECAKAPLENTWWAEQDSPFCFLAFCFEYAGVINHGLSYNCSLPLAFDGSCSGIQHFSAMLRDEIGGKAVNLLPSAEVQDIYRIVSDKVNEVLKQDLINGTSTTLETVTDKKTGEITERTKYGTKVMAQWWLEHGVNRGVTKRSVMTLAYGSKEFGFRDQVLSDTIQPAIDNGKGDMFLNPNQAAGYMAKLIWNAVSVTVVAAVEAMNWLKSAAKLLAAEVKDKKTDTVLRGRCAVHWVTPDGFPVWQEYKKPIQTRLNLMFLGQFRLQPTINTNKDSEIDAHKQESGIAPNFVHSQDGNHLRMTVVWAHEKYGIESFALIHDSFGTIPADAANLFKAVRETMVSTYESCDVLADFYDQFADQLHESQLDKMPALPAKGNLNLRDILKSDFAFA

SEQ ID NO: 155 - DNA, 2670 bp, synthetic construct
  misc_feature 1..2670: note = Variant of RNA polymerase
  source 1..2670: mol_type = other DNA
atgcaccatcaccatcaccatatgaacacgattaacatcgctaagaacgacttctctgacatcgaactggctgctatcccgttcaacactctggctgaccattacggtgagcgtttagctcgcgaacagttggcccttgagcatgagtcttacgagatgggtgaagcacgcttccgcaagatgtttgagcatcaacttaaagctggtgaggttgcggataacgctgccgccaagcctctcatcactaccctactccctaagatgattgcacgcatcaacgactggtttgaggaagtgaaagctaagcgcggcaagcgcccgacagccttccagttcctgcaagaaatcaagccggaagccgtagcgtacatcaccattaagaccactctggcttgcctaaccagtgcggacaatacaaccgttcaggctgtagcaagcgcaatcggtcgggccattgaggacgaggctcgcttcggtcgtatccgtgaccttgaagctaagcacttcaagaaaaacgttgaggaacaactcaacaagcgcgtagggcacgtctacaagaaagcatttatgcaagttgtcgaggctgacatgctctctaagggtctactcggtggcgaggcgtggtcttcgtggcataaggaagactctattcatgtaggagtacgctgcatcgagatgctcattgagtcaaccggaatggttagcttacaccgccaaaatgctggcgtagtaggtcaagactctgagactatcgaactcgcacctgaatacgctgaggctatcgcaacccgtgcaggtgcgctggctggcatctctccgatgttccaaccttgcgtagttcctcctaagccgtggactggcattactggtggtggctattgggctgcggggcgcaaacccctgcagttagtacgtactcgcagtctggcggcgcttcgccgctatgaagaagtgtcgatgccggaggtcatcaaagcagtcaacattgcgcagaatacagcatggcgtgtgaacaagaaagttctcgacgtagcgaatgcaatcacccaatggcagcactgtccagtcgcggatgtgcctgcgatggatcgtggcgaaatgccagctcgtccgttggacatcgataccaacgagattgcacttaaagcgtggaagaaagaagcttccgcgttctaccgcaaagacaaagcacgcgttagccgtcgtctgtcaatggagtttatgttatctcaggcgaacaagtttgcgaattataaagcaatctggtttccgcaaaacatggattggcgtgggcgcgtgtacgctgtcccgatgttcaatcctcagggcaacgatatgacgaaaggcctgctgacctttgcgcagggtaaacccattggtgaagacggcttctattggctcaagattcatggcgcaaatacagctggagtggataaagtaccgtttccacaacgcatcaaatttgttgaggataaccatacgaatattatggaatgcgcgaaagcaccgctggaaaacacttggtgggcggaacaggactcgccgttctgttttctggcgttctgctttgagtatgctggcgtcatcaatcacggtctgtcgtacaactgtagcttgcctctggcatttgatggtagttgctccggcattcaacatttctcagcgatgttacgcgacgaaattggcggcaaagctgtgaatctcctcccatctgcggaagtgcaggatatttatcgtatcgtcagcgacaaagttaacgaggtactgaaacaagatctgattaacggtacctctaccaccttggaaacggtgactgataagaagacaggcgaaattaccgaacgcacgaaatacgggaccaaagttatggcacagtggtggttagaacacggtgtgaatcgtggcgtcacgaaacgctcggttatgactttggcgtatgggagcaaagagtttggattccgcgatcaagtgctgagtgacaccattcaaccggcgatcgataacggcaaaggtgacatgtttctgaatccgaatcaggctgctggttacatggcgaaactgatctggaacgcagtgtccgtcaccgtagtcgcagcagttgaggcgatgaactggctgaaaagtgcggcgaaattacttgctgctgaagtgaaggataagaagacggatacagttctgcgtggccgctgcgcagtacattgggtgactcccgacggcttccctgtgtggcaggaatacaagaagcctattcagacgcgcttgaacctgatgttcctcggtcagttccgcttacagcctaccattaacaccaacaaagatagcgagattgatgcacacaaacaggagtctggtatcgctcctaactttgtacacagccaagacggtaaccaccttcgtatgactgtagtgtgggcacacgagaagtacggaatcgaatcttttgcactgattcacgactccttcggtaccattccggctgacgctgcgaacctgttcaaagcagtgcgcgaaactatggtttcgacatatgagtcttgtgatgtactggctgatttctacgaccagttcgctgaccagttgcacgagtctcaattggacaaaatgccagcacttccggctaaaggtaacttgaacctccgtgacatcttaaaatcggacttcgcgttcgcg

SEQ ID NO: 156 - protein, 890 aa, synthetic construct
  REGION 1..890: note = Variant of RNA polymerase
MHHHHHHMNTINIAKNDFSDIELAAIPFNTLADHYGERLAREQLALEHESYEMGEARFRKMFEHQLKAGEVADNAAAKPLITTLLPKMIARINDWFEEVKAKRGKRPTAFQFLQEIKPEAVAYITIKTTLACLTSADNTTVQAVASAIGRAIEDEARFGRIRDLEAKHFKKNVEEQLNKRVGHVYKKAFMQVVEADMLSKGLLGGEAWSSWHKEDSIHVGVRCIEMLIESTGMVSLHRQNAGVVGQDSETIELAPEYAEAIATRAGALAGISPMFQPCVVPPKPWTGITGGGYWAAGRKPLQLVRTRSLAALRRYEEVSMPEVIKAVNIAQNTAWRVNKKVLDVANAITQWQHCPVADVPAMDRGEMPARPLDIDTNEIALKAWKKEASAFYRKDKARVSRRLSMEFMLSQANKFANYKAIWFPQNMDWRGRVYAVPMFNPQGNDMTKGLLTFAQGKPIGEDGFYWLKIHGANTAGVDKVPFPQRIKFVEDNHTNIMECAKAPLENTWWAEQDSPFCFLAFCFEYAGVINHGLSYNCSLPLAFDGSCSGIQHFSAMLRDEIGGKAVNLLPSAEVQDIYRIVSDKVNEVLKQDLINGTSTTLETVTDKKTGEITERTKYGTKVMAQWWLEHGVNRGVTKRSVMTLAYGSKEFGFRDQVLSDTIQPAIDNGKGDMFLNPNQAAGYMAKLIWNAVSVTVVAAVEAMNWLKSAAKLLAAEVKDKKTDTVLRGRCAVHWVTPDGFPVWQEYKKPIQTRLNLMFLGQFRLQPTINTNKDSEIDAHKQESGIAPNFVHSQDGNHLRMTVVWAHEKYGIESFALIHDSFGTIPADAANLFKAVRETMVSTYESCDVLADFYDQFADQLHESQLDKMPALPAKGNLNLRDILKSDFAFA

SEQ ID NO: 157 - DNA, 2670 bp, synthetic construct
  misc_feature 1..2670: note = Variant of RNA polymerase
  source 1..2670: mol_type = other DNA
atgcaccatcaccatcaccatatgaacacgattaacatcgctaagaacgacttctctgacatcgaactggctgctatcccgttcaacactctggctgaccattacggtgagcgtttagctcgcgaacagttggcccttgagcatgagtcttacgagatgggtgaagcacgcttccgcaagatgtttgagcgtcaacttaaagctggtgaggttgcggataacgctgccgccaagcctctcatcactaccctactccctaagatgattgcacgcatcaacgactggtttgaggaagtgaaagctaagcgcggcaagcgcccgacagccttccagttcctgcaagaaatcaagccggaagccgtagcgtacatcaccattaagaccactctggcttgcctaaccagtgcggacaatacaaccgttcaggctgtagcaagcgcaatcggtcgggccattgaggacgaggctcgcttcggtcgtatccgtgaccttgaagctaagcacttcaagaaaaacgttgaggaacaactcaacaagcgcgtagggcacgtctacaagaaagcatttatgcaagttgtcgaggctgacatgctctctaagggtctactcggtggcgaggcgtggtcttcgtggcataaggaagactctattcatgtaggagtacgctgcatcgagatgctcattgagtcaaccggaatggttagcttacaccgccaaaatgctggcgtagtaggtcaagactctgagactatcgaactcgcacctgaatacgctgaggctatcgcaacccgtgcaggtgcgctggctggcatctctccgatgttccaaccttgcgtagttcctcctaagccgtggactggcattactggtggtggctattgggctgcggggcgcaaacccctgcagttagtacgtactcgcagtctggcggcgcttcgccgctatgaagaagtgtcgatgccggaggtcatcaaagcagtcaacattgcgcagaatacagcatggcgtgtgaacaagaaagttctcgacgtagcgaatgcaatcacccaatggcagcactgtccagtcgcggatgtgcctgcgatggatcgtggcgaaatgccagctcgtccgttggacatcgataccaacgagattgcacttaaagcgtggaagaaagaagcttccgcgttctaccgcaaagacaaagcacgcgttagccgtcgtctgtcaatggagtttatgttatctcaggcgaacaagtttgcgaattataaagcaatctggtttccgcaaaacatggattggcgtgggcgcgtgtacgctgtcccgatgttcaatcctcagggcaacgatatgacgaaaggcctgctgacctttgcgcagggtaaacccattggtgaagacggcttctattggctcaagattcatggcgcaaatacagctggagtggataaagtaccgtttccacaacgcatcaaatttgttgaggataaccatacgaatattatggaatgcgcgaaagcaccgctggaaaacacttggtgggcggaacaggactcgccgttctgttttctggcgttctgctttgagtatgctggcgtcatcaatcacggtctgtcgtacaactgtagcttgcctctggcatttgatggtagttgctccggcattcaacatttctcagcgatgttacgcgacgaaattggcggcaaagctgtgaatctcctcccatctgcggaagtgcaggatatttatcgtatcgtcagcgacaaagttaacgaggtactgaaacaagatctgattaacggtacctctaccaccttggaaacggtgactgataagaagacaggcgaaattaccgaacgcacgaaatacgggaccaaagttatggcacagtggtggttagaacacggtgtgaatcgtggcgtcacgaaacgctcggttatgactttggcgtatggggttaaagagtttggattccgcgatcaagtgctgagtgacaccattcaaccggcgatcgataacggcaaaggtgacatgtttctgaatccgaatcaggctgctggttacatggcgaaactgatctggaacgcagtgtccgtcaccgtagtcgcagcagttgaggcgatgaactggctgaaaagtgcggcgaaattacttgctgctgaagtgaaggataagaagacggatacagttctgcgtggccgctgcgcagtacattgggtgactcccgacggcttccctgtgtggcaggaatacaagaagcctattcagacgcgcttgaacctgatgttcctcggtcagttccgcttacagcctaccattaacaccaacaaagatagcgagattgatgcacacaaacaggagtctggtatcgctcctaactttgtacacagccaagacggtaaccaccttcgtatgactgtagtgtgggcacacgagaagtacggaatcgaatcttttgcactgattcacgactccttcggtaccattccggctgacgctgcgaacctgttcaaagcagtgcgcgaaactatggtttcgacatatgagtcttgtgatgtactggctgatttctacgaccagttcgctgaccagttgcacgagtctcaattggacaaaatgccagcacttccggctaaaggtaacttgaacctccgtgacatcttaaaatcggacttcgcgttcgcg

SEQ ID NO: 158 - protein, 890 aa, synthetic construct
  REGION 1..890: note = Variant of RNA polymerase
MHHHHHHMNTINIAKNDFSDIELAAIPFNTLADHYGERLAREQLALEHESYEMGEARFRKMFERQLKAGEVADNAAAKPLITTLLPKMIARINDWFEEVKAKRGKRPTAFQFLQEIKPEAVAYITIKTTLACLTSADNTTVQAVASAIGRAIEDEARFGRIRDLEAKHFKKNVEEQLNKRVGHVYKKAFMQVVEADMLSKGLLGGEAWSSWHKEDSIHVGVRCIEMLIESTGMVSLHRQNAGVVGQDSETIELAPEYAEAIATRAGALAGISPMFQPCVVPPKPWTGITGGGYWAAGRKPLQLVRTRSLAALRRYEEVSMPEVIKAVNIAQNTAWRVNKKVLDVANAITQWQHCPVADVPAMDRGEMPARPLDIDTNEIALKAWKKEASAFYRKDKARVSRRLSMEFMLSQANKFANYKAIWFPQNMDWRGRVYAVPMFNPQGNDMTKGLLTFAQGKPIGEDGFYWLKIHGANTAGVDKVPFPQRIKFVEDNHTNIMECAKAPLENTWWAEQDSPFCFLAFCFEYAGVINHGLSYNCSLPLAFDGSCSGIQHFSAMLRDEIGGKAVNLLPSAEVQDIYRIVSDKVNEVLKQDLINGTSTTLETVTDKKTGEITERTKYGTKVMAQWWLEHGVNRGVTKRSVMTLAYGVKEFGFRDQVLSDTIQPAIDNGKGDMFLNPNQAAGYMAKLIWNAVSVTVVAAVEAMNWLKSAAKLLAAEVKDKKTDTVLRGRCAVHWVTPDGFPVWQEYKKPIQTRLNLMFLGQFRLQPTINTNKDSEIDAHKQESGIAPNFVHSQDGNHLRMTVVWAHEKYGIESFALIHDSFGTIPADAANLFKAVRETMVSTYESCDVLADFYDQFADQLHESQLDKMPALPAKGNLNLRDILKSDFAFA

SEQ ID NO: 159 - DNA, 2670 bp, synthetic construct
  misc_feature 1..2670: note = Variant of RNA polymerase
  source 1..2670: mol_type = other DNA
atgcaccatcaccatcaccatatgaacacgattaacatcgctaagaacgacttctctgacatcgaactggctgctatcccgttcaacactctggctgaccattacggtgagcgtttagctcgcgaacagttggcccttgagcatgagtcttacgagatgggtgaagcacgcttccgcaagatgtttgagcgtcaacttaaagctggtgaggttgcggataacgctgccgccaagcctctcatcactaccctactccctaagatgattgcacgcatcaacgactggtttgaggaagtgaaagctaagcgcggcaagcgcccgacagccttccagttcctgcaagaaatcaagccggaagccgtagcgtacatcaccattaagaccactctggcttgcctaaccagtgcggacaatacaaccgttcaggctgtagcaagcgcaatcggtcgggccattgaggacgaggctcgcttcggtcgtatccgtgaccttgaagctaagattttcaagaaaaacgttgaggaacaactcaacaagcgcgtagggcacgtctacaagaaagcatttatgcaagttgtcgaggctgacatgctctctaagggtctactcggtggcgaggcgtggtcttcgtggcataaggaagactctattcatgtaggagtacgctgcatcgagatgctcattgagtcaaccggaatggttagcttacaccgccaaaatgctggcgtagtaggtcaagactctgagactatcgaactcgcacctgaatacgctgaggctatcgcaacccgtgcaggtgcgctggctggcatctctccgatgttccaaccttgcgtagttcctcctaagccgtggactggcattactggtggtggctattgggctgcggggcgcaaacccctgcagttagtacgtactcgcagtctggcggcgcttcgccgctatgaagaagtgtcgatgccggaggtcatcaaagcagtcaacattgcgcagaatacagcatggcgtgtgaacaagaaagttctcgacgtagcgaatgcaatcacccaatggcagcactgtccagtcgcggatgtgcctgcgatggatcgtggcgaaatgccagctcgtccgttggacatcgataccaacgagattgcacttaaagcgtggaagaaagaagcttccgcgttctaccgcaaagacaaagcacgcgttagccgtcgtctgtcaatggagtttatgttatctcaggcgaacaagtttgcgaattataaagcaatctggtttccgcaaaacatggattggcgtgggcgcgtgtacgctgtcccgatgttcaatcctcagggcaacgatatgacgaaaggcctgctgacctttgcgcagggtaaacccattggtgaagacggcttctattggctcaagattcatggcgcaaatacagctggagtggataaagtaccgtttccacaacgcatcaaatttgttgaggataaccatacgaatattatggaatgcgcgaaagcaccgctggaaaacacttggtgggcggaacaggactcgccgttctgttttctggcgttctgctttgagtatgctggcgtcatcaatcacggtctgtcgtacaactgtagcttgcctctggcatttgatggtagttgctccggcattcaacatttctcagcgatgttacgcgacgaaattggcggcaaagctgtgaatctcctcccatctgcggaagtgcaggatatttatcgtatcgtcagcgacaaagttaacgaggtactgaaacaagatctgattaacggtacctctaccaccttggaaacggtgactgataagaagacaggcgaaattaccgaacgcacgaaatacgggaccaaagttatggcacagtggtggttagaacacggtgtgaatcgtggcgtcacgaaacgctcggttatgactttggcgtatgggagcaaagagtttggattccgcgatcaagtgctgagtgacaccattcaaccggcgatcgataacggcaaaggtgacatgtttctgaatccgaatcaggctgctggttacatggcgaaactgatctggaacgcagtgtccgtcaccgtagtcgcagcagttgaggcgatgaactggctgaaaagtgcggcgaaattacttgctgctgaagtgaaggataagaagacggatacagttctgcgtggccgctgcgcagtacattgggtgactcccgacggcttccctgtgtggcaggaatacaagaagcctattcagacgcgcttgaacctgatgttcctcggtcagttccgcttacagcctaccattaacaccaacaaagatagcgagattgatgcacacaaacaggagtctggtatcgctcctaactttgtacacagccaagacggtaaccaccttcgtatgactgtagtgtgggcacacgagaagtacggaatcgaatcttttgcactgattcacgactccttcggtaccattccggctgacgctgcgaacctgttcaaagcagtgcgcgaaactatggtttcgacatatgagtcttgtgatgtactggctgatttctacgaccagttcgctgaccagttgcacgagtctcaattggacaaaatgccagcacttccggctaaaggtaacttgaacctccgtgacatcttaaaatcggacttcgcgttcgcg

SEQ ID NO: 160 - protein, 890 aa, synthetic construct
  REGION 1..890: note = Variant of RNA polymerase
MHHHHHHMNTINIAKNDFSDIELAAIPFNTLADHYGERLAREQLALEHESYEMGEARFRKMFERQLKAGEVADNAAAKPLITTLLPKMIARINDWFEEVKAKRGKRPTAFQFLQEIKPEAVAYITIKTTLACLTSADNTTVQAVASAIGRAIEDEARFGRIRDLEAKIFKKNVEEQLNKRVGHVYKKAFMQVVEADMLSKGLLGGEAWSSWHKEDSIHVGVRCIEMLIESTGMVSLHRQNAGVVGQDSETIELAPEYAEAIATRAGALAGISPMFQPCVVPPKPWTGITGGGYWAAGRKPLQLVRTRSLAALRRYEEVSMPEVIKAVNIAQNTAWRVNKKVLDVANAITQWQHCPVADVPAMDRGEMPARPLDIDTNEIALKAWKKEASAFYRKDKARVSRRLSMEFMLSQANKFANYKAIWFPQNMDWRGRVYAVPMFNPQGNDMTKGLLTFAQGKPIGEDGFYWLKIHGANTAGVDKVPFPQRIKFVEDNHTNIMECAKAPLENTWWAEQDSPFCFLAFCFEYAGVINHGLSYNCSLPLAFDGSCSGIQHFSAMLRDEIGGKAVNLLPSAEVQDIYRIVSDKVNEVLKQDLINGTSTTLETVTDKKTGEITERTKYGTKVMAQWWLEHGVNRGVTKRSVMTLAYGSKEFGFRDQVLSDTIQPAIDNGKGDMFLNPNQAAGYMAKLIWNAVSVTVVAAVEAMNWLKSAAKLLAAEVKDKKTDTVLRGRCAVHWVTPDGFPVWQEYKKPIQTRLNLMFLGQFRLQPTINTNKDSEIDAHKQESGIAPNFVHSQDGNHLRMTVVWAHEKYGIESFALIHDSFGTIPADAANLFKAVRETMVSTYESCDVLADFYDQFADQLHESQLDKMPALPAKGNLNLRDILKSDFAFA

SEQ ID NO: 161 - DNA, 2670 bp, synthetic construct
  misc_feature 1..2670: note = Variant of RNA polymerase
  source 1..2670: mol_type = other DNA
atgcaccatcaccatcaccatatgaacacgattaacatcgctaagaacgacttctctgacatcgaactggctgctatcccgttcaacactctggctgaccattacggtgagcgtttagctcgcgaacagttggcccttgagcatgagtcttacgagatgggtgaagcacgcttccgcaagatgtttgagcgtcaacttaaagctggtgaggttgcggataacgctgccgccaagcctctcatcactaccctactccctaagatgattgcacgcatcaacgactggtttgaggaagtgaaagctaagcgcggcaagcgcccgacagccttccagttcctgcaagaaatcaagccggaagccgtagcgtacatcaccattaagaccactctggcttgcctaaccagtgcggacaatacaaccgttcaggctgtagcaagcgcaatcggtcgggccattgaggacgaggctcgcttcggtcgtatccgtgaccttgaagctaagcacttcaagaaaaacgttgaggaacaactcaacaagcgcgtagggcacgtctacaagaaagcatttatgcaagttggtgaggctgacatgctctctaagggtctactcggtggcgaggcgtggtcttcgtggcataaggaagactctattcatgtaggagtacgctgcatcgagatgctcattgagtcaaccggaatggttagcttacaccgccaaaatgctggcgtagtaggtcaagactctgagactatcgaactcgcacctgaatacgctgaggctatcgcaacccgtgcaggtgcgctggctggcatctctccgatgttccaaccttgcgtagttcctcctaagccgtggactggcattactggtggtggctattgggctgcggggcgcaaacccctgcagttagtacgtactcgcagtctggcggcgcttcgccgctatgaagaagtgtcgatgccggaggtcatcaaagcagtcaacattgcgcagaatacagcatggcgtgtgaacaagaaagttctcgacgtagcgaatgcaatcacccaatggcagcactgtccagtcgcggatgtgcctgcgatggatcgtggcgaaatgccagctcgtccgttggacatcgataccaacgagattgcacttaaagcgtggaagaaagaagcttccgcgttctaccgcaaagacaaagcacgcgttagccgtcgtctgtcaatggagtttatgttatctcaggcgaacaagtttgcgaattataaagcaatctggtttccgcaaaacatggattggcgtgggcgcgtgtacgctgtcccgatgttcaatcctcagggcaacgatatgacgaaaggcctgctgacctttgcgcagggtaaacccattggtgaagacggcttctattggctcaagattcatggcgcaaatacagctggagtggataaagtaccgtttccacaacgcatcaaatttgttgaggataaccatacgaatattatggaatgcgcgaaagcaccgctggaaaacacttggtgggcggaacaggactcgccgttctgttttctggcgttctgctttgagtatgctggcgtcatcaatcacggtctgtcgtacaactgtagcttgcctctggcatttgatggtagttgctccggcattcaacatttctcagcgatgttacgcgacgaaattggcggcaaagctgtgaatctcctcccatctgcggaagtgcaggatatttatcgtatcgtcagcgacaaagttaacgaggtactgaaacaagatctgattaacggtacctctaccaccttggaaacggtgactgataagaagacaggcgaaattaccgaacgcacgaaatacgggaccaaagttatggcacagtggtggttagaacacggtgtgaatcgtggcgtcacgaaacgctcggttatgactttggcgtatgggagcaaagagtttggattccgcgatcaagtgctgagtgacaccattcaaccggcgatcgataacggcaaaggtgacatgtttctgaatccgaatcaggctgctggttacatggcgaaactgatctggaacgcagtgtccgtcaccgtagtcgcagcagttgaggcgatgaactggctgaaaagtgcggcgaaattacttgctgctgaagtgaaggataagaagacggatacagttctgcgtggccgctgcgcagtacattgggtgactcccgacggcttccctgtgtggcaggaatacaagaagcctattcagacgcgcttgaacctgatgttcctcggtcagttccgcttacagcctaccattaacaccaacaaagatagcgagattgatgcacacaaacaggagtctggtatcgctcctaactttgtacacagccaagacggtaaccaccttcgtatgactgtagtgtgggcacacgagaagtacggaatcgaatcttttgcactgattcacgactccttcggtaccattccggctgacgctgcgaacctgttcaaagcagtgcgcgaaactatggtttcgacatatgagtcttgtgatgtactggctgatttctacgaccagttcgctgaccagttgcacgagtctcaattggacaaaatgccagcacttccggctaaaggtaacttgaacctccgtgacatcttaaaatcggacttcgcgttcgcg

SEQ ID NO: 162 - protein, 890 aa, synthetic construct
  REGION 1..890: note = Variant of RNA polymerase
MHHHHHHMNTINIAKNDFSDIELAAIPFNTLADHYGERLAREQLALEHESYEMGEARFRKMFERQLKAGEVADNAAAKPLITTLLPKMIARINDWFEEVKAKRGKRPTAFQFLQEIKPEAVAYITIKTTLACLTSADNTTVQAVASAIGRAIEDEARFGRIRDLEAKHFKKNVEEQLNKRVGHVYKKAFMQVGEADMLSKGLLGGEAWSSWHKEDSIHVGVRCIEMLIESTGMVSLHRQNAGVVGQDSETIELAPEYAEAIATRAGALAGISPMFQPCVVPPKPWTGITGGGYWAAGRKPLQLVRTRSLAALRRYEEVSMPEVIKAVNIAQNTAWRVNKKVLDVANAITQWQHCPVADVPAMDRGEMPARPLDIDTNEIALKAWKKEASAFYRKDKARVSRRLSMEFMLSQANKFANYKAIWFPQNMDWRGRVYAVPMFNPQGNDMTKGLLTFAQGKPIGEDGFYWLKIHGANTAGVDKVPFPQRIKFVEDNHTNIMECAKAPLENTWWAEQDSPFCFLAFCFEYAGVINHGLSYNCSLPLAFDGSCSGIQHFSAMLRDEIGGKAVNLLPSAEVQDIYRIVSDKVNEVLKQDLINGTSTTLETVTDKKTGEITERTKYGTKVMAQWWLEHGVNRGVTKRSVMTLAYGSKEFGFRDQVLSDTIQPAIDNGKGDMFLNPNQAAGYMAKLIWNAVSVTVVAAVEAMNWLKSAAKLLAAEVKDKKTDTVLRGRCAVHWVTPDGFPVWQEYKKPIQTRLNLMFLGQFRLQPTINTNKDSEIDAHKQESGIAPNFVHSQDGNHLRMTVVWAHEKYGIESFALIHDSFGTIPADAANLFKAVRETMVSTYESCDVLADFYDQFADQLHESQLDKMPALPAKGNLNLRDILKSDFAFA

SEQ ID NO: 163 - DNA, 2670 bp, synthetic construct
  misc_feature 1..2670: note = Variant of RNA polymerase
  source 1..2670: mol_type = other DNA
atgcaccatcaccatcaccatatgaacacgattgagatcgctaagaacgacttctctgacatcgaactggctgctatcccgttcaacactctggctgaccattacggtgagcgtttagctcgcgaacagttggcccttgagcatgagtcttacgagatgggtgaagcacgcttccgcaagatgtttgagcgtcaacttaaagctggtgaggttgcggataacgctgccgccaagcctctcatcactaccctactccctaagatgattgcacgcatcaacgactggtttgaggaagtgaaagctaagcgcggcaagcgcccgacagccttccagttcctgcaagaaatcaagccggaagccgtagcgtacatcaccattaagaccactctggcttgcctaaccagtgcggacaatacaaccgttcaggctgtagcaagcgcaatcggtcgggccattgaggacgaggctcgcttcggtcgtatccgtgaccttgaagctaagcacttcaagaaaaacgttgaggaacaactcaacaagcgcgtagggcacgtctacaagaaagcatttatgcaagttgtcgaggctgacatgctctctaagggtctactcggtggcgaggcgtggtcttcgtggcataaggaagactctattcatgtaggagtacgctgcatcgagatgctcattgagtcaaccggaatggttagcttacaccgccaaaatgctggcgtagtaggtcaagactctgagactatcgaactcgcacctgaatacgctgaggctatcgcaacccgtgcaggtgcgctggctggcatctctccgatgttccaaccttgcgtagttcctcctaagccgtggactggcattactggtggtggctattgggctgcggggcgcaaacccctgcagttagtacgtactcgcagtctggcggcgcttcgccgctatgaagaagtgtcgatgccggaggtcatcaaagcagtcaacattgcgcagaatacagcatggcgtgtgaacaagaaagttctcgacgtagcgaatgcaatcacccaatggcagcactgtccagtcgcggatgtgcctgcgatggatcgtggcgaaatgccagctcgtccgttggacatcgataccaacgagattgcacttaaagcgtggaagaaagaagcttccgcgttctaccgcaaagacaaagcacgcgttagccgtcgtctgtcaatggagtttatgttatctcaggcgaacaagtttgcgaattataaagcaatctggtttccgcaaaacatggattggcgtgggcgcgtgtacgctgtcccgatgttcaatcctcagggcaacgatatgacgaaaggcctgctgacctttgcgcagggtaaacccattggtgaagacggcttctattggctcaagattcatggcgcaaatacagctggagtggataaagtaccgtttccacaacgcatcaaatttgttgaggataaccatacgaatattatggaatgcgcgaaagcaccgctggaaaacacttggtgggcggaacaggactcgccgttctgttttctggcgttctgctttgagtatgctggcgtcatcaatcacggtctgtcgtacaactgtagcttgcctctggcatttgatggtagttgctccggcattcaacatttctcagcgatgttacgcgacgaaattggcggcaaagctgtgaatctcctcccatctgcggaagtgcaggatatttatcgtatcgtcagcgacaaagttaacgaggtactgaaacaagatctgattaacggtacctctaccaccttggaaacggtgactgataagaagacaggcgaaattaccgaacgcacgaaatacgggaccaaagttatggcacagtggtggttagaacacggtgtgaatcgtggcgtcacgaaacgctcggttatgactttggcgtatgggagcaaagagtttggattccgcgatcaagtgctgagtgacaccattcaaccggcgatcgataacggcaaaggtgacatgtttctgaatccgaatcaggctgctggttacatggcgaaactgatctggaacgcagtgtccgtcaccgtagtcgcagcagttgaggcgatgaactggctgaaaagtgcggcgaaattacttgctgctgaagtgaaggataagaagacggatacagttctgcgtggccgctgcgcagtacattgggtgactcccgacggcttccctgtgtggcaggaatacaagaagcctattcagacgcgcttgaacctgatgttcctcggtcagttccgcttacagcctaccattaacaccaacaaagatagcgagattgatgcacacaaacaggagtctggtatcgctcctaactttgtacacagccaagacggtaaccaccttcgtatgactgtagtgtgggcacacgagaagtacggaatcgaatcttttgcactgattcacgactccttcggtaccattccggctgacgctgcgaacctgttcaaagcagtgcgcgaaactatggtttcgacatatgagtcttgtgatgtactggctgatttctacgaccagttcgctgaccagttgcacgagtctcaattggacaaaatgccagcacttccggctaaaggtaacttgaacctccgtgacatcttaaaatcggacttcgcgttcgcg

SEQ ID NO: 164 - protein, 890 aa, synthetic construct
  REGION 1..890: note = Variant of RNA polymerase
MHHHHHHMNTIEIAKNDFSDIELAAIPFNTLADHYGERLAREQLALEHESYEMGEARFRKMFERQLKAGEVADNAAAKPLITTLLPKMIARINDWFEEVKAKRGKRPTAFQFLQEIKPEAVAYITIKTTLACLTSADNTTVQAVASAIGRAIEDEARFGRIRDLEAKHFKKNVEEQLNKRVGHVYKKAFMQVVEADMLSKGLLGGEAWSSWHKEDSIHVGVRCIEMLIESTGMVSLHRQNAGVVGQDSETIELAPEYAEAIATRAGALAGISPMFQPCVVPPKPWTGITGGGYWAAGRKPLQLVRTRSLAALRRYEEVSMPEVIKAVNIAQNTAWRVNKKVLDVANAITQWQHCPVADVPAMDRGEMPARPLDIDTNEIALKAWKKEASAFYRKDKARVSRRLSMEFMLSQANKFANYKAIWFPQNMDWRGRVYAVPMFNPQGNDMTKGLLTFAQGKPIGEDGFYWLKIHGANTAGVDKVPFPQRIKFVEDNHTNIMECAKAPLENTWWAEQDSPFCFLAFCFEYAGVINHGLSYNCSLPLAFDGSCSGIQHFSAMLRDEIGGKAVNLLPSAEVQDIYRIVSDKVNEVLKQDLINGTSTTLETVTDKKTGEITERTKYGTKVMAQWWLEHGVNRGVTKRSVMTLAYGSKEFGFRDQVLSDTIQPAIDNGKGDMFLNPNQAAGYMAKLIWNAVSVTVVAAVEAMNWLKSAAKLLAAEVKDKKTDTVLRGRCAVHWVTPDGFPVWQEYKKPIQTRLNLMFLGQFRLQPTINTNKDSEIDAHKQESGIAPNFVHSQDGNHLRMTVVWAHEKYGIESFALIHDSFGTIPADAANLFKAVRETMVSTYESCDVLADFYDQFADQLHESQLDKMPALPAKGNLNLRDILKSDFAFA

SEQ ID NO: 165 - DNA, 2670 bp, synthetic construct
  misc_feature 1..2670: note = Variant of RNA polymerase
  source 1..2670: mol_type = other DNA
atgcaccatcaccatcaccatatgaacacgattaacatcgctaagaacgacttctctgacatcgaactggctgctatcccgttcaacactctggctgaccattacggtgagcgtttagctcgcgaacagttggcccttgagcatgagtcttacgagatgggtgaagcacgcttccgcaagatgtttgagcgtcaacttaaagctggtgaggttgcggataacgctgccgccaagcctctcatcactaccctactccctaagatgattgcacgcatcaacgactggtttgaggaagtgaaagctaagcgcggcaagcgcccgacagccttccagttcctgcaagaaatcaagccggaagccgtagcgtacatcaccattaagaccactctggcttgcctaaccagtgcggacaatacaaccgttcaggctgtagcaagcgcaatcggtcgggccattgaggacgaggctcgcttcggtcgtatccgtgaccttgaagctaagcacttcaagaaaaacgttgaggaacaactcaacaagcgcgtagggcacgtctacaagaaagcatttatgcaagttgtcgaggctgacatgctctctaagggtctactcggtggcgaggcgtggtcttcgtggcataaggaagactctattcatgtaggagtacgctgcatcgagatgctcattgagtcaaccggaatggttagcttacaccgccaaaatgctggcgtagtaggtcaagactctgagactatcgaactcacgcctgaatacgctgaggctatcgcaacccgtgcaggtgcgctggctggcatctctccgatgttccaaccttgcgtagttcctcctaagccgtggactggcattactggtggtggctattgggctgcggggcgcaaacccctgcagttagtacgtactcgcagtctggcggcgcttcgccgctatgaagaagtgtcgatgccggaggtcatcaaagcagtcaacattgcgcagaatacagcatggcgtgtgaacaagaaagttctcgacgtagcgaatgcaatcacccaatggcagcactgtccagtcgcggatgtgcctgcgatggatcgtggcgaaatgccagctcgtccgttggacatcgataccaacgagattgcacttaaagcgtggaagaaagaagcttccgcgttctaccgcaaagacaaagcacgcgttagccgtcgtctgtcaatggagtttatgttatctcaggcgaacaagtttgcgaattataaagcaatctggtttccgcaaaacatggattggcgtgggcgcgtgtacgctgtcccgatgttcaatcctcagggcaacgatatgacgaaaggcctgctgacctttgcgcagggtaaacccattggtgaagacggcttctattggctcaagattcatggcgcaaatacagctggagtggataaagtaccgtttccacaacgcatcaaatttgttgaggataaccatacgaatattatggaatgcgcgaaagcaccgctggaaaacacttggtgggcggaacaggactcgccgttctgttttctggcgttctgctttgagtatgctggcgtcatcaatcacggtctgtcgtacaactgtagcttgcctctggcatttgatggtagttgctccggcattcaacatttctcagcgatgttacgcgacgaaattggcggcaaagctgtgaatctcctcccatctgcggaagtgcaggatatttatcgtatcgtcagcgacaaagttaacgaggtactgaaacaagatctgattaacggtacctctaccaccttggaaacggtgactgataagaagacaggcgaaattaccgaacgcacgaaatacgggaccaaagttatggcacagtggtggttagaacacggtgtgaatcgtggcgtcacgaaacgctcggttatgactttggcgtatgggagcaaagagtttggattccgcgatcaagtgctgagtgacaccattcaaccggcgatcgataacggcaaaggtgacatgtttctgaatccgaatcaggctgctggttacatggcgaaactgatctggaacgcagtgtccgtcaccgtagtcgcagcagttgaggcgatgaactggctgaaaagtgcggcgaaattacttgctgctgaagtgaaggataagaagacggatacagttctgcgtggccgctgcgcagtacattgggtgactcccgacggcttccctgtgtggcaggaatacaagaagcctattcagacgcgcttgaacctgatgttcctcggtcagttccgcttacagcctaccattaacaccaacaaagatagcgagattgatgcacacaaacaggagtctggtatcgctcctaactttgtacacagccaagacggtaaccaccttcgtatgactgtagtgtgggcacacgagaagtacggaatcgaatcttttgcactgattcacgactccttcggtaccattccggctgacgctgcgaacctgttcaaagcagtgcgcgaaactatggtttcgacatatgagtcttgtgatgtactggctgatttctacgaccagttcgctgaccagttgcacgagtctcaattggacaaaatgccagcacttccggctaaaggtaacttgaacctccgtgacatcttaaaatcggacttcgcgttcgcg

SEQ ID NO: 166 - protein, 890 aa, synthetic construct
  REGION 1..890: note = Variant of RNA polymerase
MHHHHHHMNTINIAKNDFSDIELAAIPFNTLADHYGERLAREQLALEHESYEMGEARFRKMFERQLKAGEVADNAAAKPLITTLLPKMIARINDWFEEVKAKRGKRPTAFQFLQEIKPEAVAYITIKTTLACLTSADNTTVQAVASAIGRAIEDEARFGRIRDLEAKHFKKNVEEQLNKRVGHVYKKAFMQVVEADMLSKGLLGGEAWSSWHKEDSIHVGVRCIEMLIESTGMVSLHRQNAGVVGQDSETIELTPEYAEAIATRAGALAGISPMFQPCVVPPKPWTGITGGGYWAAGRKPLQLVRTRSLAALRRYEEVSMPEVIKAVNIAQNTAWRVNKKVLDVANAITQWQHCPVADVPAMDRGEMPARPLDIDTNEIALKAWKKEASAFYRKDKARVSRRLSMEFMLSQANKFANYKAIWFPQNMDWRGRVYAVPMFNPQGNDMTKGLLTFAQGKPIGEDGFYWLKIHGANTAGVDKVPFPQRIKFVEDNHTNIMECAKAPLENTWWAEQDSPFCFLAFCFEYAGVINHGLSYNCSLPLAFDGSCSGIQHFSAMLRDEIGGKAVNLLPSAEVQDIYRIVSDKVNEVLKQDLINGTSTTLETVTDKKTGEITERTKYGTKVMAQWWLEHGVNRGVTKRSVMTLAYGSKEFGFRDQVLSDTIQPAIDNGKGDMFLNPNQAAGYMAKLIWNAVSVTVVAAVEAMNWLKSAAKLLAAEVKDKKTDTVLRGRCAVHWVTPDGFPVWQEYKKPIQTRLNLMFLGQFRLQPTINTNKDSEIDAHKQESGIAPNFVHSQDGNHLRMTVVWAHEKYGIESFALIHDSFGTIPADAANLFKAVRETMVSTYESCDVLADFYDQFADQLHESQLDKMPALPAKGNLNLRDILKSDFAFA

SEQ ID NO: 167 - DNA, 2670 bp, synthetic construct
  misc_feature 1..2670: note = Variant of RNA polymerase
  source 1..2670: mol_type = other DNA
atgcaccatcaccatcaccatatgaacacgattaacatcgctaagaacgacttctctgacatcgaactggctgctatcccgttcaacactctggctgaccattacggtgagcgtttagctcgcgaacagttggcccttgagcatgagtcttacgagatgggtgaagcacgcttccgcaagatgtttgagcgtcaacttaaagctggtgaggttgcggataacgctgccgcccagcctctcatcactaccctactccctaagatgattgcacgcatcaacgactggtttgaggaagtgaaagctaagcgcggcaagcgcccgacagccttccagttcctgcaagaaatcaagccggaagccgtagcgtacatcaccattaagaccactctggcttgcctaaccagtgcggacaatacaaccgttcaggctgtagcaagcgcaatcggtcgggccattgaggacgaggctcgcttcggtcgtatccgtgaccttgaagctaagcacttcaagaaaaacgttgaggaacaactcaacaagcgcgtagggcacgtctacaagaaagcatttatgcaagttgtcgaggctgacatgctctctaagggtctactcggtggcgaggcgtggtcttcgtggcataaggaagactctattcatgtaggagtacgctgcatcgagatgctcattgagtcaaccggaatggttagcttacaccgccaaaatgctggcgtagtaggtcaagactctgagactatcgaactcgcacctgaatacgctgaggctatcgcaacccgtgcaggtgcgctggctggcatctctccgatgttccaaccttgcgtagttcctcctaagccgtggactggcattactggtggtggctattgggctgcggggcgcaaacccctgcagttagtacgtactcgcagtctggcggcgcttcgccgctatgaagaagtgtcgatgccggaggtcatcaaagcagtcaacattgcgcagaatacagcatggcgtgtgaacaagaaagttctcgacgtagcgaatgcaatcacccaatggcagcactgtccagtcgcggatgtgcctgcgatggatcgtggcgaaatgccagctcgtccgttggacatcgataccaacgagattgcacttaaagcgtggaagaaagaagcttccgcgttctaccgcaaagacaaagcacgcgttagccgtcgtctgtcaatggagtttatgttatctcaggcgaacaagtttgcgaattataaagcaatctggtttccgcaaaacatggattggcgtgggcgcgtgtacgctgtcccgatgttcaatcctcagggcaacgatatgacgaaaggcctgctgacctttgcgcagggtaaacccattggtgaagacggcttctattggctcaagattcatggcgcaaatacagctggagtggataaagtaccgtttccacaacgcatcaaatttgttgaggataaccatacgaatattatggaatgcgcgaaagcaccgctggaaaacacttggtgggcggaacaggactcgccgttctgttttctggcgttctgctttgagtatgctggcgtcatcaatcacggtctgtcgtacaactgtagcttgcctctggcatttgatggtagttgctccggcattcaacatttctcagcgatgttacgcgacgaaattggcggcaaagctgtgaatctcctcccatctgcggaagtgcaggatatttatcgtatcgtcagcgacaaagttaacgaggtactgaaacaagatctgattaacggtacctctaccaccttggaaacggtgactgataagaagacaggcgaaattaccgaacgcacgaaatacgggaccaaagttatggcacagtggtggttagaacacggtgtgaatcgtggcgtcacgaaacgctcggttatgactttggcgtatgggagcaaagagtttggattccgcgatcaagtgctgagtgacaccattcaaccggcgatcgataacggcaaaggtgacatgtttctgaatccgaatcaggctgctggttacatggcgaaactgatctggaacgcagtgtccgtcaccgtagtcgcagcagttgaggcgatgaactggctgaaaagtgcggcgaaattacttgctgctgaagtgaaggataagaagacggatacagttctgcgtggccgctgcgcagtacattgggtgactcccgacggcttccctgtgtggcaggaatacaagaagcctattcagacgcgcttgaacctgatgttcctcggtcagttccgcttacagcctaccattaacaccaacaaagatagcgagattgatgcacacaaacaggagtctggtatcgctcctaactttgtacacagccaagacggtaaccaccttcgtatgactgtagtgtgggcacacgagaagtacggaatcgaatcttttgcactgattcacgactccttcggtaccattccggctgacgctgcgaacctgttcaaagcagtgcgcgaaactatggtttcgacatatgagtcttgtgatgtactggctgatttctacgaccagttcgctgaccagttgcacgagtctcaattggacaaaatgccagcacttccggctaaaggtaacttgaacctccgtgacatcttaaaatcggacttcgcgttcgcg

SEQ ID NO: 168 - protein, 890 aa, synthetic construct
  REGION 1..890: note = Variant of RNA polymerase
MHHHHHHMNTINIAKNDFSDIELAAIPFNTLADHYGERLAREQLALEHESYEMGEARFRKMFERQLKAGEVADNAAAQPLITTLLPKMIARINDWFEEVKAKRGKRPTAFQFLQEIKPEAVAYITIKTTLACLTSADNTTVQAVASAIGRAIEDEARFGRIRDLEAKHFKKNVEEQLNKRVGHVYKKAFMQVVEADMLSKGLLGGEAWSSWHKEDSIHVGVRCIEMLIESTGMVSLHRQNAGVVGQDSETIELAPEYAEAIATRAGALAGISPMFQPCVVPPKPWTGITGGGYWAAGRKPLQLVRTRSLAALRRYEEVSMPEVIKAVNIAQNTAWRVNKKVLDVANAITQWQHCPVADVPAMDRGEMPARPLDIDTNEIALKAWKKEASAFYRKDKARVSRRLSMEFMLSQANKFANYKAIWFPQNMDWRGRVYAVPMFNPQGNDMTKGLLTFAQGKPIGEDGFYWLKIHGANTAGVDKVPFPQRIKFVEDNHTNIMECAKAPLENTWWAEQDSPFCFLAFCFEYAGVINHGLSYNCSLPLAFDGSCSGIQHFSAMLRDEIGGKAVNLLPSAEVQDIYRIVSDKVNEVLKQDLINGTSTTLETVTDKKTGEITERTKYGTKVMAQWWLEHGVNRGVTKRSVMTLAYGSKEFGFRDQVLSDTIQPAIDNGKGDMFLNPNQAAGYMAKLIWNAVSVTVVAAVEAMNWLKSAAKLLAAEVKDKKTDTVLRGRCAVHWVTPDGFPVWQEYKKPIQTRLNLMFLGQFRLQPTINTNKDSEIDAHKQESGIAPNFVHSQDGNHLRMTVVWAHEKYGIESFALIHDSFGTIPADAANLFKAVRETMVSTYESCDVLADFYDQFADQLHESQLDKMPALPAKGNLNLRDILKSDFAFA

SEQ ID NO: 169 - DNA, 2670 bp, synthetic construct
  misc_feature 1..2670: note = Variant of RNA polymerase
  source 1..2670: mol_type = other DNA
atgcaccatcaccatcaccatatgaacacgattaacatcgctaagaacgacttctctgacatcgaactggctgctatcccgttcaacactctggctgaccattacggtgagcgtttagctcgcgaacagttggcccttgagcatgagtcttacgagatgggtgaagcacgcttccgcaagatgtttgagcgtcaacttaaagctggtgaggttgcggataacgctgccgccaagcctctcatcactaccctactccctaagatgattgcacgcatcaacgactggtttgaggaagtgaaagctaagcgcggcaagcgcccgacagccttccagttcctgcaagaaatcaagccggaagccgtagcgtacatcaccattaagaccactctggcttgcctaaccagtgcggacaatacaaccgttcaggctgtagcaagcgcaatcggtcgggccattgaggacgaggctcgcttcggtcgtatccgtgaccttgaagctaagcacttcaagaaaaacgttgaggaacaactcaacaagcgcgtagggcacgtctacaagaaagcatttatgcaagttgtcgaggctgacatgctctctaagggtctactcggtggcgaggcgtggtcttcgtggcataaggaagactctattcatgtaggagtacgctgcatcgagatgctcattgagtcaaccggaatggttagcttacaccgccaaaatgctggcgtagtaggtcaagactctgagactatcgaactcgcacctgaatacgctgaggctatcgcaacccgtgcaggtgcgctggctggcatctctccgatgttccaaccttgcgtagttcctcctaagccgtggactggcattactggtggtggctattgggctgcggggcgcaaacccctgcagttagtacgtactcgcagtctggcggcgcttcgccgctatgaagaagtgtcgatgccggaggtcatcaaagcagtcaacattgcgcagaatacagcatggcgtgtgaacaagaaagttctcgacgtagcgaatgcaatcacccaatggcagcactgtccagtcgcggatgtgcctgcgatggatcgtggcgaaatgccagctcgtccgttggacatcgataccaacgagattgcacttaaagcgtggaagaaagaagcttccgcgttctaccgcaaagacaaagcacgcgttagccgtcgtctgtcaatggagtttatgttatctcaggcgaacaagtttgcgaattataaagcaatctggtttccgcaaaacatggattggcgtgggcgcgtgtacgctgtcccgatgttcaatcctcagggcaacgatatgacgaaaggcctgctgacctttgcgcagggtaaacccattggtgaagacggcttctattggctcaagattcatggcgcaaatacagctggagtggataaagtaccgtttccacaacgcatcaaatttgttgaggataaccatacgaatattatggaatgcgcgaaagcaccgctggaaaacacttggtgggcggaacaggactcgccgttctgttttctggcgttctgctttgagtatgctggcgtcatcaatcacggtctgtcgtacaactgtagcttgcctctggcatttgatggtagttgctccggcattcaacatttctcagcgatgttacgcgacgaaattggcggcaaagctgtgaatctcctcccatctgcggaagtgcaggatatttatcgtatcgtcagcgacaaagttaacgaggtactgaaacaagatctgattaacggtacctctaccaccatggaaacggtgactgataagaagacaggcgaaattaccgaacgcacgaaatacgggaccaaagttatggcacagtggtggttagaacacggtgtgaatcgtggcgtcacgaaacgctcggttatgactttggcgtatgggagcaaagagtttggattccgcgatcaagtgctgagtgacaccattcaaccggcgatcgataacggcaaaggtgacatgtttctgaatccgaatcaggctgctggttacatggcgaaactgatctggaacgcagtgtccgtcaccgtagtcgcagcagttgaggcgatgaactggctgaaaagtgcggcgaaattacttgctgctgaagtgaaggataagaagacggatacagttctgcgtggccgctgcgcagtacattgggtgactcccgacggcttccctgtgtggcaggaatacaagaagcctattcagacgcgcttgaacctgatgttcctcggtcagttccgcttacagcctaccattaacaccaacaaagatagcgagattgatgcacacaaacaggagtctggtatcgctcctaactttgtacacagccaagacggtaaccaccttcgtatgactgtagtgtgggcacacgagaagtacggaatcgaatcttttgcactgattcacgactccttcggtaccattccggctgacgctgcgaacctgttcaaagcagtgcgcgaaactatggtttcgacatatgagtcttgtgatgtactggctgatttctacgaccagttcgctgaccagttgcacgagtctcaattggacaaaatgccagcacttccggctaaaggtaacttgaacctccgtgacatcttaaaatcggacttcgcgttcgcg

SEQ ID NO: 170 - protein, 890 aa, synthetic construct
  REGION 1..890: note = Variant of RNA polymerase
MHHHHHHMNTINIAKNDFSDIELAAIPFNTLADHYGERLAREQLALEHESYEMGEARFRKMFERQLKAGEVADNAAAKPLITTLLPKMIARINDWFEEVKAKRGKRPTAFQFLQEIKPEAVAYITIKTTLACLTSADNTTVQAVASAIGRAIEDEARFGRIRDLEAKHFKKNVEEQLNKRVGHVYKKAFMQVVEADMLSKGLLGGEAWSSWHKEDSIHVGVRCIEMLIESTGMVSLHRQNAGVVGQDSETIELAPEYAEAIATRAGALAGISPMFQPCVVPPKPWTGITGGGYWAAGRKPLQLVRTRSLAALRRYEEVSMPEVIKAVNIAQNTAWRVNKKVLDVANAITQWQHCPVADVPAMDRGEMPARPLDIDTNEIALKAWKKEASAFYRKDKARVSRRLSMEFMLSQANKFANYKAIWFPQNMDWRGRVYAVPMFNPQGNDMTKGLLTFAQGKPIGEDGFYWLKIHGANTAGVDKVPFPQRIKFVEDNHTNIMECAKAPLENTWWAEQDSPFCFLAFCFEYAGVINHGLSYNCSLPLAFDGSCSGIQHFSAMLRDEIGGKAVNLLPSAEVQDIYRIVSDKVNEVLKQDLINGTSTTMETVTDKKTGEITERTKYGTKVMAQWWLEHGVNRGVTKRSVMTLAYGSKEFGFRDQVLSDTIQPAIDNGKGDMFLNPNQAAGYMAKLIWNAVSVTVVAAVEAMNWLKSAAKLLAAEVKDKKTDTVLRGRCAVHWVTPDGFPVWQEYKKPIQTRLNLMFLGQFRLQPTINTNKDSEIDAHKQESGIAPNFVHSQDGNHLRMTVVWAHEKYGIESFALIHDSFGTIPADAANLFKAVRETMVSTYESCDVLADFYDQFADQLHESQLDKMPALPAKGNLNLRDILKSDFAFA

SEQ ID NO: 171 - DNA, 2670 bp, synthetic construct
  misc_feature 1..2670: note = Variant of RNA polymerase
  source 1..2670: mol_type = other DNA
atgcaccatcaccatcaccatatgaacacgattaacatcgctaagaacgacttctctgacatcgaactggctgctatcccgttcaacactctggctgaccattacggtgagcgtttagctcgcgaacagttggcccttgagcatgagtcttacgagatgggtgaagcacgcttccgcaagatgtttgagcgtcaacttaaagctggtgaggttgcggataacgctgccgccaagcctctcatcactaccctactccctaagatgattgcacgcatcaacgactggtttgaggaagtgaaagctaagcgcggcaagcgcccgacagccttccagttcctgcaagaaatcaagccggaagccgtagcgtacatcaccattaagaccactctggcttgcctaaccagtgcggacaatacaaccgttcaggctgtagcaagcgcaatcggtcgggccattgaggacgaggctcgcttcggtcgtatccgtgaccttgaagctaagcacttcaagaaaaacgttgaggaacaactcaacaagcgcgtatttcacgtctacaagaaagcatttatgcaagttgtcgaggctgacatgctctctaagggtctactcggtggcgaggcgtggtcttcgtggcataaggaagactctattcatgtaggagtacgctgcatcgagatgctcattgagtcaaccggaatggttagcttacaccgccaaaatgctggcgtagtaggtcaagactctgagactatcgaactcgcacctgaatacgctgaggctatcgcaacccgtgcaggtgcgctggctggcatctctccgatgttccaaccttgcgtagttcctcctaagccgtggactggcattactggtggtggctattgggctgcggggcgcaaacccctgcagttagtacgtactcgcagtctggcggcgcttcgccgctatgaagaagtgtcgatgccggaggtcatcaaagcagtcaacattgcgcagaatacagcatggcgtgtgaacaagaaagttctcgacgtagcgaatgcaatcacccaatggcagcactgtccagtcgcggatgtgcctgcgatggatcgtggcgaaatgccagctcgtccgttggacatcgataccaacgagattgcacttaaagcgtggaagaaagaagcttccgcgttctaccgcaaagacaaagcacgcgttagccgtcgtctgtcaatggagtttatgttatctcaggcgaacaagtttgcgaattataaagcaatctggtttccgcaaaacatggattggcgtgggcgcgtgtacgctgtcccgatgttcaatcctcagggcaacgatatgacgaaaggcctgctgacctttgcgcagggtaaacccattggtgaagacggcttctattggctcaagattcatggcgcaaatacagctggagtggataaagtaccgtttccacaacgcatcaaatttgttgaggataaccatacgaatattatggaatgcgcgaaagcaccgctggaaaacacttggtgggcggaacaggactcgccgttctgttttctggcgttctgctttgagtatgctggcgtcatcaatcacggtctgtcgtacaactgtagcttgcctctggcatttgatggtagttgctccggcattcaacatttctcagcgatgttacgcgacgaaattggcggcaaagctgtgaatctcctcccatctgcggaagtgcaggatatttatcgtatcgtcagcgacaaagttaacgaggtactgaaacaagatctgattaacggtacctctaccaccttggaaacggtgactgataagaagacaggcgaaattaccgaacgcacgaaatacgggaccaaagttatggcacagtggtggttagaacacggtgtgaatcgtggcgtcacgaaacgctcggttatgactttggcgtatgggagcaaagagtttggattccgcgatcaagtgctgagtgacaccattcaaccggcgatcgataacggcaaaggtgacatgtttctgaatccgaatcaggctgctggttacatggcgaaactgatctggaacgcagtgtccgtcaccgtagtcgcagcagttgaggcgatgaactggctgaaaagtgcggcgaaattacttgctgctgaagtgaaggataagaagacggatacagttctgcgtggccgctgcgcagtacattgggtgactcccgacggcttccctgtgtggcaggaatacaagaagcctattcagacgcgcttgaacctgatgttcctcggtcagttccgcttacagcctaccattaacaccaacaaagatagcgagattgatgcacacaaacaggagtctggtatcgctcctaactttgtacacagccaagacggtaaccaccttcgtatgactgtagtgtgggcacacgagaagtacggaatcgaatcttttgcactgattcacgactccttcggtaccattccggctgacgctgcgaacctgttcaaagcagtgcgcgaaactatggtttcgacatatgagtcttgtgatgtactggctgatttctacgaccagttcgctgaccagttgcacgagtctcaattggacaaaatgccagcacttccggctaaaggtaacttgaacctccgtgacatcttaaaatcggacttcgcgttcgcg

SEQ ID NO: 172 - protein, 890 aa, synthetic construct
  REGION 1..890: note = Variant of RNA polymerase
MHHHHHHMNTINIAKNDFSDIELAAIPFNTLADHYGERLAREQLALEHESYEMGEARFRKMFERQLKAGEVADNAAAKPLITTLLPKMIARINDWFEEVKAKRGKRPTAFQFLQEIKPEAVAYITIKTTLACLTSADNTTVQAVASAIGRAIEDEARFGRIRDLEAKHFKKNVEEQLNKRVFHVYKKAFMQVVEADMLSKGLLGGEAWSSWHKEDSIHVGVRCIEMLIESTGMVSLHRQNAGVVGQDSETIELAPEYAEAIATRAGALAGISPMFQPCVVPPKPWTGITGGGYWAAGRKPLQLVRTRSLAALRRYEEVSMPEVIKAVNIAQNTAWRVNKKVLDVANAITQWQHCPVADVPAMDRGEMPARPLDIDTNEIALKAWKKEASAFYRKDKARVSRRLSMEFMLSQANKFANYKAIWFPQNMDWRGRVYAVPMFNPQGNDMTKGLLTFAQGKPIGEDGFYWLKIHGANTAGVDKVPFPQRIKFVEDNHTNIMECAKAPLENTWWAEQDSPFCFLAFCFEYAGVINHGLSYNCSLPLAFDGSCSGIQHFSAMLRDEIGGKAVNLLPSAEVQDIYRIVSDKVNEVLKQDLINGTSTTLETVTDKKTGEITERTKYGTKVMAQWWLEHGVNRGVTKRSVMTLAYGSKEFGFRDQVLSDTIQPAIDNGKGDMFLNPNQAAGYMAKLIWNAVSVTVVAAVEAMNWLKSAAKLLAAEVKDKKTDTVLRGRCAVHWVTPDGFPVWQEYKKPIQTRLNLMFLGQFRLQPTINTNKDSEIDAHKQESGIAPNFVHSQDGNHLRMTVVWAHEKYGIESFALIHDSFGTIPADAANLFKAVRETMVSTYESCDVLADFYDQFADQLHESQLDKMPALPAKGNLNLRDILKSDFAFA

SEQ ID NO: 173 - DNA, 2670 bp, synthetic construct
  misc_feature 1..2670: note = Variant of RNA polymerase
  source 1..2670: mol_type = other DNA
atgcaccatcaccatcaccatatgaacacgattaacatcgctaagaacgacttctctgacatcgaactggctgctatcccgttcaacactctggctgaccattacggtgagcgtttagctcgcgaacagttggcccttgagcatgagtcttacgagatgggtgaagcacgcttccgcaagatgtttgagcgtcaacttaaagctggtgaggttgcggataacgctgccgccaagcctctcatcactaccctactccctaagatgattgcacgcatcaacgactggtttgaggaagtgaaagctaagcgcggcaagcgcccgacagccttccagttcctgcaagaaatcaagccggaagccgtagcgtacatcaccattaagaccactctggcttgcctaaccagtgcggacaatacaaccgttcaggctgtagcaagcgcaatcggtcgggccattgaggacgaggctcgcttcggtcgtatccgtgaccttgaagctaagcacttcaagaaaaacgttgaggaacaactcaacaagcgcgtagggcacgtctacaagaaagcatttatgcaagttgtcgaggctgacatgctctctaagggtctactcggtggcgaggcgtggtcttcgtggcataaggaagactctattcatgtaggagtacgctgcatcgagatgctcattgagtcaaccggaatggttagcttacaccgccaaaatgctggcgtagtaggtcaagactctgagactatcgaactcatgcctgaatacgctgaggctatcgcaacccgtgcaggtgcgctggctggcatctctccgatgttccaaccttgcgtagttcctcctaagccgtggactggcattactggtggtggctattgggctgcggggcgcaaacccctgcagttagtacgtactcgcagtctggcggcgcttcgccgctatgaagaagtgtcgatgccggaggtcatcaaagcagtcaacattgcgcagaatacagcatggcgtgtgaacaagaaagttctcgacgtagcgaatgcaatcacccaatggcagcactgtccagtcgcggatgtgcctgcgatggatcgtggcgaaatgccagctcgtccgttggacatcgataccaacgagattgcacttaaagcgtggaagaaagaagcttccgcgttctaccgcaaagacaaagcacgcgttagccgtcgtctgtcaatggagtttatgttatctcaggcgaacaagtttgcgaattataaagcaatctggtttccgcaaaacatggattggcgtgggcgcgtgtacgctgtcccgatgttcaatcctcagggcaacgatatgacgaaaggcctgctgacctttgcgcagggtaaacccattggtgaagacggcttctattggctcaagattcatggcgcaaatacagctggagtggataaagtaccgtttccacaacgcatcaaatttgttgaggataaccatacgaatattatggaatgcgcgaaagcaccgctggaaaacacttggtgggcggaacaggactcgccgttctgttttctggcgttctgctttgagtatgctggcgtcatcaatcacggtctgtcgtacaactgtagcttgcctctggcatttgatggtagttgctccggcattcaacatttctcagcgatgttacgcgacgaaattggcggcaaagctgtgaatctcctcccatctgcggaagtgcaggatatttatcgtatcgtcagcgacaaagttaacgaggtactgaaacaagatctgattaacggtacctctaccaccttggaaacggtgactgataagaagacaggcgaaattaccgaacgcacgaaatacgggaccaaagttatggcacagtggtggttagaacacggtgtgaatcgtggcgtcacgaaacgctcggttatgactttggcgtatgggagcaaagagtttggattccgcgatcaagtgctgagtgacaccattcaaccggcgatcgataacggcaaaggtgacatgtttctgaatccgaatcaggctgctggttacatggcgaaactgatctggaacgcagtgtccgtcaccgtagtcgcagcagttgaggcgatgaactggctgaaaagtgcggcgaaattacttgctgctgaagtgaaggataagaagacggatacagttctgcgtggccgctgcgcagtacattgggtgactcccgacggcttccctgtgtggcaggaatacaagaagcctattcagacgcgcttgaacctgatgttcctcggtcagttccgcttacagcctaccattaacaccaacaaagatagcgagattgatgcacacaaacaggagtctggtatcgctcctaactttgtacacagccaagacggtaaccaccttcgtatgactgtagtgtgggcacacgagaagtacggaatcgaatcttttgcactgattcacgactccttcggtaccattccggctgacgctgcgaacctgttcaaagcagtgcgcgaaactatggtttcgacatatgagtcttgtgatgtactggctgatttctacgaccagttcgctgaccagttgcacgagtctcaattggacaaaatgccagcacttccggctaaaggtaacttgaacctccgtgacatcttaaaatcggacttcgcgttcgcg

SEQ ID NO: 174 - protein, 890 aa, synthetic construct
  REGION 1..890: note = Variant of RNA polymerase
MHHHHHHMNTINIAKNDFSDIELAAIPFNTLADHYGERLAREQLALEHESYEMGEARFRKMFERQLKAGEVADNAAAKPLITTLLPKMIARINDWFEEVKAKRGKRPTAFQFLQEIKPEAVAYITIKTTLACLTSADNTTVQAVASAIGRAIEDEARFGRIRDLEAKHFKKNVEEQLNKRVGHVYKKAFMQVVEADMLSKGLLGGEAWSSWHKEDSIHVGVRCIEMLIESTGMVSLHRQNAGVVGQDSETIELMPEYAEAIATRAGALAGISPMFQPCVVPPKPWTGITGGGYWAAGRKPLQLVRTRSLAALRRYEEVSMPEVIKAVNIAQNTAWRVNKKVLDVANAITQWQHCPVADVPAMDRGEMPARPLDIDTNEIALKAWKKEASAFYRKDKARVSRRLSMEFMLSQANKFANYKAIWFPQNMDWRGRVYAVPMFNPQGNDMTKGLLTFAQGKPIGEDGFYWLKIHGANTAGVDKVPFPQRIKFVEDNHTNIMECAKAPLENTWWAEQDSPFCFLAFCFEYAGVINHGLSYNCSLPLAFDGSCSGIQHFSAMLRDEIGGKAVNLLPSAEVQDIYRIVSDKVNEVLKQDLINGTSTTLETVTDKKTGEITERTKYGTKVMAQWWLEHGVNRGVTKRSVMTLAYGSKEFGFRDQVLSDTIQPAIDNGKGDMFLNPNQAAGYMAKLIWNAVSVTVVAAVEAMNWLKSAAKLLAAEVKDKKTDTVLRGRCAVHWVTPDGFPVWQEYKKPIQTRLNLMFLGQFRLQPTINTNKDSEIDAHKQESGIAPNFVHSQDGNHLRMTVVWAHEKYGIESFALIHDSFGTIPADAANLFKAVRETMVSTYESCDVLADFYDQFADQLHESQLDKMPALPAKGNLNLRDILKSDFAFA

SEQ ID NO: 175 - DNA, 2670 bp, synthetic construct
  misc_feature 1..2670: note = Variant of RNA polymerase
  source 1..2670: mol_type = other DNA
atgcaccatcaccatcaccatatgaacacgattaacatcgctaagaacgacttctctgacatcgaaacggctgctatcccgttcaacactctggctgaccattacggtgagcgtttagctcgcgaacagttggcccttgagcatgagtcttacgagatgggtgaagcacgcttccgcaagatgtttgagcgtcaacttaaagctggtgaggttgcggataacgctgccgccaagcctctcatcactaccctactccctaagatgattgcacgcatcaacgactggtttgaggaagtgaaagctaagcgcggcaagcgcccgacagccttccagttcctgcaagaaatcaagccggaagccgtagcgtacatcaccattaagaccactctggcttgcctaaccagtgcggacaatacaaccgttcaggctgtagcaagcgcaatcggtcgggccattgaggacgaggctcgcttcggtcgtatccgtgaccttgaagctaagcacttcaagaaaaacgttgaggaacaactcaacaagcgcgtagggcacgtctacaagaaagcatttatgcaagttgtcgaggctgacatgctctctaagggtctactcggtggcgaggcgtggtcttcgtggcataaggaagactctattcatgtaggagtacgctgcatcgagatgctcattgagtcaaccggaatggttagcttacaccgccaaaatgctggcgtagtaggtcaagactctgagactatcgaactcgcacctgaatacgctgaggctatcgcaacccgtgcaggtgcgctggctggcatctctccgatgttccaaccttgcgtagttcctcctaagccgtggactggcattactggtggtggctattgggctgcggggcgcaaacccctgcagttagtacgtactcgcagtctggcggcgcttcgccgctatgaagaagtgtcgatgccggaggtcatcaaagcagtcaacattgcgcagaatacagcatggcgtgtgaacaagaaagttctcgacgtagcgaatgcaatcacccaatggcagcactgtccagtcgcggatgtgcctgcgatggatcgtggcgaaatgccagctcgtccgttggacatcgataccaacgagattgcacttaaagcgtggaagaaagaagcttccgcgttctaccgcaaagacaaagcacgcgttagccgtcgtctgtcaatggagtttatgttatctcaggcgaacaagtttgcgaattataaagcaatctggtttccgcaaaacatggattggcgtgggcgcgtgtacgctgtcccgatgttcaatcctcagggcaacgatatgacgaaaggcctgctgacctttgcgcagggtaaacccattggtgaagacggcttctattggctcaagattcatggcgcaaatacagctggagtggataaagtaccgtttccacaacgcatcaaatttgttgaggataaccatacgaatattatggaatgcgcgaaagcaccgctggaaaacacttggtgggcggaacaggactcgccgttctgttttctggcgttctgctttgagtatgctggcgtcatcaatcacggtctgtcgtacaactgtagcttgcctctggcatttgatggtagttgctccggcattcaacatttctcagcgatgttacgcgacgaaattggcggcaaagctgtgaatctcctcccatctgcggaagtgcaggatatttatcgtatcgtcagcgacaaagttaacgaggtactgaaacaagatctgattaacggtacctctaccaccttggaaacggtgactgataagaagacaggcgaaattaccgaacgcacgaaatacgggaccaaagttatggcacagtggtggttagaacacggtgtgaatcgtggcgtcacgaaacgctcggttatgactttggcgtatgggagcaaagagtttggattccgcgatcaagtgctgagtgacaccattcaaccggcgatcgataacggcaaaggtgacatgtttctgaatccgaatcaggctgctggttacatggcgaaactgatctggaacgcagtgtccgtcaccgtagtcgcagcagttgaggcgatgaactggctgaaaagtgcggcgaaattacttgctgctgaagtgaaggataagaagacggatacagttctgcgtggccgctgcgcagtacattgggtgactcccgacggcttccctgtgtggcaggaatacaagaagcctattcagacgcgcttgaacctgatgttcctcggtcagttccgcttacagcctaccattaacaccaacaaagatagcgagattgatgcacacaaacaggagtctggtatcgctcctaactttgtacacagccaagacggtaaccaccttcgtatgactgtagtgtgggcacacgagaagtacggaatcgaatcttttgcactgattcacgactccttcggtaccattccggctgacgctgcgaacctgttcaaagcagtgcgcgaaactatggtttcgacatatgagtcttgtgatgtactggctgatttctacgaccagttcgctgaccagttgcacgagtctcaattggacaaaatgccagcacttccggctaaaggtaacttgaacctccgtgacatcttaaaatcggacttcgcgttcgcg

SEQ ID NO: 176 - protein, 890 aa, synthetic construct
  REGION 1..890: note = Variant of RNA polymerase
MHHHHHHMNTINIAKNDFSDIETAAIPFNTLADHYGERLAREQLALEHESYEMGEARFRKMFERQLKAGEVADNAAAKPLITTLLPKMIARINDWFEEVKAKRGKRPTAFQFLQEIKPEAVAYITIKTTLACLTSADNTTVQAVASAIGRAIEDEARFGRIRDLEAKHFKKNVEEQLNKRVGHVYKKAFMQVVEADMLSKGLLGGEAWSSWHKEDSIHVGVRCIEMLIESTGMVSLHRQNAGVVGQDSETIELAPEYAEAIATRAGALAGISPMFQPCVVPPKPWTGITGGGYWAAGRKPLQLVRTRSLAALRRYEEVSMPEVIKAVNIAQNTAWRVNKKVLDVANAITQWQHCPVADVPAMDRGEMPARPLDIDTNEIALKAWKKEASAFYRKDKARVSRRLSMEFMLSQANKFANYKAIWFPQNMDWRGRVYAVPMFNPQGNDMTKGLLTFAQGKPIGEDGFYWLKIHGANTAGVDKVPFPQRIKFVEDNHTNIMECAKAPLENTWWAEQDSPFCFLAFCFEYAGVINHGLSYNCSLPLAFDGSCSGIQHFSAMLRDEIGGKAVNLLPSAEVQDIYRIVSDKVNEVLKQDLINGTSTTLETVTDKKTGEITERTKYGTKVMAQWWLEHGVNRGVTKRSVMTLAYGSKEFGFRDQVLSDTIQPAIDNGKGDMFLNPNQAAGYMAKLIWNAVSVTVVAAVEAMNWLKSAAKLLAAEVKDKKTDTVLRGRCAVHWVTPDGFPVWQEYKKPIQTRLNLMFLGQFRLQPTINTNKDSEIDAHKQESGIAPNFVHSQDGNHLRMTVVWAHEKYGIESFALIHDSFGTIPADAANLFKAVRETMVSTYESCDVLADFYDQFADQLHESQLDKMPALPAKGNLNLRDILKSDFAFA

SEQ ID NO: 177 - DNA, 2670 bp, synthetic construct
  misc_feature 1..2670: note = Variant of RNA polymerase
  source 1..2670: mol_type = other DNA
atgcaccatcaccatcaccatatgaacacgattaacatcgctaagaacgacttctctgacatcgaactggctgctatcccgttcaacactctggctgaccattacggtgagcgtttagctcgcgaacagttggcccttgagcatgagtcttacgagatgggtgaagcacgcttccgcaagatgtttgagcgtcaacttaaagctggtgaggttgcggataacgctgccgccaagcctctcatcactaccctactccctaagatgattgcacgcatcaacgactggtttgaggaagtgaaagctaagcgcggcaagcgcccgacagccttccagttcctgcaagaaatcaagccggaagccgtagcgtacatcaccattaagaccactctggcttgcctaaccagtgcggacaatacaaccgttcaggctgtagcaagcgcaatcggtcgggccattgaggacgaggctcgcttcggtcgtatccgtgaccttgaagctaagcacttcaagaaaaacgttgaggaacaactcaacaagcgcgtagggcacgtctacaagaaagcacagatgcaagttgtcgaggctgacatgctctctaagggtctactcggtggcgaggcgtggtcttcgtggcataaggaagactctattcatgtaggagtacgctgcatcgagatgctcattgagtcaaccggaatggttagcttacaccgccaaaatgctggcgtagtaggtcaagactctgagactatcgaactcgcacctgaatacgctgaggctatcgcaacccgtgcaggtgcgctggctggcatctctccgatgttccaaccttgcgtagttcctcctaagccgtggactggcattactggtggtggctattgggctgcggggcgcaaacccctgcagttagtacgtactcgcagtctggcggcgcttcgccgctatgaagaagtgtcgatgccggaggtcatcaaagcagtcaacattgcgcagaatacagcatggcgtgtgaacaagaaagttctcgacgtagcgaatgcaatcacccaatggcagcactgtccagtcgcggatgtgcctgcgatggatcgtggcgaaatgccagctcgtccgttggacatcgataccaacgagattgcacttaaagcgtggaagaaagaagcttccgcgttctaccgcaaagacaaagcacgcgttagccgtcgtctgtcaatggagtttatgttatctcaggcgaacaagtttgcgaattataaagcaatctggtttccgcaaaacatggattggcgtgggcgcgtgtacgctgtcccgatgttcaatcctcagggcaacgatatgacgaaaggcctgctgacctttgcgcagggtaaacccattggtgaagacggcttctattggctcaagattcatggcgcaaatacagctggagtggataaagtaccgtttccacaacgcatcaaatttgttgaggataaccatacgaatattatggaatgcgcgaaagcaccgctggaaaacacttggtgggcggaacaggactcgccgttctgttttctggcgttctgctttgagtatgctggcgtcatcaatcacggtctgtcgtacaactgtagcttgcctctggcatttgatggtagttgctccggcattcaacatttctcagcgatgttacgcgacgaaattggcggcaaagctgtgaatctcctcccatctgcggaagtgcaggatatttatcgtatcgtcagcgacaaagttaacgaggtactgaaacaagatctgattaacggtacctctaccaccttggaaacggtgactgataagaagacaggcgaaattaccgaacgcacgaaatacgggaccaaagttatggcacagtggtggttagaacacggtgtgaatcgtggcgtcacgaaacgctcggttatgactttggcgtatgggagcaaagagtttggattccgcgatcaagtgctgagtgacaccattcaaccggcgatcgataacggcaaaggtgacatgtttctgaatccgaatcaggctgctggttacatggcgaaactgatctggaacgcagtgtccgtcaccgtagtcgcagcagttgaggcgatgaactggctgaaaagtgcggcgaaattacttgctgctgaagtgaaggataagaagacggatacagttctgcgtggccgctgcgcagtacattgggtgactcccgacggcttccctgtgtggcaggaatacaagaagcctattcagacgcgcttgaacctgatgttcctcggtcagttccgcttacagcctaccattaacaccaacaaagatagcgagattgatgcacacaaacaggagtctggtatcgctcctaactttgtacacagccaagacggtaaccaccttcgtatgactgtagtgtgggcacacgagaagtacggaatcgaatcttttgcactgattcacgactccttcggtaccattccggctgacgctgcgaacctgttcaaagcagtgcgcgaaactatggtttcgacatatgagtcttgtgatgtactggctgatttctacgaccagttcgctgaccagttgcacgagtctcaattggacaaaatgccagcacttccggctaaaggtaacttgaacctccgtgacatcttaaaatcggacttcgcgttcgcg

SEQ ID NO: 178 - protein, 890 aa, synthetic construct
  REGION 1..890: note = Variant of RNA polymerase
MHHHHHHMNTINIAKNDFSDIELAAIPFNTLADHYGERLAREQLALEHESYEMGEARFRKMFERQLKAGEVADNAAAKPLITTLLPKMIARINDWFEEVKAKRGKRPTAFQFLQEIKPEAVAYITIKTTLACLTSADNTTVQAVASAIGRAIEDEARFGRIRDLEAKHFKKNVEEQLNKRVGHVYKKAQMQVVEADMLSKGLLGGEAWSSWHKEDSIHVGVRCIEMLIESTGMVSLHRQNAGVVGQDSETIELAPEYAEAIATRAGALAGISPMFQPCVVPPKPWTGITGGGYWAAGRKPLQLVRTRSLAALRRYEEVSMPEVIKAVNIAQNTAWRVNKKVLDVANAITQWQHCPVADVPAMDRGEMPARPLDIDTNEIALKAWKKEASAFYRKDKARVSRRLSMEFMLSQANKFANYKAIWFPQNMDWRGRVYAVPMFNPQGNDMTKGLLTFAQGKPIGEDGFYWLKIHGANTAGVDKVPFPQRIKFVEDNHTNIMECAKAPLENTWWAEQDSPFCFLAFCFEYAGVINHGLSYNCSLPLAFDGSCSGIQHFSAMLRDEIGGKAVNLLPSAEVQDIYRIVSDKVNEVLKQDLINGTSTTLETVTDKKTGEITERTKYGTKVMAQWWLEHGVNRGVTKRSVMTLAYGSKEFGFRDQVLSDTIQPAIDNGKGDMFLNPNQAAGYMAKLIWNAVSVTVVAAVEAMNWLKSAAKLLAAEVKDKKTDTVLRGRCAVHWVTPDGFPVWQEYKKPIQTRLNLMFLGQFRLQPTINTNKDSEIDAHKQESGIAPNFVHSQDGNHLRMTVVWAHEKYGIESFALIHDSFGTIPADAANLFKAVRETMVSTYESCDVLADFYDQFADQLHESQLDKMPALPAKGNLNLRDILKSDFAFA

SEQ ID NO: 179 - DNA, 2670 bp, synthetic construct
  misc_feature 1..2670: note = Variant of RNA polymerase
  source 1..2670: mol_type = other DNA
atgcaccatcaccatcaccatatgaacacgattaacatcgctaagaacgacttctctgacatcgaactggctgctatcccgttcaacactctggctgaccattacggtgagcgtttagctcgcgaacagttggcccttgagcatgagtcttacgagatgggtgaagcacgcttccgcaagatgtttgagcgtcaacttaaagctggtgaggttgcggataacgctgccgccaagcctctcatcactaccctactccctaagatgattgcacgcatcaacgactggtttgaggaagtgaaagctaagcgcggcaagcgcccgacagccttccagttcctgcaagaaatcaagccggaagccgtagcgtacatcaccattaagaccactctggcttgcctaaccagtgcggacaatacaaccgttcaggctgtagcaagcgcaatcggtcgggccattgaggacgaggctcgcttcggtcgtatccgtgaccttgaagctaagcacttcaagaaaaacgttgaggaacaactcaacaagcgcgtagggcacgtctacaagaaagcatttatgcaagttgtcgaggctgacatgctctctaagggtctactcggtggcgaggcgtggtcttcgtggcataaggaagactctattcatgtaggagtacgctgcatcgagatgctcattgagtcaaccggaatggttagcttacaccgccaaaatgctggcgtagtaggtcaagactctgagactatcgaactcgcacctgaatacgctgaggctatcgcaacccgtgcaggtgcgctggctggcatctctccgatgttccaaccttgcgtagttcctcctaagccgtggactggcattactggtggtggctattgggctgcggggcgcaaacccctgcagttagtacgtactcgcagtctggcggcgcttcgccgctatgaagaagtgtcgatgccggaggtcatcaaagcagtcaacattgcgcagaatacagcatggcgtgtgaacaagaaagttctcgacgtagcgaatgcaatcacccaatggcagcactgtccagtcgcggatgtgcctgcgatggatcgtggcgaaatgccagctcgtccgttggacatcgataccaacgagattgcacttaaagcgtggaagaaagaagcttccgcgttctaccgcaaagacaaagcacgcgttagccgtcgtctgtcaatggagtttatgttatctcaggcgaacaagtttgcgaattataaagcaatctggtttccgcaaaacatggattggcgtgggcgcgtgtacgctgtcccgatgttcaatcctcagggcaacgatatgacgaaaggcctgctgacctttgcgcagggtaaacccattggtgaagacggcttctattggctcaagattcatggcgcaaatacagctggagtggataaagtaccgtttccacaacgcatcaaatttgttgaggataaccatacgaatattatggaatgcgcgaaagcaccgctggaaaacacttggtgggcggggcaggacagcccgttctgttttctggcgttctgctttgagtatgctggcgtcatcaatcacggtctgtcgtacaactgtagcttgcctctggcatttgatggtagttgctccggcattcaacatttctcagcgatgttacgcgacgaaattggcggcaaagctgtgaatctcctcccatctgcggaagtgcaggatatttatcgtatcgtcagcgacaaagttaacgaggtactgaaacaagatctgattaacggtacctctaccaccttggaaacggtgactgataagaagacaggcgaaattaccgaacgcacgaaatacgggaccaaagttatggcacagtggtggttagaacacggtgtgaatcgtggcgtcacgaaacgctcggttatgactttggcgtatgggagcaaagagtttggattccgcgatcaagtgctgagtgacaccattcaaccggcgatcgataacggcaaaggtgacatgtttctgaatccgaatcaggctgctggttacatggcgaaactgatctggaacgcagtgtccgtcaccgtagtcgcagcagttgaggcgatgaactggctgaaaagtgcggcgaaattacttgctgctgaagtgaaggataagaagacggatacagttctgcgtggccgctgcgcagtacattgggtgactcccgacggcttccctgtgtggcaggaatacaagaagcctattcagacgcgcttgaacctgatgttcctcggtcagttccgcttacagcctaccattaacaccaacaaagatagcgagattgatgcacacaaacaggagtctggtatcgctcctaactttgtacacagccaagacggtaaccaccttcgtatgactgtagtgtgggcacacgagaagtacggaatcgaatcttttgcactgattcacgactccttcggtaccattccggctgacgctgcgaacctgttcaaagcagtgcgcgaaactatggtttcgacatatgagtcttgtgatgtactggctgatttctacgaccagttcgctgaccagttgcacgagtctcaattggacaaaatgccagcacttccggctaaaggtaacttgaacctccgtgacatcttaaaatcggacttcgcgttcgcg

SEQ ID NO: 180 - protein, 890 aa, synthetic construct
  REGION 1..890: note = Variant of RNA polymerase
MHHHHHHMNTINIAKNDFSDIELAAIPFNTLADHYGERLAREQLALEHESYEMGEARFRKMFERQLKAGEVADNAAAKPLITTLLPKMIARINDWFEEVKAKRGKRPTAFQFLQEIKPEAVAYITIKTTLACLTSADNTTVQAVASAIGRAIEDEARFGRIRDLEAKHFKKNVEEQLNKRVGHVYKKAFMQVVEADMLSKGLLGGEAWSSWHKEDSIHVGVRCIEMLIESTGMVSLHRQNAGVVGQDSETIELAPEYAEAIATRAGALAGISPMFQPCVVPPKPWTGITGGGYWAAGRKPLQLVRTRSLAALRRYEEVSMPEVIKAVNIAQNTAWRVNKKVLDVANAITQWQHCPVADVPAMDRGEMPARPLDIDTNEIALKAWKKEASAFYRKDKARVSRRLSMEFMLSQANKFANYKAIWFPQNMDWRGRVYAVPMFNPQGNDMTKGLLTFAQGKPIGEDGFYWLKIHGANTAGVDKVPFPQRIKFVEDNHTNIMECAKAPLENTWWAGQDSPFCFLAFCFEYAGVINHGLSYNCSLPLAFDGSCSGIQHFSAMLRDEIGGKAVNLLPSAEVQDIYRIVSDKVNEVLKQDLINGTSTTLETVTDKKTGEITERTKYGTKVMAQWWLEHGVNRGVTKRSVMTLAYGSKEFGFRDQVLSDTIQPAIDNGKGDMFLNPNQAAGYMAKLIWNAVSVTVVAAVEAMNWLKSAAKLLAAEVKDKKTDTVLRGRCAVHWVTPDGFPVWQEYKKPIQTRLNLMFLGQFRLQPTINTNKDSEIDAHKQESGIAPNFVHSQDGNHLRMTVVWAHEKYGIESFALIHDSFGTIPADAANLFKAVRETMVSTYESCDVLADFYDQFADQLHESQLDKMPALPAKGNLNLRDILKSDFAFA

SEQ ID NO: 181 - DNA, 2670 bp, synthetic construct
  misc_feature 1..2670: note = Variant of RNA polymerase
  source 1..2670: mol_type = other DNA
atgcaccatcaccatcaccatatgaacacgattaacatcgctaagaacgacttctctgacatcgaactggctgctatcccgttcaacactctggctgaccattacggtgagcgtttagctcgcgaacagttggcccttgagcatgagtcttacgagatgggtgaagcacgcttccgcaagatgtttgagcgtcaacttaaagctggtgaggttgcggataacgctgccgccaagcctctcatcactaccctactccctaagatgattgcacgcatcaacgactggtttgaggaagtgaaagctaagcgcggcaagcgcccgacagccttccagttcctgcaagaaatcaagccggaagccgtagcgtacatcaccattaagaccactctggcttgcctaaccagtgcggacaatacaaccgttcaggctgtagcaagcgcaatcggtcgggccattgaggacgaggctcgcttcggtcgtatccgtgaccttgaagctaagcacttcaagaaaaacgttgaggaacaactcaacaagcgcgtagggcacgtctacaagaaagcatttatgcaagttgtcgaggctgacatgctctctaagggtctactcggtggcgaggcgtggtcttcgtggcataaggaagactctattcatgtaggagtacgctgcatcgagatgctcattgagtcaaccggaatggttagcttacaccgccaaaatgctggcgtagtaggtcaagactctgagactatcgaactcgcacctgaatacgctgaggctatcgcaacccgtgcaggtgcgctggctggcatctctccgatgttccaacctatggtagttcctcctaagccgtggactggcattactggtggtggctattgggctgcggggcgcaaacccctgcagttagtacgtactcgcagtctggcggcgcttcgccgctatgaagaagtgtcgatgccggaggtcatcaaagcagtcaacattgcgcagaatacagcatggcgtgtgaacaagaaagttctcgacgtagcgaatgcaatcacccaatggcagcactgtccagtcgcggatgtgcctgcgatggatcgtggcgaaatgccagctcgtccgttggacatcgataccaacgagattgcacttaaagcgtggaagaaagaagcttccgcgttctaccgcaaagacaaagcacgcgttagccgtcgtctgtcaatggagtttatgttatctcaggcgaacaagtttgcgaattataaagcaatctggtttccgcaaaacatggattggcgtgggcgcgtgtacgctgtcccgatgttcaatcctcagggcaacgatatgacgaaaggcctgctgacctttgcgcagggtaaacccattggtgaagacggcttctattggctcaagattcatggcgcaaatacagctggagtggataaagtaccgtttccacaacgcatcaaatttgttgaggataaccatacgaatattatggaatgcgcgaaagcaccgctggaaaacacttggtgggcggaacaggactcgccgttctgttttctggcgttctgctttgagtatgctggcgtcatcaatcacggtctgtcgtacaactgtagcttgcctctggcatttgatggtagttgctccggcattcaacatttctcagcgatgttacgcgacgaaattggcggcaaagctgtgaatctcctcccatctgcggaagtgcaggatatttatcgtatcgtcagcgacaaagttaacgaggtactgaaacaagatctgattaacggtacctctaccaccttggaaacggtgactgataagaagacaggcgaaattaccgaacgcacgaaatacgggaccaaagttatggcacagtggtggttagaacacggtgtgaatcgtggcgtcacgaaacgctcggttatgactttggcgtatgggagcaaagagtttggattccgcgatcaagtgctgagtgacaccattcaaccggcgatcgataacggcaaaggtgacatgtttctgaatccgaatcaggctgctggttacatggcgaaactgatctggaacgcagtgtccgtcaccgtagtcgcagcagttgaggcgatgaactggctgaaaagtgcggcgaaattacttgctgctgaagtgaaggataagaagacggatacagttctgcgtggccgctgcgcagtacattgggtgactcccgacggcttccctgtgtggcaggaatacaagaagcctattcagacgcgcttgaacctgatgttcctcggtcagttccgcttacagcctaccattaacaccaacaaagatagcgagattgatgcacacaaacaggagtctggtatcgctcctaactttgtacacagccaagacggtaaccaccttcgtatgactgtagtgtgggcacacgagaagtacggaatcgaatcttttgcactgattcacgactccttcggtaccattccggctgacgctgcgaacctgttcaaagcagtgcgcgaaactatggtttcgacatatgagtcttgtgatgtactggctgatttctacgaccagttcgctgaccagttgcacgagtctcaattggacaaaatgccagcacttccggctaaaggtaacttgaacctccgtgacatcttaaaatcggacttcgcgttcgcg

SEQ ID NO: 182 - protein, 890 aa, synthetic construct
  REGION 1..890: note = Variant of RNA polymerase
MHHHHHHMNTINIAKNDFSDIELAAIPFNTLADHYGERLAREQLALEHESYEMGEARFRKMFERQLKAGEVADNAAAKPLITTLLPKMIARINDWFEEVKAKRGKRPTAFQFLQEIKPEAVAYITIKTTLACLTSADNTTVQAVASAIGRAIEDEARFGRIRDLEAKHFKKNVEEQLNKRVGHVYKKAFMQVVEADMLSKGLLGGEAWSSWHKEDSIHVGVRCIEMLIESTGMVSLHRQNAGVVGQDSETIELAPEYAEAIATRAGALAGISPMFQPMVVPPKPWTGITGGGYWAAGRKPLQLVRTRSLAALRRYEEVSMPEVIKAVNIAQNTAWRVNKKVLDVANAITQWQHCPVADVPAMDRGEMPARPLDIDTNEIALKAWKKEASAFYRKDKARVSRRLSMEFMLSQANKFANYKAIWFPQNMDWRGRVYAVPMFNPQGNDMTKGLLTFAQGKPIGEDGFYWLKIHGANTAGVDKVPFPQRIKFVEDNHTNIMECAKAPLENTWWAEQDSPFCFLAFCFEYAGVINHGLSYNCSLPLAFDGSCSGIQHFSAMLRDEIGGKAVNLLPSAEVQDIYRIVSDKVNEVLKQDLINGTSTTLETVTDKKTGEITERTKYGTKVMAQWWLEHGVNRGVTKRSVMTLAYGSKEFGFRDQVLSDTIQPAIDNGKGDMFLNPNQAAGYMAKLIWNAVSVTVVAAVEAMNWLKSAAKLLAAEVKDKKTDTVLRGRCAVHWVTPDGFPVWQEYKKPIQTRLNLMFLGQFRLQPTINTNKDSEIDAHKQESGIAPNFVHSQDGNHLRMTVVWAHEKYGIESFALIHDSFGTIPADAANLFKAVRETMVSTYESCDVLADFYDQFADQLHESQLDKMPALPAKGNLNLRDILKSDFAFA

SEQ ID NO: 183 - DNA, 2670 bp, synthetic construct
  misc_feature 1..2670: note = Variant of RNA polymerase
  source 1..2670: mol_type = other DNA
atgcaccatcaccatcaccatatgaacacgattaacatcgctaagaacgacttctctgacatcgaactggctgctatcccgttcaacactctggctgaccattacggtgagcgtttagctcgcgaacagttggcccttgagcatgagtcttacgagatgggtgaagcacgcttccgcaagatgtttgagcgtcaacttaaagctggtgaggttgcggataacgctgccgccaagcctctcatcactaccctactccctaagatgattgcacgcatcaacgactggtttgaggaagtgaaagctaagcgcggcaagcgcccgacagccttccagttcctgcaagaaatcaagccggaagccgtagcgtacatcaccattaagaccactctggcttgcctaaccagtgcggacaatacaaccgttcaggctgtagcaagcgcaatcggtcgggccattgaggacgaggctcgcttcggtcgtatccgtgaccttgaagctaagcacttcaagaaaaacgttgaggaacaactcaacaagcgcgtagggcacgtctacaagaaagcatttatgcaagttgtcgaggatgacatgctctctaagggtctactcggtggcgaggcgtggtcttcgtggcataaggaagactctattcatgtaggagtacgctgcatcgagatgctcattgagtcaaccggaatggttagcttacaccgccaaaatgctggcgtagtaggtcaagactctgagactatcgaactcgcacctgaatacgctgaggctatcgcaacccgtgcaggtgcgctggctggcatctctccgatgttccaaccttgcgtagttcctcctaagccgtggactggcattactggtggtggctattgggctgcggggcgcaaacccctgcagttagtacgtactcgcagtctggcggcgcttcgccgctatgaagaagtgtcgatgccggaggtcatcaaagcagtcaacattgcgcagaatacagcatggcgtgtgaacaagaaagttctcgacgtagcgaatgcaatcacccaatggcagcactgtccagtcgcggatgtgcctgcgatggatcgtggcgaaatgccagctcgtccgttggacatcgataccaacgagattgcacttaaagcgtggaagaaagaagcttccgcgttctaccgcaaagacaaagcacgcgttagccgtcgtctgtcaatggagtttatgttatctcaggcgaacaagtttgcgaattataaagcaatctggtttccgcaaaacatggattggcgtgggcgcgtgtacgctgtcccgatgttcaatcctcagggcaacgatatgacgaaaggcctgctgacctttgcgcagggtaaacccattggtgaagacggcttctattggctcaagattcatggcgcaaatacagctggagtggataaagtaccgtttccacaacgcatcaaatttgttgaggataaccatacgaatattatggaatgcgcgaaagcaccgctggaaaacacttggtgggcggaacaggactcgccgttctgttttctggcgttctgctttgagtatgctggcgtcatcaatcacggtctgtcgtacaactgtagcttgcctctggcatttgatggtagttgctccggcattcaacatttctcagcgatgttacgcgacgaaattggcggcaaagctgtgaatctcctcccatctgcggaagtgcaggatatttatcgtatcgtcagcgacaaagttaacgaggtactgaaacaagatctgattaacggtacctctaccaccttggaaacggtgactgataagaagacaggcgaaattaccgaacgcacgaaatacgggaccaaagttatggcacagtggtggttagaacacggtgtgaatcgtggcgtcacgaaacgctcggttatgactttggcgtatgggagcaaagagtttggattccgcgatcaagtgctgagtgacaccattcaaccggcgatcgataacggcaaaggtgacatgtttctgaatccgaatcaggctgctggttacatggcgaaactgatctggaacgcagtgtccgtcaccgtagtcgcagcagttgaggcgatgaactggctgaaaagtgcggcgaaattacttgctgctgaagtgaaggataagaagacggatacagttctgcgtggccgctgcgcagtacattgggtgactcccgacggcttccctgtgtggcaggaatacaagaagcctattcagacgcgcttgaacctgatgttcctcggtcagttccgcttacagcctaccattaacaccaacaaagatagcgagattgatgcacacaaacaggagtctggtatcgctcctaactttgtacacagccaagacggtaaccaccttcgtatgactgtagtgtgggcacacgagaagtacggaatcgaatcttttgcactgattcacgactccttcggtaccattccggctgacgctgcgaacctgttcaaagcagtgcgcgaaactatggtttcgacatatgagtcttgtgatgtactggctgatttctacgaccagttcgctgaccagttgcacgagtctcaattggacaaaatgccagcacttccggctaaaggtaacttgaacctccgtgacatcttaaaatcggacttcgcgttcgcg

SEQ ID NO: 184 - protein, 890 aa, synthetic construct
  REGION 1..890: note = Variant of RNA polymerase
MHHHHHHMNTINIAKNDFSDIELAAIPFNTLADHYGERLAREQLALEHESYEMGEARFRKMFERQLKAGEVADNAAAKPLITTLLPKMIARINDWFEEVKAKRGKRPTAFQFLQEIKPEAVAYITIKTTLACLTSADNTTVQAVASAIGRAIEDEARFGRIRDLEAKHFKKNVEEQLNKRVGHVYKKAFMQVVEDDMLSKGLLGGEAWSSWHKEDSIHVGVRCIEMLIESTGMVSLHRQNAGVVGQDSETIELAPEYAEAIATRAGALAGISPMFQPCVVPPKPWTGITGGGYWAAGRKPLQLVRTRSLAALRRYEEVSMPEVIKAVNIAQNTAWRVNKKVLDVANAITQWQHCPVADVPAMDRGEMPARPLDIDTNEIALKAWKKEASAFYRKDKARVSRRLSMEFMLSQANKFANYKAIWFPQNMDWRGRVYAVPMFNPQGNDMTKGLLTFAQGKPIGEDGFYWLKIHGANTAGVDKVPFPQRIKFVEDNHTNIMECAKAPLENTWWAEQDSPFCFLAFCFEYAGVINHGLSYNCSLPLAFDGSCSGIQHFSAMLRDEIGGKAVNLLPSAEVQDIYRIVSDKVNEVLKQDLINGTSTTLETVTDKKTGEITERTKYGTKVMAQWWLEHGVNRGVTKRSVMTLAYGSKEFGFRDQVLSDTIQPAIDNGKGDMFLNPNQAAGYMAKLIWNAVSVTVVAAVEAMNWLKSAAKLLAAEVKDKKTDTVLRGRCAVHWVTPDGFPVWQEYKKPIQTRLNLMFLGQFRLQPTINTNKDSEIDAHKQESGIAPNFVHSQDGNHLRMTVVWAHEKYGIESFALIHDSFGTIPADAANLFKAVRETMVSTYESCDVLADFYDQFADQLHESQLDKMPALPAKGNLNLRDILKSDFAFA

SEQ ID NO: 185 - DNA, 2670 bp, synthetic construct
  misc_feature 1..2670: note = Variant of RNA polymerase
  source 1..2670: mol_type = other DNA
atgcaccatcaccatcaccatatgaacacgattaacatcgctaagaacgacttctctgacatcgaactggctgctatcccgttcaacactctggctgaccattacggtgagcgtttagctcgcgaacagttggcccttgagcatgagtcttacgagatgggtgaagcacgcttccgcaagatgtttgagcgtcaacttaaagctggtgaggttgcggataacgctgccttgaagcctctcatcactaccctactccctaagatgattgcacgcatcaacgactggtttgaggaagtgaaagctaagcgcggcaagcgcccgacagccttccagttcctgcaagaaatcaagccggaagccgtagcgtacatcaccattaagaccactctggcttgcctaaccagtgcggacaatacaaccgttcaggctgtagcaagcgcaatcggtcgggccattgaggacgaggctcgcttcggtcgtatccgtgaccttgaagctaagcacttcaagaaaaacgttgaggaacaactcaacaagcgcgtagggcacgtctacaagaaagcatttatgcaagttgtcgaggctgacatgctctctaagggtctactcggtggcgaggcgtggtcttcgtggcataaggaagactctattcatgtaggagtacgctgcatcgagatgctcattgagtcaaccggaatggttagcttacaccgccaaaatgctggcgtagtaggtcaagactctgagactatcgaactcgcacctgaatacgctgaggctatcgcaacccgtgcaggtgcgctggctggcatctctccgatgttccaaccttgcgtagttcctcctaagccgtggactggcattactggtggtggctattgggctgcggggcgcaaacccctgcagttagtacgtactcgcagtctggcggcgcttcgccgctatgaagaagtgtcgatgccggaggtcatcaaagcagtcaacattgcgcagaatacagcatggcgtgtgaacaagaaagttctcgacgtagcgaatgcaatcacccaatggcagcactgtccagtcgcggatgtgcctgcgatggatcgtggcgaaatgccagctcgtccgttggacatcgataccaacgagattgcacttaaagcgtggaagaaagaagcttccgcgttctaccgcaaagacaaagcacgcgttagccgtcgtctgtcaatggagtttatgttatctcaggcgaacaagtttgcgaattataaagcaatctggtttccgcaaaacatggattggcgtgggcgcgtgtacgctgtcccgatgttcaatcctcagggcaacgatatgacgaaaggcctgctgacctttgcgcagggtaaacccattggtgaagacggcttctattggctcaagattcatggcgcaaatacagctggagtggataaagtaccgtttccacaacgcatcaaatttgttgaggataaccatacgaatattatggaatgcgcgaaagcaccgctggaaaacacttggtgggcggaacaggactcgccgttctgttttctggcgttctgctttgagtatgctggcgtcatcaatcacggtctgtcgtacaactgtagcttgcctctggcatttgatggtagttgctccggcattcaacatttctcagcgatgttacgcgacgaaattggcggcaaagctgtgaatctcctcccatctgcggaagtgcaggatatttatcgtatcgtcagcgacaaagttaacgaggtactgaaacaagatctgattaacggtacctctaccaccttggaaacggtgactgataagaagacaggcgaaattaccgaacgcacgaaatacgggaccaaagttatggcacagtggtggttagaacacggtgtgaatcgtggcgtcacgaaacgctcggttatgactttggcgtatgggagcaaagagtttggattccgcgatcaagtgctgagtgacaccattcaaccggcgatcgataacggcaaaggtgacatgtttctgaatccgaatcaggctgctggttacatggcgaaactgatctggaacgcagtgtccgtcaccgtagtcgcagcagttgaggcgatgaactggctgaaaagtgcggcgaaattacttgctgctgaagtgaaggataagaagacggatacagttctgcgtggccgctgcgcagtacattgggtgactcccgacggcttccctgtgtggcaggaatacaagaagcctattcagacgcgcttgaacctgatgttcctcggtcagttccgcttacagcctaccattaacaccaacaaagatagcgagattgatgcacacaaacaggagtctggtatcgctcctaactttgtacacagccaagacggtaaccaccttcgtatgactgtagtgtgggcacacgagaagtacggaatcgaatcttttgcactgattcacgactccttcggtaccattccggctgacgctgcgaacctgttcaaagcagtgcgcgaaactatggtttcgacatatgagtcttgtgatgtactggctgatttctacgaccagttcgctgaccagttgcacgagtctcaattggacaaaatgccagcacttccggctaaaggtaacttgaacctccgtgacatcttaaaatcggacttcgcgttcgcg

SEQ ID NO: 186 - protein, 890 aa, synthetic construct
  REGION 1..890: note = Variant of RNA polymerase
MHHHHHHMNTINIAKNDFSDIELAAIPFNTLADHYGERLAREQLALEHESYEMGEARFRKMFERQLKAGEVADNAALKPLITTLLPKMIARINDWFEEVKAKRGKRPTAFQFLQEIKPEAVAYITIKTTLACLTSADNTTVQAVASAIGRAIEDEARFGRIRDLEAKHFKKNVEEQLNKRVGHVYKKAFMQVVEADMLSKGLLGGEAWSSWHKEDSIHVGVRCIEMLIESTGMVSLHRQNAGVVGQDSETIELAPEYAEAIATRAGALAGISPMFQPCVVPPKPWTGITGGGYWAAGRKPLQLVRTRSLAALRRYEEVSMPEVIKAVNIAQNTAWRVNKKVLDVANAITQWQHCPVADVPAMDRGEMPARPLDIDTNEIALKAWKKEASAFYRKDKARVSRRLSMEFMLSQANKFANYKAIWFPQNMDWRGRVYAVPMFNPQGNDMTKGLLTFAQGKPIGEDGFYWLKIHGANTAGVDKVPFPQRIKFVEDNHTNIMECAKAPLENTWWAEQDSPFCFLAFCFEYAGVINHGLSYNCSLPLAFDGSCSGIQHFSAMLRDEIGGKAVNLLPSAEVQDIYRIVSDKVNEVLKQDLINGTSTTLETVTDKKTGEITERTKYGTKVMAQWWLEHGVNRGVTKRSVMTLAYGSKEFGFRDQVLSDTIQPAIDNGKGDMFLNPNQAAGYMAKLIWNAVSVTVVAAVEAMNWLKSAAKLLAAEVKDKKTDTVLRGRCAVHWVTPDGFPVWQEYKKPIQTRLNLMFLGQFRLQPTINTNKDSEIDAHKQESGIAPNFVHSQDGNHLRMTVVWAHEKYGIESFALIHDSFGTIPADAANLFKAVRETMVSTYESCDVLADFYDQFADQLHESQLDKMPALPAKGNLNLRDILKSDFAFA

SEQ ID NO: 187 - DNA, 2670 bp, synthetic construct
  misc_feature 1..2670: note = Variant of RNA polymerase
  source 1..2670: mol_type = other DNA
atgcaccatcaccatcaccatatgaacacgattaacatcgctaagaacgacttctctgacatcgaactggctgctatcccgttcaacactctggctgaccattacggtgagcgtttagctcgcgaacagttgactcttgagcatgagtcttacgagatgggtgaagcacgcttccgcaagatgtttgagcgtcaacttaaagctggtgaggttgcggataacgctgccgccaagcctctcatcactaccctactccctaagatgattgcacgcatcaacgactggtttgaggaagtgaaagctaagcgcggcaagcgcccgacagccttccagttcctgcaagaaatcaagccggaagccgtagcgtacatcaccattaagaccactctggcttgcctaaccagtgcggacaatacaaccgttcaggctgtagcaagcgcaatcggtcgggccattgaggacgaggctcgcttcggtcgtatccgtgaccttgaagctaagcacttcaagaaaaacgttgaggaacaactcaacaagcgcgtagggcacgtctacaagaaagcatttatgcaagttgtcgaggctgacatgctctctaagggtctactcggtggcgaggcgtggtcttcgtggcataaggaagactctattcatgtaggagtacgctgcatcgagatgctcattgagtcaaccggaatggttagcttacaccgccaaaatgctggcgtagtaggtcaagactctgagactatcgaactcgcacctgaatacgctgaggctatcgcaacccgtgcaggtgcgctggctggcatctctccgatgttccaaccttgcgtagttcctcctaagccgtggactggcattactggtggtggctattgggctgcggggcgcaaacccctgcagttagtacgtactcgcagtctggcggcgcttcgccgctatgaagaagtgtcgatgccggaggtcatcaaagcagtcaacattgcgcagaatacagcatggcgtgtgaacaagaaagttctcgacgtagcgaatgcaatcacccaatggcagcactgtccagtcgcggatgtgcctgcgatggatcgtggcgaaatgccagctcgtccgttggacatcgataccaacgagattgcacttaaagcgtggaagaaagaagcttccgcgttctaccgcaaagacaaagcacgcgttagccgtcgtctgtcaatggagtttatgttatctcaggcgaacaagtttgcgaattataaagcaatctggtttccgcaaaacatggattggcgtgggcgcgtgtacgctgtcccgatgttcaatcctcagggcaacgatatgacgaaaggcctgctgacctttgcgcagggtaaacccattggtgaagacggcttctattggctcaagattcatggcgcaaatacagctggagtggataaagtaccgtttccacaacgcatcaaatttgttgaggataaccatacgaatattatggaatgcgcgaaagcaccgctggaaaacacttggtgggcggaacaggactcgccgttctgttttctggcgttctgctttgagtatgctggcgtcatcaatcacggtctgtcgtacaactgtagcttgcctctggcatttgatggtagttgctccggcattcaacatttctcagcgatgttacgcgacgaaattggcggcaaagctgtgaatctcctcccatctgcggaagtgcaggatatttatcgtatcgtcagcgacaaagttaacgaggtactgaaacaagatctgattaacggtacctctaccaccttggaaacggtgactgataagaagacaggcgaaattaccgaacgcacgaaatacgggaccaaagttatggcacagtggtggttagaacacggtgtgaatcgtggcgtcacgaaacgctcggttatgactttggcgtatgggagcaaagagtttggattccgcgatcaagtgctgagtgacaccattcaaccggcgatcgataacggcaaaggtgacatgtttctgaatccgaatcaggctgctggttacatggcgaaactgatctggaacgcagtgtccgtcaccgtagtcgcagcagttgaggcgatgaactggctgaaaagtgcggcgaaattacttgctgctgaagtgaaggataagaagacggatacagttctgcgtggccgctgcgcagtacattgggtgactcccgacggcttccctgtgtggcaggaatacaagaagcctattcagacgcgcttgaacctgatgttcctcggtcagttccgcttacagcctaccattaacaccaacaaagatagcgagattgatgcacacaaacaggagtctggtatcgctcctaactttgtacacagccaagacggtaaccaccttcgtatgactgtagtgtgggcacacgagaagtacggaatcgaatcttttgcactgattcacgactccttcggtaccattccggctgacgctgcgaacctgttcaaagcagtgcgcgaaactatggtttcgacatatgagtcttgtgatgtactggctgatttctacgaccagttcgctgaccagttgcacgagtctcaattggacaaaatgccagcacttccggctaaaggtaacttgaacctccgtgacatcttaaaatcggacttcgcgttcgcg

SEQ ID NO: 188 - protein, 890 aa, synthetic construct
  REGION 1..890: note = Variant of RNA polymerase
MHHHHHHMNTINIAKNDFSDIELAAIPFNTLADHYGERLAREQLTLEHESYEMGEARFRKMFERQLKAGEVADNAAAKPLITTLLPKMIARINDWFEEVKAKRGKRPTAFQFLQEIKPEAVAYITIKTTLACLTSADNTTVQAVASAIGRAIEDEARFGRIRDLEAKHFKKNVEEQLNKRVGHVYKKAFMQVVEADMLSKGLLGGEAWSSWHKEDSIHVGVRCIEMLIESTGMVSLHRQNAGVVGQDSETIELAPEYAEAIATRAGALAGISPMFQPCVVPPKPWTGITGGGYWAAGRKPLQLVRTRSLAALRRYEEVSMPEVIKAVNIAQNTAWRVNKKVLDVANAITQWQHCPVADVPAMDRGEMPARPLDIDTNEIALKAWKKEASAFYRKDKARVSRRLSMEFMLSQANKFANYKAIWFPQNMDWRGRVYAVPMFNPQGNDMTKGLLTFAQGKPIGEDGFYWLKIHGANTAGVDKVPFPQRIKFVEDNHTNIMECAKAPLENTWWAEQDSPFCFLAFCFEYAGVINHGLSYNCSLPLAFDGSCSGIQHFSAMLRDEIGGKAVNLLPSAEVQDIYRIVSDKVNEVLKQDLINGTSTTLETVTDKKTGEITERTKYGTKVMAQWWLEHGVNRGVTKRSVMTLAYGSKEFGFRDQVLSDTIQPAIDNGKGDMFLNPNQAAGYMAKLIWNAVSVTVVAAVEAMNWLKSAAKLLAAEVKDKKTDTVLRGRCAVHWVTPDGFPVWQEYKKPIQTRLNLMFLGQFRLQPTINTNKDSEIDAHKQESGIAPNFVHSQDGNHLRMTVVWAHEKYGIESFALIHDSFGTIPADAANLFKAVRETMVSTYESCDVLADFYDQFADQLHESQLDKMPALPAKGNLNLRDILKSDFAFA

SEQ ID NO: 189 - DNA, 2670 bp, synthetic construct
  misc_feature 1..2670: note = Variant of RNA polymerase
  source 1..2670: mol_type = other DNA
atgcaccatcaccatcaccatatgaacacgattaacatcgctaagaacgacttctctgacatcgaactggctgctatcccgttcaacactctggctgaccattacggtgagcgtttagctcgcgaacagttggcccttgagcatgagtcttacgagatgggtgaagcacgcttccgcaagatgtttgagcgtcaacttaaagctggtgaggttgcggataacgctgccgccaagcctctcatcactaccctactccctaagatgattgcacgcatcaacgactggtttgaggaagtgaaagctaagcgcggcaagcgcccgacagccttccagttcctgcaagaaatcaagccggaagccgtagcgtacatcaccattaagaccactctggcttgcctaaccagtgcggacaatacaaccgttcaggctgtagcaagcgcaatcggtcgggccattgaggacgaggctcgcttcggtcgtatccgtgaccttgaagctaagcacttcaagggtaacgttgaggaacaactcaacaagcgcgtagggcacgtctacaagaaagcatttatgcaagttgtcgaggctgacatgctctctaagggtctactcggtggcgaggcgtggtcttcgtggcataaggaagactctattcatgtaggagtacgctgcatcgagatgctcattgagtcaaccggaatggttagcttacaccgccaaaatgctggcgtagtaggtcaagactctgagactatcgaactcgcacctgaatacgctgaggctatcgcaacccgtgcaggtgcgctggctggcatctctccgatgttccaaccttgcgtagttcctcctaagccgtggactggcattactggtggtggctattgggctgcggggcgcaaacccctgcagttagtacgtactcgcagtctggcggcgcttcgccgctatgaagaagtgtcgatgccggaggtcatcaaagcagtcaacattgcgcagaatacagcatggcgtgtgaacaagaaagttctcgacgtagcgaatgcaatcacccaatggcagcactgtccagtcgcggatgtgcctgcgatggatcgtggcgaaatgccagctcgtccgttggacatcgataccaacgagattgcacttaaagcgtggaagaaagaagcttccgcgttctaccgcaaagacaaagcacgcgttagccgtcgtctgtcaatggagtttatgttatctcaggcgaacaagtttgcgaattataaagcaatctggtttccgcaaaacatggattggcgtgggcgcgtgtacgctgtcccgatgttcaatcctcagggcaacgatatgacgaaaggcctgctgacctttgcgcagggtaaacccattggtgaagacggcttctattggctcaagattcatggcgcaaatacagctggagtggataaagtaccgtttccacaacgcatcaaatttgttgaggataaccatacgaatattatggaatgcgcgaaagcaccgctggaaaacacttggtgggcggaacaggactcgccgttctgttttctggcgttctgctttgagtatgctggcgtcatcaatcacggtctgtcgtacaactgtagcttgcctctggcatttgatggtagttgctccggcattcaacatttctcagcgatgttacgcgacgaaattggcggcaaagctgtgaatctcctcccatctgcggaagtgcaggatatttatcgtatcgtcagcgacaaagttaacgaggtactgaaacaagatctgattaacggtacctctaccaccttggaaacggtgactgataagaagacaggcgaaattaccgaacgcacgaaatacgggaccaaagttatggcacagtggtggttagaacacggtgtgaatcgtggcgtcacgaaacgctcggttatgactttggcgtatgggagcaaagagtttggattccgcgatcaagtgctgagtgacaccattcaaccggcgatcgataacggcaaaggtgacatgtttctgaatccgaatcaggctgctggttacatggcgaaactgatctggaacgcagtgtccgtcaccgtagtcgcagcagttgaggcgatgaactggctgaaaagtgcggcgaaattacttgctgctgaagtgaaggataagaagacggatacagttctgcgtggccgctgcgcagtacattgggtgactcccgacggcttccctgtgtggcaggaatacaagaagcctattcagacgcgcttgaacctgatgttcctcggtcagttccgcttacagcctaccattaacaccaacaaagatagcgagattgatgcacacaaacaggagtctggtatcgctcctaactttgtacacagccaagacggtaaccaccttcgtatgactgtagtgtgggcacacgagaagtacggaatcgaatcttttgcactgattcacgactccttcggtaccattccggctgacgctgcgaacctgttcaaagcagtgcgcgaaactatggtttcgacatatgagtcttgtgatgtactggctgatttctacgaccagttcgctgaccagttgcacgagtctcaattggacaaaatgccagcacttccggctaaaggtaacttgaacctccgtgacatcttaaaatcggacttcgcgttcgcg

SEQ ID NO: 190 - protein, 890 aa, synthetic construct
  REGION 1..890: note = Variant of RNA polymerase
MHHHHHHMNTINIAKNDFSDIELAAIPFNTLADHYGERLAREQLALEHESYEMGEARFRKMFERQLKAGEVADNAAAKPLITTLLPKMIARINDWFEEVKAKRGKRPTAFQFLQEIKPEAVAYITIKTTLACLTSADNTTVQAVASAIGRAIEDEARFGRIRDLEAKHFKGNVEEQLNKRVGHVYKKAFMQVVEADMLSKGLLGGEAWSSWHKEDSIHVGVRCIEMLIESTGMVSLHRQNAGVVGQDSETIELAPEYAEAIATRAGALAGISPMFQPCVVPPKPWTGITGGGYWAAGRKPLQLVRTRSLAALRRYEEVSMPEVIKAVNIAQNTAWRVNKKVLDVANAITQWQHCPVADVPAMDRGEMPARPLDIDTNEIALKAWKKEASAFYRKDKARVSRRLSMEFMLSQANKFANYKAIWFPQNMDWRGRVYAVPMFNPQGNDMTKGLLTFAQGKPIGEDGFYWLKIHGANTAGVDKVPFPQRIKFVEDNHTNIMECAKAPLENTWWAEQDSPFCFLAFCFEYAGVINHGLSYNCSLPLAFDGSCSGIQHFSAMLRDEIGGKAVNLLPSAEVQDIYRIVSDKVNEVLKQDLINGTSTTLETVTDKKTGEITERTKYGTKVMAQWWLEHGVNRGVTKRSVMTLAYGSKEFGFRDQVLSDTIQPAIDNGKGDMFLNPNQAAGYMAKLIWNAVSVTVVAAVEAMNWLKSAAKLLAAEVKDKKTDTVLRGRCAVHWVTPDGFPVWQEYKKPIQTRLNLMFLGQFRLQPTINTNKDSEIDAHKQESGIAPNFVHSQDGNHLRMTVVWAHEKYGIESFALIHDSFGTIPADAANLFKAVRETMVSTYESCDVLADFYDQFADQLHESQLDKMPALPAKGNLNLRDILKSDFAFA

SEQ ID NO: 191 - DNA, 2670 bp, synthetic construct
  misc_feature 1..2670: note = Variant of RNA polymerase
  source 1..2670: mol_type = other DNA
atgcaccatcaccatcaccatatgaacacgattaacatcgctaagaacgacttctctgacatcgaactggctgctatcccgttcaacactctggctgaccattacggtgagcgtttagctcgcgaacagttggcccttgagcatgagtcttacgagatgggtgaagcacgcttccgcaagatgtttgagcgtcaacttcaggctggtgaggttgcggataacgctgccgccaagcctctcatcactaccctactccctaagatgattgcacgcatcaacgactggtttgaggaagtgaaagctaagcgcggcaagcgcccgacagccttccagttcctgcaagaaatcaagccggaagccgtagcgtacatcaccattaagaccactctggcttgcctaaccagtgcggacaatacaaccgttcaggctgtagcaagcgcaatcggtcgggccattgaggacgaggctcgcttcggtcgtatccgtgaccttgaagctaagcacttcaagaaaaacgttgaggaacaactcaacaagcgcgtagggcacgtctacaagaaagcatttatgcaagttgtcgaggctgacatgctctctaagggtctactcggtggcgaggcgtggtcttcgtggcataaggaagactctattcatgtaggagtacgctgcatcgagatgctcattgagtcaaccggaatggttagcttacaccgccaaaatgctggcgtagtaggtcaagactctgagactatcgaactcgcacctgaatacgctgaggctatcgcaacccgtgcaggtgcgctggctggcatctctccgatgttccaaccttgcgtagttcctcctaagccgtggactggcattactggtggtggctattgggctgcggggcgcaaacccctgcagttagtacgtactcgcagtctggcggcgcttcgccgctatgaagaagtgtcgatgccggaggtcatcaaagcagtcaacattgcgcagaatacagcatggcgtgtgaacaagaaagttctcgacgtagcgaatgcaatcacccaatggcagcactgtccagtcgcggatgtgcctgcgatggatcgtggcgaaatgccagctcgtccgttggacatcgataccaacgagattgcacttaaagcgtggaagaaagaagcttccgcgttctaccgcaaagacaaagcacgcgttagccgtcgtctgtcaatggagtttatgttatctcaggcgaacaagtttgcgaattataaagcaatctggtttccgcaaaacatggattggcgtgggcgcgtgtacgctgtcccgatgttcaatcctcagggcaacgatatgacgaaaggcctgctgacctttgcgcagggtaaacccattggtgaagacggcttctattggctcaagattcatggcgcaaatacagctggagtggataaagtaccgtttccacaacgcatcaaatttgttgaggataaccatacgaatattatggaatgcgcgaaagcaccgctggaaaacacttggtgggcggaacaggactcgccgttctgttttctggcgttctgctttgagtatgctggcgtcatcaatcacggtctgtcgtacaactgtagcttgcctctggcatttgatggtagttgctccggcattcaacatttctcagcgatgttacgcgacgaaattggcggcaaagctgtgaatctcctcccatctgcggaagtgcaggatatttatcgtatcgtcagcgacaaagttaacgaggtactgaaacaagatctgattaacggtacctctaccaccttggaaacggtgactgataagaagacaggcgaaattaccgaacgcacgaaatacgggaccaaagttatggcacagtggtggttagaacacggtgtgaatcgtggcgtcacgaaacgctcggttatgactttggcgtatgggagcaaagagtttggattccgcgatcaagtgctgagtgacaccattcaaccggcgatcgataacggcaaaggtgacatgtttctgaatccgaatcaggctgctggttacatggcgaaactgatctggaacgcagtgtccgtcaccgtagtcgcagcagttgaggcgatgaactggctgaaaagtgcggcgaaattacttgctgctgaagtgaaggataagaagacggatacagttctgcgtggccgctgcgcagtacattgggtgactcccgacggcttccctgtgtggcaggaatacaagaagcctattcagacgcgcttgaacctgatgttcctcggtcagttccgcttacagcctaccattaacaccaacaaagatagcgagattgatgcacacaaacaggagtctggtatcgctcctaactttgtacacagccaagacggtaaccaccttcgtatgactgtagtgtgggcacacgagaagtacggaatcgaatcttttgcactgattcacgactccttcggtaccattccggctgacgctgcgaacctgttcaaagcagtgcgcgaaactatggtttcgacatatgagtcttgtgatgtactggctgatttctacgaccagttcgctgaccagttgcacgagtctcaattggacaaaatgccagcacttccggctaaaggtaacttgaacctccgtgacatcttaaaatcggacttcgcgttcgcg

SEQ ID NO: 192 - protein, 890 aa, synthetic construct
  REGION 1..890: note = Variant of RNA polymerase
MHHHHHHMNTINIAKNDFSDIELAAIPFNTLADHYGERLAREQLALEHESYEMGEARFRKMFERQLQAGEVADNAAAKPLITTLLPKMIARINDWFEEVKAKRGKRPTAFQFLQEIKPEAVAYITIKTTLACLTSADNTTVQAVASAIGRAIEDEARFGRIRDLEAKHFKKNVEEQLNKRVGHVYKKAFMQVVEADMLSKGLLGGEAWSSWHKEDSIHVGVRCIEMLIESTGMVSLHRQNAGVVGQDSETIELAPEYAEAIATRAGALAGISPMFQPCVVPPKPWTGITGGGYWAAGRKPLQLVRTRSLAALRRYEEVSMPEVIKAVNIAQNTAWRVNKKVLDVANAITQWQHCPVADVPAMDRGEMPARPLDIDTNEIALKAWKKEASAFYRKDKARVSRRLSMEFMLSQANKFANYKAIWFPQNMDWRGRVYAVPMFNPQGNDMTKGLLTFAQGKPIGEDGFYWLKIHGANTAGVDKVPFPQRIKFVEDNHTNIMECAKAPLENTWWAEQDSPFCFLAFCFEYAGVINHGLSYNCSLPLAFDGSCSGIQHFSAMLRDEIGGKAVNLLPSAEVQDIYRIVSDKVNEVLKQDLINGTSTTLETVTDKKTGEITERTKYGTKVMAQWWLEHGVNRGVTKRSVMTLAYGSKEFGFRDQVLSDTIQPAIDNGKGDMFLNPNQAAGYMAKLIWNAVSVTVVAAVEAMNWLKSAAKLLAAEVKDKKTDTVLRGRCAVHWVTPDGFPVWQEYKKPIQTRLNLMFLGQFRLQPTINTNKDSEIDAHKQESGIAPNFVHSQDGNHLRMTVVWAHEKYGIESFALIHDSFGTIPADAANLFKAVRETMVSTYESCDVLADFYDQFADQLHESQLDKMPALPAKGNLNLRDILKSDFAFA

SEQ ID NO: 193 - DNA, 2670 bp, synthetic construct
  misc_feature 1..2670: note = Variant of RNA polymerase
  source 1..2670: mol_type = other DNA
atgcaccatcaccatcaccatatgaacacgattaacatcgctaagaacgacttctctgacatcgaactggctgctatcccgttcaacactctggctgaccattacggtgagcgtttagctcgcgaacagttggcccttgagcatgagtcttacgagatgggtgaagcacgcttccgcaagatgtttgagcgtcaacttaaagctggtgaggttgcggataacgctgccgccaagcctctcatcactaccctactccctaagatgattgcacgcatcaacgactggtttgaggaagtgaaagctaagcgcggcaagcgcccgacagccttccagttcctgcaagaaatcaagccggaagccgtagcgtacatcaccattaagaccactctggcttgcctaaccagtgcggacaatacaaccgttcaggctgtagcaagcgcaatcggtcgggccattgaggacgaggctcgcttcggtcgtatccgtgaccttgaagctaagcacttcaagaaaaacgttgaggaacaactcaacaagcgcgtagggcacgtctacggtaaagcatttatgcaagttgtcgaggctgacatgctctctaagggtctactcggtggcgaggcgtggtcttcgtggcataaggaagactctattcatgtaggagtacgctgcatcgagatgctcattgagtcaaccggaatggttagcttacaccgccaaaatgctggcgtagtaggtcaagactctgagactatcgaactcgcacctgaatacgctgaggctatcgcaacccgtgcaggtgcgctggctggcatctctccgatgttccaaccttgcgtagttcctcctaagccgtggactggcattactggtggtggctattgggctgcggggcgcaaacccctgcagttagtacgtactcgcagtctggcggcgcttcgccgctatgaagaagtgtcgatgccggaggtcatcaaagcagtcaacattgcgcagaatacagcatggcgtgtgaacaagaaagttctcgacgtagcgaatgcaatcacccaatggcagcactgtccagtcgcggatgtgcctgcgatggatcgtggcgaaatgccagctcgtccgttggacatcgataccaacgagattgcacttaaagcgtggaagaaagaagcttccgcgttctaccgcaaagacaaagcacgcgttagccgtcgtctgtcaatggagtttatgttatctcaggcgaacaagtttgcgaattataaagcaatctggtttccgcaaaacatggattggcgtgggcgcgtgtacgctgtcccgatgttcaatcctcagggcaacgatatgacgaaaggcctgctgacctttgcgcagggtaaacccattggtgaagacggcttctattggctcaagattcatggcgcaaatacagctggagtggataaagtaccgtttccacaacgcatcaaatttgttgaggataaccatacgaatattatggaatgcgcgaaagcaccgctggaaaacacttggtgggcggaacaggactcgccgttctgttttctggcgttctgctttgagtatgctggcgtcatcaatcacggtctgtcgtacaactgtagcttgcctctggcatttgatggtagttgctccggcattcaacatttctcagcgatgttacgcgacgaaattggcggcaaagctgtgaatctcctcccatctgcggaagtgcaggatatttatcgtatcgtcagcgacaaagttaacgaggtactgaaacaagatctgattaacggtacctctaccaccttggaaacggtgactgataagaagacaggcgaaattaccgaacgcacgaaatacgggaccaaagttatggcacagtggtggttagaacacggtgtgaatcgtggcgtcacgaaacgctcggttatgactttggcgtatgggagcaaagagtttggattccgcgatcaagtgctgagtgacaccattcaaccggcgatcgataacggcaaaggtgacatgtttctgaatccgaatcaggctgctggttacatggcgaaactgatctggaacgcagtgtccgtcaccgtagtcgcagcagttgaggcgatgaactggctgaaaagtgcggcgaaattacttgctgctgaagtgaaggataagaagacggatacagttctgcgtggccgctgcgcagtacattgggtgactcccgacggcttccctgtgtggcaggaatacaagaagcctattcagacgcgcttgaacctgatgttcctcggtcagttccgcttacagcctaccattaacaccaacaaagatagcgagattgatgcacacaaacaggagtctggtatcgctcctaactttgtacacagccaagacggtaaccaccttcgtatgactgtagtgtgggcacacgagaagtacggaatcgaatcttttgcactgattcacgactccttcggtaccattccggctgacgctgcgaacctgttcaaagcagtgcgcgaaactatggtttcgacatatgagtcttgtgatgtactggctgatttctacgaccagttcgctgaccagttgcacgagtctcaattggacaaaatgccagcacttccggctaaaggtaacttgaacctccgtgacatcttaaaatcggacttcgcgttcgcg

SEQ ID NO: 194 - protein, 890 aa, synthetic construct
  REGION 1..890: note = Variant of RNA polymerase
MHHHHHHMNTINIAKNDFSDIELAAIPFNTLADHYGERLAREQLALEHESYEMGEARFRKMFERQLKAGEVADNAAAKPLITTLLPKMIARINDWFEEVKAKRGKRPTAFQFLQEIKPEAVAYITIKTTLACLTSADNTTVQAVASAIGRAIEDEARFGRIRDLEAKHFKKNVEEQLNKRVGHVYGKAFMQVVEADMLSKGLLGGEAWSSWHKEDSIHVGVRCIEMLIESTGMVSLHRQNAGVVGQDSETIELAPEYAEAIATRAGALAGISPMFQPCVVPPKPWTGITGGGYWAAGRKPLQLVRTRSLAALRRYEEVSMPEVIKAVNIAQNTAWRVNKKVLDVANAITQWQHCPVADVPAMDRGEMPARPLDIDTNEIALKAWKKEASAFYRKDKARVSRRLSMEFMLSQANKFANYKAIWFPQNMDWRGRVYAVPMFNPQGNDMTKGLLTFAQGKPIGEDGFYWLKIHGANTAGVDKVPFPQRIKFVEDNHTNIMECAKAPLENTWWAEQDSPFCFLAFCFEYAGVINHGLSYNCSLPLAFDGSCSGIQHFSAMLRDEIGGKAVNLLPSAEVQDIYRIVSDKVNEVLKQDLINGTSTTLETVTDKKTGEITERTKYGTKVMAQWWLEHGVNRGVTKRSVMTLAYGSKEFGFRDQVLSDTIQPAIDNGKGDMFLNPNQAAGYMAKLIWNAVSVTVVAAVEAMNWLKSAAKLLAAEVKDKKTDTVLRGRCAVHWVTPDGFPVWQEYKKPIQTRLNLMFLGQFRLQPTINTNKDSEIDAHKQESGIAPNFVHSQDGNHLRMTVVWAHEKYGIESFALIHDSFGTIPADAANLFKAVRETMVSTYESCDVLADFYDQFADQLHESQLDKMPALPAKGNLNLRDILKSDFAFA

SEQ ID NO: 195 - DNA, 2670 bp, synthetic construct
  misc_feature 1..2670: note = Variant of RNA polymerase
  source 1..2670: mol_type = other DNA
atgcaccatcaccatcaccatatgaacacgattaacatcgctaagaacgacttctctgacatcgaactggctgttatcccgttcaacactctggctgaccattacggtgagcgtttagctcgcgaacagttggcccttgagcatgagtcttacgagatgggtgaagcacgcttccgcaagatgtttgagcgtcaacttaaagctggtgaggttgcggataacgctgccgccaagcctctcatcactaccctactccctaagatgattgcacgcatcaacgactggtttgaggaagtgaaagctaagcgcggcaagcgcccgacagccttccagttcctgcaagaaatcaagccggaagccgtagcgtacatcaccattaagaccactctggcttgcctaaccagtgcggacaatacaaccgttcaggctgtagcaagcgcaatcggtcgggccattgaggacgaggctcgcttcggtcgtatccgtgaccttgaagctaagcacttcaagaaaaacgttgaggaacaactcaacaagcgcgtagggcacgtctacaagaaagcatttatgcaagttgtcgaggctgacatgctctctaagggtctactcggtggcgaggcgtggtcttcgtggcataaggaagactctattcatgtaggagtacgctgcatcgagatgctcattgagtcaaccggaatggttagcttacaccgccaaaatgctggcgtagtaggtcaagactctgagactatcgaactcgcacctgaatacgctgaggctatcgcaacccgtgcaggtgcgctggctggcatctctccgatgttccaaccttgcgtagttcctcctaagccgtggactggcattactggtggtggctattgggctgcggggcgcaaacccctgcagttagtacgtactcgcagtctggcggcgcttcgccgctatgaagaagtgtcgatgccggaggtcatcaaagcagtcaacattgcgcagaatacagcatggcgtgtgaacaagaaagttctcgacgtagcgaatgcaatcacccaatggcagcactgtccagtcgcggatgtgcctgcgatggatcgtggcgaaatgccagctcgtccgttggacatcgataccaacgagattgcacttaaagcgtggaagaaagaagcttccgcgttctaccgcaaagacaaagcacgcgttagccgtcgtctgtcaatggagtttatgttatctcaggcgaacaagtttgcgaattataaagcaatctggtttccgcaaaacatggattggcgtgggcgcgtgtacgctgtcccgatgttcaatcctcagggcaacgatatgacgaaaggcctgctgacctttgcgcagggtaaacccattggtgaagacggcttctattggctcaagattcatggcgcaaatacagctggagtggataaagtaccgtttccacaacgcatcaaatttgttgaggataaccatacgaatattatggaatgcgcgaaagcaccgctggaaaacacttggtgggcggaacaggactcgccgttctgttttctggcgttctgctttgagtatgctggcgtcatcaatcacggtctgtcgtacaactgtagcttgcctctggcatttgatggtagttgctccggcattcaacatttctcagcgatgttacgcgacgaaattggcggcaaagctgtgaatctcctcccatctgcggaagtgcaggatatttatcgtatcgtcagcgacaaagttaacgaggtactgaaacaagatctgattaacggtacctctaccaccttggaaacggtgactgataagaagacaggcgaaattaccgaacgcacgaaatacgggaccaaagttatggcacagtggtggttagaacacggtgtgaatcgtggcgtcacgaaacgctcggttatgactttggcgtatgggagcaaagagtttggattccgcgatcaagtgctgagtgacaccattcaaccggcgatcgataacggcaaaggtgacatgtttctgaatccgaatcaggctgctggttacatggcgaaactgatctggaacgcagtgtccgtcaccgtagtcgcagcagttgaggcgatgaactggctgaaaagtgcggcgaaattacttgctgctgaagtgaaggataagaagacggatacagttctgcgtggccgctgcgcagtacattgggtgactcccgacggcttccctgtgtggcaggaatacaagaagcctattcagacgcgcttgaacctgatgttcctcggtcagttccgcttacagcctaccattaacaccaacaaagatagcgagattgatgcacacaaacaggagtctggtatcgctcctaactttgtacacagccaagacggtaaccaccttcgtatgactgtagtgtgggcacacgagaagtacggaatcgaatcttttgcactgattcacgactccttcggtaccattccggctgacgctgcgaacctgttcaaagcagtgcgcgaaactatggtttcgacatatgagtcttgtgatgtactggctgatttctacgaccagttcgctgaccagttgcacgagtctcaattggacaaaatgccagcacttccggctaaaggtaacttgaacctccgtgacatcttaaaatcggacttcgcgttcgcg

SEQ ID NO: 196 - protein, 890 aa, synthetic construct
  REGION 1..890: note = Variant of RNA polymerase
MHHHHHHMNTINIAKNDFSDIELAVIPFNTLADHYGERLAREQLALEHESYEMGEARFRKMFERQLKAGEVADNAAAKPLITTLLPKMIARINDWFEEVKAKRGKRPTAFQFLQEIKPEAVAYITIKTTLACLTSADNTTVQAVASAIGRAIEDEARFGRIRDLEAKHFKKNVEEQLNKRVGHVYKKAFMQVVEADMLSKGLLGGEAWSSWHKEDSIHVGVRCIEMLIESTGMVSLHRQNAGVVGQDSETIELAPEYAEAIATRAGALAGISPMFQPCVVPPKPWTGITGGGYWAAGRKPLQLVRTRSLAALRRYEEVSMPEVIKAVNIAQNTAWRVNKKVLDVANAITQWQHCPVADVPAMDRGEMPARPLDIDTNEIALKAWKKEASAFYRKDKARVSRRLSMEFMLSQANKFANYKAIWFPQNMDWRGRVYAVPMFNPQGNDMTKGLLTFAQGKPIGEDGFYWLKIHGANTAGVDKVPFPQRIKFVEDNHTNIMECAKAPLENTWWAEQDSPFCFLAFCFEYAGVINHGLSYNCSLPLAFDGSCSGIQHFSAMLRDEIGGKAVNLLPSAEVQDIYRIVSDKVNEVLKQDLINGTSTTLETVTDKKTGEITERTKYGTKVMAQWWLEHGVNRGVTKRSVMTLAYGSKEFGFRDQVLSDTIQPAIDNGKGDMFLNPNQAAGYMAKLIWNAVSVTVVAAVEAMNWLKSAAKLLAAEVKDKKTDTVLRGRCAVHWVTPDGFPVWQEYKKPIQTRLNLMFLGQFRLQPTINTNKDSEIDAHKQESGIAPNFVHSQDGNHLRMTVVWAHEKYGIESFALIHDSFGTIPADAANLFKAVRETMVSTYESCDVLADFYDQFADQLHESQLDKMPALPAKGNLNLRDILKSDFAFA

SEQ ID NO: 197 - DNA, 2670 bp, synthetic construct
  misc_feature 1..2670: note = Variant of RNA polymerase
  source 1..2670: mol_type = other DNA
atgcaccatcaccatcaccatatgaacacgattaacatcgctaagaacgacttctctgacatcgaactggctgctatcccgttcaacactctggctgaccattacggtgagcgtttagctgcggaacagttggcccttgagcatgagtcttacgagatgggtgaagcacgcttccgcaagatgtttgagcgtcaacttaaagctggtgaggttgcggataacgctgccgccaagcctctcatcactaccctactccctaagatgattgcacgcatcaacgactggtttgaggaagtgaaagctaagcgcggcaagcgcccgacagccttccagttcctgcaagaaatcaagccggaagccgtagcgtacatcaccattaagaccactctggcttgcctaaccagtgcggacaatacaaccgttcaggctgtagcaagcgcaatcggtcgggccattgaggacgaggctcgcttcggtcgtatccgtgaccttgaagctaagcacttcaagaaaaacgttgaggaacaactcaacaagcgcgtagggcacgtctacaagaaagcatttatgcaagttgtcgaggctgacatgctctctaagggtctactcggtggcgaggcgtggtcttcgtggcataaggaagactctattcatgtaggagtacgctgcatcgagatgctcattgagtcaaccggaatggttagcttacaccgccaaaatgctggcgtagtaggtcaagactctgagactatcgaactcgcacctgaatacgctgaggctatcgcaacccgtgcaggtgcgctggctggcatctctccgatgttccaaccttgcgtagttcctcctaagccgtggactggcattactggtggtggctattgggctgcggggcgcaaacccctgcagttagtacgtactcgcagtctggcggcgcttcgccgctatgaagaagtgtcgatgccggaggtcatcaaagcagtcaacattgcgcagaatacagcatggcgtgtgaacaagaaagttctcgacgtagcgaatgcaatcacccaatggcagcactgtccagtcgcggatgtgcctgcgatggatcgtggcgaaatgccagctcgtccgttggacatcgataccaacgagattgcacttaaagcgtggaagaaagaagcttccgcgttctaccgcaaagacaaagcacgcgttagccgtcgtctgtcaatggagtttatgttatctcaggcgaacaagtttgcgaattataaagcaatctggtttccgcaaaacatggattggcgtgggcgcgtgtacgctgtcccgatgttcaatcctcagggcaacgatatgacgaaaggcctgctgacctttgcgcagggtaaacccattggtgaagacggcttctattggctcaagattcatggcgcaaatacagctggagtggataaagtaccgtttccacaacgcatcaaatttgttgaggataaccatacgaatattatggaatgcgcgaaagcaccgctggaaaacacttggtgggcggaacaggactcgccgttctgttttctggcgttctgctttgagtatgctggcgtcatcaatcacggtctgtcgtacaactgtagcttgcctctggcatttgatggtagttgctccggcattcaacatttctcagcgatgttacgcgacgaaattggcggcaaagctgtgaatctcctcccatctgcggaagtgcaggatatttatcgtatcgtcagcgacaaagttaacgaggtactgaaacaagatctgattaacggtacctctaccaccttggaaacggtgactgataagaagacaggcgaaattaccgaacgcacgaaatacgggaccaaagttatggcacagtggtggttagaacacggtgtgaatcgtggcgtcacgaaacgctcggttatgactttggcgtatgggagcaaagagtttggattccgcgatcaagtgctgagtgacaccattcaaccggcgatcgataacggcaaaggtgacatgtttctgaatccgaatcaggctgctggttacatggcgaaactgatctggaacgcagtgtccgtcaccgtagtcgcagcagttgaggcgatgaactggctgaaaagtgcggcgaaattacttgctgctgaagtgaaggataagaagacggatacagttctgcgtggccgctgcgcagtacattgggtgactcccgacggcttccctgtgtggcaggaatacaagaagcctattcagacgcgcttgaacctgatgttcctcggtcagttccgcttacagcctaccattaacaccaacaaagatagcgagattgatgcacacaaacaggagtctggtatcgctcctaactttgtacacagccaagacggtaaccaccttcgtatgactgtagtgtgggcacacgagaagtacggaatcgaatcttttgcactgattcacgactccttcggtaccattccggctgacgctgcgaacctgttcaaagcagtgcgcgaaactatggtttcgacatatgagtcttgtgatgtactggctgatttctacgaccagttcgctgaccagttgcacgagtctcaattggacaaaatgccagcacttccggctaaaggtaacttgaacctccgtgacatcttaaaatcggacttcgcgttcgcg

SEQ ID NO: 198 - protein, 890 aa, synthetic construct
  REGION 1..890: note = Variant of RNA polymerase
MHHHHHHMNTINIAKNDFSDIELAAIPFNTLADHYGERLAAEQLALEHESYEMGEARFRKMFERQLKAGEVADNAAAKPLITTLLPKMIARINDWFEEVKAKRGKRPTAFQFLQEIKPEAVAYITIKTTLACLTSADNTTVQAVASAIGRAIEDEARFGRIRDLEAKHFKKNVEEQLNKRVGHVYKKAFMQVVEADMLSKGLLGGEAWSSWHKEDSIHVGVRCIEMLIESTGMVSLHRQNAGVVGQDSETIELAPEYAEAIATRAGALAGISPMFQPCVVPPKPWTGITGGGYWAAGRKPLQLVRTRSLAALRRYEEVSMPEVIKAVNIAQNTAWRVNKKVLDVANAITQWQHCPVADVPAMDRGEMPARPLDIDTNEIALKAWKKEASAFYRKDKARVSRRLSMEFMLSQANKFANYKAIWFPQNMDWRGRVYAVPMFNPQGNDMTKGLLTFAQGKPIGEDGFYWLKIHGANTAGVDKVPFPQRIKFVEDNHTNIMECAKAPLENTWWAEQDSPFCFLAFCFEYAGVINHGLSYNCSLPLAFDGSCSGIQHFSAMLRDEIGGKAVNLLPSAEVQDIYRIVSDKVNEVLKQDLINGTSTTLETVTDKKTGEITERTKYGTKVMAQWWLEHGVNRGVTKRSVMTLAYGSKEFGFRDQVLSDTIQPAIDNGKGDMFLNPNQAAGYMAKLIWNAVSVTVVAAVEAMNWLKSAAKLLAAEVKDKKTDTVLRGRCAVHWVTPDGFPVWQEYKKPIQTRLNLMFLGQFRLQPTINTNKDSEIDAHKQESGIAPNFVHSQDGNHLRMTVVWAHEKYGIESFALIHDSFGTIPADAANLFKAVRETMVSTYESCDVLADFYDQFADQLHESQLDKMPALPAKGNLNLRDILKSDFAFA

SEQ ID NO: 199 - DNA, 2670 bp, synthetic construct
  misc_feature 1..2670: note = Variant of RNA polymerase
  source 1..2670: mol_type = other DNA
atgcaccatcaccatcaccatatgaacacgattaacatcgctaagaacgacttctctgacatcgaactggctgctatcccgttcaacactctggctgaccattacggtgagcgtttagctcgcgaacagttggcccttgagcatgagtcttacgagatgggtgaagcacgcttccgcaagatgtttgagcgtcaacttaaagctggtgaggttgcggataacgctgccgccaagcctctcatcactaccctactccctaagatgattgcacgcatcaacgactggtttgaggaagtgaaagctaagcgcggcaagcgcccgacagccttccagttcctgcaagaaatcaagccggaagccgtagcgtacatcaccattaagaccactctggcttgcctaaccagtgcggacaatacaaccgttcaggctgtagcaagcgcaatcggtcgggccattgaggacgaggctcgcttcggtcgtatccgtgaccttgaagctaagcacttcaagaaaaacgttgaggaacaactcaacaagcgcgtaggggcggtctacaagaaagcatttatgcaagttgtcgaggctgacatgctctctaagggtctactcggtggcgaggcgtggtcttcgtggcataaggaagactctattcatgtaggagtacgctgcatcgagatgctcattgagtcaaccggaatggttagcttacaccgccaaaatgctggcgtagtaggtcaagactctgagactatcgaactcgcacctgaatacgctgaggctatcgcaacccgtgcaggtgcgctggctggcatctctccgatgttccaaccttgcgtagttcctcctaagccgtggactggcattactggtggtggctattgggctgcggggcgcaaacccctgcagttagtacgtactcgcagtctggcggcgcttcgccgctatgaagaagtgtcgatgccggaggtcatcaaagcagtcaacattgcgcagaatacagcatggcgtgtgaacaagaaagttctcgacgtagcgaatgcaatcacccaatggcagcactgtccagtcgcggatgtgcctgcgatggatcgtggcgaaatgccagctcgtccgttggacatcgataccaacgagattgcacttaaagcgtggaagaaagaagcttccgcgttctaccgcaaagacaaagcacgcgttagccgtcgtctgtcaatggagtttatgttatctcaggcgaacaagtttgcgaattataaagcaatctggtttccgcaaaacatggattggcgtgggcgcgtgtacgctgtcccgatgttcaatcctcagggcaacgatatgacgaaaggcctgctgacctttgcgcagggtaaacccattggtgaagacggcttctattggctcaagattcatggcgcaaatacagctggagtggataaagtaccgtttccacaacgcatcaaatttgttgaggataaccatacgaatattatggaatgcgcgaaagcaccgctggaaaacacttggtgggcggaacaggactcgccgttctgttttctggcgttctgctttgagtatgctggcgtcatcaatcacggtctgtcgtacaactgtagcttgcctctggcatttgatggtagttgctccggcattcaacatttctcagcgatgttacgcgacgaaattggcggcaaagctgtgaatctcctcccatctgcggaagtgcaggatatttatcgtatcgtcagcgacaaagttaacgaggtactgaaacaagatctgattaacggtacctctaccaccttggaaacggtgactgataagaagacaggcgaaattaccgaacgcacgaaatacgggaccaaagttatggcacagtggtggttagaacacggtgtgaatcgtggcgtcacgaaacgctcggttatgactttggcgtatgggagcaaagagtttggattccgcgatcaagtgctgagtgacaccattcaaccggcgatcgataacggcaaaggtgacatgtttctgaatccgaatcaggctgctggttacatggcgaaactgatctggaacgcagtgtccgtcaccgtagtcgcagcagttgaggcgatgaactggctgaaaagtgcggcgaaattacttgctgctgaagtgaaggataagaagacggatacagttctgcgtggccgctgcgcagtacattgggtgactcccgacggcttccctgtgtggcaggaatacaagaagcctattcagacgcgcttgaacctgatgttcctcggtcagttccgcttacagcctaccattaacaccaacaaagatagcgagattgatgcacacaaacaggagtctggtatcgctcctaactttgtacacagccaagacggtaaccaccttcgtatgactgtagtgtgggcacacgagaagtacggaatcgaatcttttgcactgattcacgactccttcggtaccattccggctgacgctgcgaacctgttcaaagcagtgcgcgaaactatggtttcgacatatgagtcttgtgatgtactggctgatttctacgaccagttcgctgaccagttgcacgagtctcaattggacaaaatgccagcacttccggctaaaggtaacttgaacctccgtgacatcttaaaatcggacttcgcgttcgcg

SEQ ID NO: 200 - protein, 890 aa, synthetic construct
  REGION 1..890: note = Variant of RNA polymerase
MHHHHHHMNTINIAKNDFSDIELAAIPFNTLADHYGERLAREQLALEHESYEMGEARFRKMFERQLKAGEVADNAAAKPLITTLLPKMIARINDWFEEVKAKRGKRPTAFQFLQEIKPEAVAYITIKTTLACLTSADNTTVQAVASAIGRAIEDEARFGRIRDLEAKHFKKNVEEQLNKRVGAVYKKAFMQVVEADMLSKGLLGGEAWSSWHKEDSIHVGVRCIEMLIESTGMVSLHRQNAGVVGQDSETIELAPEYAEAIATRAGALAGISPMFQPCVVPPKPWTGITGGGYWAAGRKPLQLVRTRSLAALRRYEEVSMPEVIKAVNIAQNTAWRVNKKVLDVANAITQWQHCPVADVPAMDRGEMPARPLDIDTNEIALKAWKKEASAFYRKDKARVSRRLSMEFMLSQANKFANYKAIWFPQNMDWRGRVYAVPMFNPQGNDMTKGLLTFAQGKPIGEDGFYWLKIHGANTAGVDKVPFPQRIKFVEDNHTNIMECAKAPLENTWWAEQDSPFCFLAFCFEYAGVINHGLSYNCSLPLAFDGSCSGIQHFSAMLRDEIGGKAVNLLPSAEVQDIYRIVSDKVNEVLKQDLINGTSTTLETVTDKKTGEITERTKYGTKVMAQWWLEHGVNRGVTKRSVMTLAYGSKEFGFRDQVLSDTIQPAIDNGKGDMFLNPNQAAGYMAKLIWNAVSVTVVAAVEAMNWLKSAAKLLAAEVKDKKTDTVLRGRCAVHWVTPDGFPVWQEYKKPIQTRLNLMFLGQFRLQPTINTNKDSEIDAHKQESGIAPNFVHSQDGNHLRMTVVWAHEKYGIESFALIHDSFGTIPADAANLFKAVRETMVSTYESCDVLADFYDQFADQLHESQLDKMPALPAKGNLNLRDILKSDFAFA

SEQ ID NO: 201 - DNA, 2670 bp, synthetic construct
  misc_feature 1..2670: note = Variant of RNA polymerase
  source 1..2670: mol_type = other DNA
atgcaccatcaccatcaccatatgaacacgattaacatcgctaagaacgacttctctgacatcgaactggctgctatcccgttcaacactctggctgaccattacggtgagcgtttagctcgcgaacagttggcccttgagcatgagtcttacgagatgggtgaagcacgcttccataagatgtttgagcgtcaacttaaagctggtgaggttgcggataacgctgccgccaagcctctcatcactaccctactccctaagatgattgcacgcatcaacgactggtttgaggaagtgaaagctaagcgcggcaagcgcccgacagccttccagttcctgcaagaaatcaagccggaagccgtagcgtacatcaccattaagaccactctggcttgcctaaccagtgcggacaatacaaccgttcaggctgtagcaagcgcaatcggtcgggccattgaggacgaggctcgcttcggtcgtatccgtgaccttgaagctaagcacttcaagaaaaacgttgaggaacaactcaacaagcgcgtagggcacgtctacaagaaagcatttatgcaagttgtcgaggctgacatgctctctaagggtctactcggtggcgaggcgtggtcttcgtggcataaggaagactctattcatgtaggagtacgctgcatcgagatgctcattgagtcaaccggaatggttagcttacaccgccaaaatgctggcgtagtaggtcaagactctgagactatcgaactcgcacctgaatacgctgaggctatcgcaacccgtgcaggtgcgctggctggcatctctccgatgttccaaccttgcgtagttcctcctaagccgtggactggcattactggtggtggctattgggctgcggggcgcaaacccctgcagttagtacgtactcgcagtctggcggcgcttcgccgctatgaagaagtgtcgatgccggaggtcatcaaagcagtcaacattgcgcagaatacagcatggcgtgtgaacaagaaagttctcgacgtagcgaatgcaatcacccaatggcagcactgtccagtcgcggatgtgcctgcgatggatcgtggcgaaatgccagctcgtccgttggacatcgataccaacgagattgcacttaaagcgtggaagaaagaagcttccgcgttctaccgcaaagacaaagcacgcgttagccgtcgtctgtcaatggagtttatgttatctcaggcgaacaagtttgcgaattataaagcaatctggtttccgcaaaacatggattggcgtgggcgcgtgtacgctgtcccgatgttcaatcctcagggcaacgatatgacgaaaggcctgctgacctttgcgcagggtaaacccattggtgaagacggcttctattggctcaagattcatggcgcaaatacagctggagtggataaagtaccgtttccacaacgcatcaaatttgttgaggataaccatacgaatattatggaatgcgcgaaagcaccgctggaaaacacttggtgggcggaacaggactcgccgttctgttttctggcgttctgctttgagtatgctggcgtcatcaatcacggtctgtcgtacaactgtagcttgcctctggcatttgatggtagttgctccggcattcaacatttctcagcgatgttacgcgacgaaattggcggcaaagctgtgaatctcctcccatctgcggaagtgcaggatatttatcgtatcgtcagcgacaaagttaacgaggtactgaaacaagatctgattaacggtacctctaccaccttggaaacggtgactgataagaagacaggcgaaattaccgaacgcacgaaatacgggaccaaagttatggcacagtggtggttagaacacggtgtgaatcgtggcgtcacgaaacgctcggttatgactttggcgtatgggagcaaagagtttggattccgcgatcaagtgctgagtgacaccattcaaccggcgatcgataacggcaaaggtgacatgtttctgaatccgaatcaggctgctggttacatggcgaaactgatctggaacgcagtgtccgtcaccgtagtcgcagcagttgaggcgatgaactggctgaaaagtgcggcgaaattacttgctgctgaagtgaaggataagaagacggatacagttctgcgtggccgctgcgcagtacattgggtgactcccgacggcttccctgtgtggcaggaatacaagaagcctattcagacgcgcttgaacctgatgttcctcggtcagttccgcttacagcctaccattaacaccaacaaagatagcgagattgatgcacacaaacaggagtctggtatcgctcctaactttgtacacagccaagacggtaaccaccttcgtatgactgtagtgtgggcacacgagaagtacggaatcgaatcttttgcactgattcacgactccttcggtaccattccggctgacgctgcgaacctgttcaaagcagtgcgcgaaactatggtttcgacatatgagtcttgtgatgtactggctgatttctacgaccagttcgctgaccagttgcacgagtctcaattggacaaaatgccagcacttccggctaaaggtaacttgaacctccgtgacatcttaaaatcggacttcgcgttcgcg

SEQ ID NO: 202 - protein, 890 aa, synthetic construct
  REGION 1..890: note = Variant of RNA polymerase
MHHHHHHMNTINIAKNDFSDIELAAIPFNTLADHYGERLAREQLALEHESYEMGEARFHKMFERQLKAGEVADNAAAKPLITTLLPKMIARINDWFEEVKAKRGKRPTAFQFLQEIKPEAVAYITIKTTLACLTSADNTTVQAVASAIGRAIEDEARFGRIRDLEAKHFKKNVEEQLNKRVGHVYKKAFMQVVEADMLSKGLLGGEAWSSWHKEDSIHVGVRCIEMLIESTGMVSLHRQNAGVVGQDSETIELAPEYAEAIATRAGALAGISPMFQPCVVPPKPWTGITGGGYWAAGRKPLQLVRTRSLAALRRYEEVSMPEVIKAVNIAQNTAWRVNKKVLDVANAITQWQHCPVADVPAMDRGEMPARPLDIDTNEIALKAWKKEASAFYRKDKARVSRRLSMEFMLSQANKFANYKAIWFPQNMDWRGRVYAVPMFNPQGNDMTKGLLTFAQGKPIGEDGFYWLKIHGANTAGVDKVPFPQRIKFVEDNHTNIMECAKAPLENTWWAEQDSPFCFLAFCFEYAGVINHGLSYNCSLPLAFDGSCSGIQHFSAMLRDEIGGKAVNLLPSAEVQDIYRIVSDKVNEVLKQDLINGTSTTLETVTDKKTGEITERTKYGTKVMAQWWLEHGVNRGVTKRSVMTLAYGSKEFGFRDQVLSDTIQPAIDNGKGDMFLNPNQAAGYMAKLIWNAVSVTVVAAVEAMNWLKSAAKLLAAEVKDKKTDTVLRGRCAVHWVTPDGFPVWQEYKKPIQTRLNLMFLGQFRLQPTINTNKDSEIDAHKQESGIAPNFVHSQDGNHLRMTVVWAHEKYGIESFALIHDSFGTIPADAANLFKAVRETMVSTYESCDVLADFYDQFADQLHESQLDKMPALPAKGNLNLRDILKSDFAFA

SEQ ID NO: 203 - DNA, 2670 bp, synthetic construct
  misc_feature 1..2670: note = Variant of RNA polymerase
  source 1..2670: mol_type = other DNA
atgcaccatcaccatcaccatatgaacacgattaacatcgctaagaacgacttctctgacatcgaactggctgctatcccgttcaacactctggctgaccattacggtgagcgtttagctcgcgaacagttggcccttgagcatgagtcttacgagatgggtgaagcacgcttccgcaagatgtttgagcgtcaacttaaagctggtgaggttgcggataacgctgccgccaagcctctcatcactaccctactccctaagatgattgcacgcatcaacgactggtttgaggaagtgaaagctaagcgcggcaagcgcccgacagccttccagttcctgcaagaaatcaagccggaagccgtagcgtacatcaccattaagaccactctggcttgcctaaccagtgcggacaatacaaccgttcaggctgtagcaagcgcaatcggtcgggccattgaggacgaggctcgcttcggtcgtatccgtgaccttgaagctaagcacttcaagaaaaacgttgaggaacaactcaacaagcgcgtagggcacgtctacaagaaagcatttatgcaagttgtcgaggctgacatgctctctaagggtgtgctcggtggcgaggcgtggtcttcgtggcataaggaagactctattcatgtaggagtacgctgcatcgagatgctcattgagtcaaccggaatggttagcttacaccgccaaaatgctggcgtagtaggtcaagactctgagactatcgaactcgcacctgaatacgctgaggctatcgcaacccgtgcaggtgcgctggctggcatctctccgatgttccaaccttgcgtagttcctcctaagccgtggactggcattactggtggtggctattgggctgcggggcgcaaacccctgcagttagtacgtactcgcagtctggcggcgcttcgccgctatgaagaagtgtcgatgccggaggtcatcaaagcagtcaacattgcgcagaatacagcatggcgtgtgaacaagaaagttctcgacgtagcgaatgcaatcacccaatggcagcactgtccagtcgcggatgtgcctgcgatggatcgtggcgaaatgccagctcgtccgttggacatcgataccaacgagattgcacttaaagcgtggaagaaagaagcttccgcgttctaccgcaaagacaaagcacgcgttagccgtcgtctgtcaatggagtttatgttatctcaggcgaacaagtttgcgaattataaagcaatctggtttccgcaaaacatggattggcgtgggcgcgtgtacgctgtcccgatgttcaatcctcagggcaacgatatgacgaaaggcctgctgacctttgcgcagggtaaacccattggtgaagacggcttctattggctcaagattcatggcgcaaatacagctggagtggataaagtaccgtttccacaacgcatcaaatttgttgaggataaccatacgaatattatggaatgcgcgaaagcaccgctggaaaacacttggtgggcggaacaggactcgccgttctgttttctggcgttctgctttgagtatgctggcgtcatcaatcacggtctgtcgtacaactgtagcttgcctctggcatttgatggtagttgctccggcattcaacatttctcagcgatgttacgcgacgaaattggcggcaaagctgtgaatctcctcccatctgcggaagtgcaggatatttatcgtatcgtcagcgacaaagttaacgaggtactgaaacaagatctgattaacggtacctctaccaccttggaaacggtgactgataagaagacaggcgaaattaccgaacgcacgaaatacgggaccaaagttatggcacagtggtggttagaacacggtgtgaatcgtggcgtcacgaaacgctcggttatgactttggcgtatgggagcaaagagtttggattccgcgatcaagtgctgagtgacaccattcaaccggcgatcgataacggcaaaggtgacatgtttctgaatccgaatcaggctgctggttacatggcgaaactgatctggaacgcagtgtccgtcaccgtagtcgcagcagttgaggcgatgaactggctgaaaagtgcggcgaaattacttgctgctgaagtgaaggataagaagacggatacagttctgcgtggccgctgcgcagtacattgggtgactcccgacggcttccctgtgtggcaggaatacaagaagcctattcagacgcgcttgaacctgatgttcctcggtcagttccgcttacagcctaccattaacaccaacaaagatagcgagattgatgcacacaaacaggagtctggtatcgctcctaactttgtacacagccaagacggtaaccaccttcgtatgactgtagtgtgggcacacgagaagtacggaatcgaatcttttgcactgattcacgactccttcggtaccattccggctgacgctgcgaacctgttcaaagcagtgcgcgaaactatggtttcgacatatgagtcttgtgatgtactggctgatttctacgaccagttcgctgaccagttgcacgagtctcaattggacaaaatgccagcacttccggctaaaggtaacttgaacctccgtgacatcttaaaatcggacttcgcgttcgcg

SEQ ID NO: 204 - protein, 890 aa, synthetic construct
  REGION 1..890: note = Variant of RNA polymerase
MHHHHHHMNTINIAKNDFSDIELAAIPFNTLADHYGERLAREQLALEHESYEMGEARFRKMFERQLKAGEVADNAAAKPLITTLLPKMIARINDWFEEVKAKRGKRPTAFQFLQEIKPEAVAYITIKTTLACLTSADNTTVQAVASAIGRAIEDEARFGRIRDLEAKHFKKNVEEQLNKRVGHVYKKAFMQVVEADMLSKGVLGGEAWSSWHKEDSIHVGVRCIEMLIESTGMVSLHRQNAGVVGQDSETIELAPEYAEAIATRAGALAGISPMFQPCVVPPKPWTGITGGGYWAAGRKPLQLVRTRSLAALRRYEEVSMPEVIKAVNIAQNTAWRVNKKVLDVANAITQWQHCPVADVPAMDRGEMPARPLDIDTNEIALKAWKKEASAFYRKDKARVSRRLSMEFMLSQANKFANYKAIWFPQNMDWRGRVYAVPMFNPQGNDMTKGLLTFAQGKPIGEDGFYWLKIHGANTAGVDKVPFPQRIKFVEDNHTNIMECAKAPLENTWWAEQDSPFCFLAFCFEYAGVINHGLSYNCSLPLAFDGSCSGIQHFSAMLRDEIGGKAVNLLPSAEVQDIYRIVSDKVNEVLKQDLINGTSTTLETVTDKKTGEITERTKYGTKVMAQWWLEHGVNRGVTKRSVMTLAYGSKEFGFRDQVLSDTIQPAIDNGKGDMFLNPNQAAGYMAKLIWNAVSVTVVAAVEAMNWLKSAAKLLAAEVKDKKTDTVLRGRCAVHWVTPDGFPVWQEYKKPIQTRLNLMFLGQFRLQPTINTNKDSEIDAHKQESGIAPNFVHSQDGNHLRMTVVWAHEKYGIESFALIHDSFGTIPADAANLFKAVRETMVSTYESCDVLADFYDQFADQLHESQLDKMPALPAKGNLNLRDILKSDFAFA

SEQ ID NO: 205 - DNA, 2670 bp, synthetic construct
  misc_feature 1..2670: note = Variant of RNA polymerase
  source 1..2670: mol_type = other DNA
atgcaccatcaccatcaccatatgaacacgattaacatcgctaagaacgacttctctgacatcgaactggctgctatcccgttcaacactctggctgaccattacggtgagcgtttagctcgcgaacagttggcccttgagcatgagtcttacgagatgggtgaagcacgcttccgcaagatgtttgagcgtcaacttaaagctggtgaggttgcggataacgctgccgccaagcctctcatcactaccctactccctaagatgattgcacgcatcaacgactggtttgaggaagtgaaagctaagcgcggcaagcgcccgacagccttccagttcctgcaagaaatcaagccggaagccgtagcgtacatcaccattaagaccactctggcttgcctaaccagtgcggacaatacaaccgttcaggctgtagcaagcgcaatcggtcgggccattgaggacgaggctcgcttcggtcgtatccgtgaccttgaagctaagcacttcaagaaaaacgttgaggaacaactcaacaagcgcgtagggcacgtctacaagaaagcatttatgcaagttgtcgaggctgacatgctctctaagggtctactcggtggcgaggcgtggtcttcgtggcataaggaagactctattcatgtaggagtacgctgcatcgagatgctcattgagtcaaccggaatggttagcttacaccgccaaaatgctggcgtagtaggtcaagactctgagactatcgaactcgcacctgaatacgctgaggctatcgcaacccgtgcaggtgcgctggctggcatctctccgatgttccaaccttgcgtagttcctcctaagccgtggactggcattactggtggtggctattgggctgcggggcgcaaacccctgcagttagtacgtactcgcagtctggcggcgcttcgccgctatgaagaagtgtcgatgccggaggtcatcaaagcagtcaacattgcgcagaatacagcatggcgtgtgaacaagaaagttctcgacgtagcgaatgcaatcacccaatggcagcactgtccagtcgcggatgtgcctgcgatggatcgtggcgaaatgccagctcgtccgttggacatcgataccaacgagattgcacttaaagcgtggaagaaagaagcttccgcgttctaccgcaaagacaaagcacgcgttagccgtcgtctgtcaatggagtttatgttatctcaggcgaacaagtttgcgaattataaagcaatctggtttccgcaaaacatggattggcgtgggcgcgtgtacgctgtcccgatgttcaatcctcagggcaacgatatgacgaaaggcctgctgacctttgcgcagggtaaacccattggtgaagacggcttctattggctcaagattcatggcgcaaatacagctggagtggataaagtaccgtttccacaacgcatcaaatttgttgaggataaccatacgaatattatggaatgcgcgaaagcaccgctggaaaacacttggtgggcggaacaggactcgccgttctgttttctggcgttctgctttgagtatgctggcgtcatcaatcacggtctgtcgtacaactgtagcttgcctctggcatttgatggtagttgctccggcattcaacatttctcagcgatgttacgcgacgaaattggcggcaaagctgtgaatctcctcccatctgcggaagtgcaggatatttatcgtatcgtcagcgacaaagttaacgaggtactgaaacaagatctgattaacggtacctctaccaccttggaaacggtgactgataagaagacaggcgaaattaccgaacgcacgaaatacgggaccaaagttatggcacagtggtggttagaacacggtgtgaatcgtggcgtcacgaaacgctcggttatgactttggcgtatgggagcaaagagtttggattccgcgatcaagtgctgagtgacaccattcaaccggcgatcgataacggcaaaggtgacatgtttctgaatccgaatcaggctgctggttacatggcgaaactgatctggaacgcagtgtccgtcaccgtagtcgcagcagttgaggcgatgaactggctgaaaagtgcggcgaaattacttgctgctgaagtgaaggataagaagacggatacagttctgcgtggccgctgcgcagtacattgggtgactcccgacggcttccctgtgtggcaggaatacaagaagcctattcagacgcgcttgaacctgatgttcctcggtcagttccgcttacagcctaccattaacaccaacaaagatagcgagattgatgcacacaaacaggagtctggtatcgctcctaactttgtacacagccaagacggtaaccaccttcgtatgactgtagtgtgggcacacgagaagtacggaatcgaatcttttgcactgattcacgactccttcggtaccattccggctgacgctgcgaacctgttcaaagcagtgcgcgaaactatggtttcgacatatgagtcttgtgatgtactggctgatttctacgaccagttcgctaagcagttgcacgagtctcaattggacaaaatgccagcacttccggctaaaggtaacttgaacctccgtgacatcttaaaatcggacttcgcgttcgcg

SEQ ID NO: 206 - protein, 890 aa, synthetic construct
  REGION 1..890: note = Variant of RNA polymerase
MHHHHHHMNTINIAKNDFSDIELAAIPFNTLADHYGERLAREQLALEHESYEMGEARFRKMFERQLKAGEVADNAAAKPLITTLLPKMIARINDWFEEVKAKRGKRPTAFQFLQEIKPEAVAYITIKTTLACLTSADNTTVQAVASAIGRAIEDEARFGRIRDLEAKHFKKNVEEQLNKRVGHVYKKAFMQVVEADMLSKGLLGGEAWSSWHKEDSIHVGVRCIEMLIESTGMVSLHRQNAGVVGQDSETIELAPEYAEAIATRAGALAGISPMFQPCVVPPKPWTGITGGGYWAAGRKPLQLVRTRSLAALRRYEEVSMPEVIKAVNIAQNTAWRVNKKVLDVANAITQWQHCPVADVPAMDRGEMPARPLDIDTNEIALKAWKKEASAFYRKDKARVSRRLSMEFMLSQANKFANYKAIWFPQNMDWRGRVYAVPMFNPQGNDMTKGLLTFAQGKPIGEDGFYWLKIHGANTAGVDKVPFPQRIKFVEDNHTNIMECAKAPLENTWWAEQDSPFCFLAFCFEYAGVINHGLSYNCSLPLAFDGSCSGIQHFSAMLRDEIGGKAVNLLPSAEVQDIYRIVSDKVNEVLKQDLINGTSTTLETVTDKKTGEITERTKYGTKVMAQWWLEHGVNRGVTKRSVMTLAYGSKEFGFRDQVLSDTIQPAIDNGKGDMFLNPNQAAGYMAKLIWNAVSVTVVAAVEAMNWLKSAAKLLAAEVKDKKTDTVLRGRCAVHWVTPDGFPVWQEYKKPIQTRLNLMFLGQFRLQPTINTNKDSEIDAHKQESGIAPNFVHSQDGNHLRMTVVWAHEKYGIESFALIHDSFGTIPADAANLFKAVRETMVSTYESCDVLADFYDQFAKQLHESQLDKMPALPAKGNLNLRDILKSDFAFA

SEQ ID NO: 207 - DNA, 2670 bp, synthetic construct
  misc_feature 1..2670: note = Variant of RNA polymerase
  source 1..2670: mol_type = other DNA
atgcaccatcaccatcaccatatgaacacgattaacatcgctaagaacgacttctctgacatcgaactggctgctatcccgttcaacactctggctgaccattacggtgagcgtttagctcgcgaacagttggcccttgagcatgagtcttacgagatgggtgaagcacgcttccgcaagatgtttgagcgtcaacttaaagctggtgaggttgcggataacgctgaggccaagcctctcatcactaccctactccctaagatgattgcacgcatcaacgactggtttgaggaagtgaaagctaagcgcggcaagcgcccgacagccttccagttcctgcaagaaatcaagccggaagccgtagcgtacatcaccattaagaccactctggcttgcctaaccagtgcggacaatacaaccgttcaggctgtagcaagcgcaatcggtcgggccattgaggacgaggctcgcttcggtcgtatccgtgaccttgaagctaagcacttcaagaaaaacgttgaggaacaactcaacaagcgcgtagggcacgtctacaagaaagcatttatgcaagttgtcgaggctgacatgctctctaagggtctactcggtggcgaggcgtggtcttcgtggcataaggaagactctattcatgtaggagtacgctgcatcgagatgctcattgagtcaaccggaatggttagcttacaccgccaaaatgctggcgtagtaggtcaagactctgagactatcgaactcgcacctgaatacgctgaggctatcgcaacccgtgcaggtgcgctggctggcatctctccgatgttccaaccttgcgtagttcctcctaagccgtggactggcattactggtggtggctattgggctgcggggcgcaaacccctgcagttagtacgtactcgcagtctggcggcgcttcgccgctatgaagaagtgtcgatgccggaggtcatcaaagcagtcaacattgcgcagaatacagcatggcgtgtgaacaagaaagttctcgacgtagcgaatgcaatcacccaatggcagcactgtccagtcgcggatgtgcctgcgatggatcgtggcgaaatgccagctcgtccgttggacatcgataccaacgagattgcacttaaagcgtggaagaaagaagcttccgcgttctaccgcaaagacaaagcacgcgttagccgtcgtctgtcaatggagtttatgttatctcaggcgaacaagtttgcgaattataaagcaatctggtttccgcaaaacatggattggcgtgggcgcgtgtacgctgtcccgatgttcaatcctcagggcaacgatatgacgaaaggcctgctgacctttgcgcagggtaaacccattggtgaagacggcttctattggctcaagattcatggcgcaaatacagctggagtggataaagtaccgtttccacaacgcatcaaatttgttgaggataaccatacgaatattatggaatgcgcgaaagcaccgctggaaaacacttggtgggcggaacaggactcgccgttctgttttctggcgttctgctttgagtatgctggcgtcatcaatcacggtctgtcgtacaactgtagcttgcctctggcatttgatggtagttgctccggcattcaacatttctcagcgatgttacgcgacgaaattggcggcaaagctgtgaatctcctcccatctgcggaagtgcaggatatttatcgtatcgtcagcgacaaagttaacgaggtactgaaacaagatctgattaacggtacctctaccaccttggaaacggtgactgataagaagacaggcgaaattaccgaacgcacgaaatacgggaccaaagttatggcacagtggtggttagaacacggtgtgaatcgtggcgtcacgaaacgctcggttatgactttggcgtatgggagcaaagagtttggattccgcgatcaagtgctgagtgacaccattcaaccggcgatcgataacggcaaaggtgacatgtttctgaatccgaatcaggctgctggttacatggcgaaactgatctggaacgcagtgtccgtcaccgtagtcgcagcagttgaggcgatgaactggctgaaaagtgcggcgaaattacttgctgctgaagtgaaggataagaagacggatacagttctgcgtggccgctgcgcagtacattgggtgactcccgacggcttccctgtgtggcaggaatacaagaagcctattcagacgcgcttgaacctgatgttcctcggtcagttccgcttacagcctaccattaacaccaacaaagatagcgagattgatgcacacaaacaggagtctggtatcgctcctaactttgtacacagccaagacggtaaccaccttcgtatgactgtagtgtgggcacacgagaagtacggaatcgaatcttttgcactgattcacgactccttcggtaccattccggctgacgctgcgaacctgttcaaagcagtgcgcgaaactatggtttcgacatatgagtcttgtgatgtactggctgatttctacgaccagttcgctgaccagttgcacgagtctcaattggacaaaatgccagcacttccggctaaaggtaacttgaacctccgtgacatcttaaaatcggacttcgcgttcgcg

SEQ ID NO: 208 - protein, 890 aa, synthetic construct
  REGION 1..890: note = Variant of RNA polymerase
MHHHHHHMNTINIAKNDFSDIELAAIPFNTLADHYGERLAREQLALEHESYEMGEARFRKMFERQLKAGEVADNAEAKPLITTLLPKMIARINDWFEEVKAKRGKRPTAFQFLQEIKPEAVAYITIKTTLACLTSADNTTVQAVASAIGRAIEDEARFGRIRDLEAKHFKKNVEEQLNKRVGHVYKKAFMQVVEADMLSKGLLGGEAWSSWHKEDSIHVGVRCIEMLIESTGMVSLHRQNAGVVGQDSETIELAPEYAEAIATRAGALAGISPMFQPCVVPPKPWTGITGGGYWAAGRKPLQLVRTRSLAALRRYEEVSMPEVIKAVNIAQNTAWRVNKKVLDVANAITQWQHCPVADVPAMDRGEMPARPLDIDTNEIALKAWKKEASAFYRKDKARVSRRLSMEFMLSQANKFANYKAIWFPQNMDWRGRVYAVPMFNPQGNDMTKGLLTFAQGKPIGEDGFYWLKIHGANTAGVDKVPFPQRIKFVEDNHTNIMECAKAPLENTWWAEQDSPFCFLAFCFEYAGVINHGLSYNCSLPLAFDGSCSGIQHFSAMLRDEIGGKAVNLLPSAEVQDIYRIVSDKVNEVLKQDLINGTSTTLETVTDKKTGEITERTKYGTKVMAQWWLEHGVNRGVTKRSVMTLAYGSKEFGFRDQVLSDTIQPAIDNGKGDMFLNPNQAAGYMAKLIWNAVSVTVVAAVEAMNWLKSAAKLLAAEVKDKKTDTVLRGRCAVHWVTPDGFPVWQEYKKPIQTRLNLMFLGQFRLQPTINTNKDSEIDAHKQESGIAPNFVHSQDGNHLRMTVVWAHEKYGIESFALIHDSFGTIPADAANLFKAVRETMVSTYESCDVLADFYDQFADQLHESQLDKMPALPAKGNLNLRDILKSDFAFA

SEQ ID NO: 209 - DNA, 2670 bp, synthetic construct
  misc_feature 1..2670: note = Variant of RNA polymerase
  source 1..2670: mol_type = other DNA
atgcaccatcaccatcaccatatgaacacgattaacatcgctaagaacgacttctctgacatcgaactggctgctatcccgttcaacactctggctgaccattacggtgagcgtttagctcgcgaacagttggcccttgagcatgagtcttacgagatgggtgaagcacgcttccgcaagatgtttgagcgtcaacttaaagctggtgaggttgcggataacgctgccgccaagcctctcatccttaccctactccctaagatgattgcacgcatcaacgactggtttgaggaagtgaaagctaagcgcggcaagcgcccgacagccttccagttcctgcaagaaatcaagccggaagccgtagcgtacatcaccattaagaccactctggcttgcctaaccagtgcggacaatacaaccgttcaggctgtagcaagcgcaatcggtcgggccattgaggacgaggctcgcttcggtcgtatccgtgaccttgaagctaagcacttcaagaaaaacgttgaggaacaactcaacaagcgcgtagggcacgtctacaagaaagcatttatgcaagttgtcgaggctgacatgctctctaagggtctactcggtggcgaggcgtggtcttcgtggcataaggaagactctattcatgtaggagtacgctgcatcgagatgctcattgagtcaaccggaatggttagcttacaccgccaaaatgctggcgtagtaggtcaagactctgagactatcgaactcgcacctgaatacgctgaggctatcgcaacccgtgcaggtgcgctggctggcatctctccgatgttccaaccttgcgtagttcctcctaagccgtggactggcattactggtggtggctattgggctgcggggcgcaaacccctgcagttagtacgtactcgcagtctggcggcgcttcgccgctatgaagaagtgtcgatgccggaggtcatcaaagcagtcaacattgcgcagaatacagcatggcgtgtgaacaagaaagttctcgacgtagcgaatgcaatcacccaatggcagcactgtccagtcgcggatgtgcctgcgatggatcgtggcgaaatgccagctcgtccgttggacatcgataccaacgagattgcacttaaagcgtggaagaaagaagcttccgcgttctaccgcaaagacaaagcacgcgttagccgtcgtctgtcaatggagtttatgttatctcaggcgaacaagtttgcgaattataaagcaatctggtttccgcaaaacatggattggcgtgggcgcgtgtacgctgtcccgatgttcaatcctcagggcaacgatatgacgaaaggcctgctgacctttgcgcagggtaaacccattggtgaagacggcttctattggctcaagattcatggcgcaaatacagctggagtggataaagtaccgtttccacaacgcatcaaatttgttgaggataaccatacgaatattatggaatgcgcgaaagcaccgctggaaaacacttggtgggcggaacaggactcgccgttctgttttctggcgttctgctttgagtatgctggcgtcatcaatcacggtctgtcgtacaactgtagcttgcctctggcatttgatggtagttgctccggcattcaacatttctcagcgatgttacgcgacgaaattggcggcaaagctgtgaatctcctcccatctgcggaagtgcaggatatttatcgtatcgtcagcgacaaagttaacgaggtactgaaacaagatctgattaacggtacctctaccaccttggaaacggtgactgataagaagacaggcgaaattaccgaacgcacgaaatacgggaccaaagttatggcacagtggtggttagaacacggtgtgaatcgtggcgtcacgaaacgctcggttatgactttggcgtatgggagcaaagagtttggattccgcgatcaagtgctgagtgacaccattcaaccggcgatcgataacggcaaaggtgacatgtttctgaatccgaatcaggctgctggttacatggcgaaactgatctggaacgcagtgtccgtcaccgtagtcgcagcagttgaggcgatgaactggctgaaaagtgcggcgaaattacttgctgctgaagtgaaggataagaagacggatacagttctgcgtggccgctgcgcagtacattgggtgactcccgacggcttccctgtgtggcaggaatacaagaagcctattcagacgcgcttgaacctgatgttcctcggtcagttccgcttacagcctaccattaacaccaacaaagatagcgagattgatgcacacaaacaggagtctggtatcgctcctaactttgtacacagccaagacggtaaccaccttcgtatgactgtagtgtgggcacacgagaagtacggaatcgaatcttttgcactgattcacgactccttcggtaccattccggctgacgctgcgaacctgttcaaagcagtgcgcgaaactatggtttcgacatatgagtcttgtgatgtactggctgatttctacgaccagttcgctgaccagttgcacgagtctcaattggacaaaatgccagcacttccggctaaaggtaacttgaacctccgtgacatcttaaaatcggacttcgcgttcgcg

SEQ ID NO: 210 - protein, 890 aa, synthetic construct
  REGION 1..890: note = Variant of RNA polymerase
MHHHHHHMNTINIAKNDFSDIELAAIPFNTLADHYGERLAREQLALEHESYEMGEARFRKMFERQLKAGEVADNAAAKPLILTLLPKMIARINDWFEEVKAKRGKRPTAFQFLQEIKPEAVAYITIKTTLACLTSADNTTVQAVASAIGRAIEDEARFGRIRDLEAKHFKKNVEEQLNKRVGHVYKKAFMQVVEADMLSKGLLGGEAWSSWHKEDSIHVGVRCIEMLIESTGMVSLHRQNAGVVGQDSETIELAPEYAEAIATRAGALAGISPMFQPCVVPPKPWTGITGGGYWAAGRKPLQLVRTRSLAALRRYEEVSMPEVIKAVNIAQNTAWRVNKKVLDVANAITQWQHCPVADVPAMDRGEMPARPLDIDTNEIALKAWKKEASAFYRKDKARVSRRLSMEFMLSQANKFANYKAIWFPQNMDWRGRVYAVPMFNPQGNDMTKGLLTFAQGKPIGEDGFYWLKIHGANTAGVDKVPFPQRIKFVEDNHTNIMECAKAPLENTWWAEQDSPFCFLAFCFEYAGVINHGLSYNCSLPLAFDGSCSGIQHFSAMLRDEIGGKAVNLLPSAEVQDIYRIVSDKVNEVLKQDLINGTSTTLETVTDKKTGEITERTKYGTKVMAQWWLEHGVNRGVTKRSVMTLAYGSKEFGFRDQVLSDTIQPAIDNGKGDMFLNPNQAAGYMAKLIWNAVSVTVVAAVEAMNWLKSAAKLLAAEVKDKKTDTVLRGRCAVHWVTPDGFPVWQEYKKPIQTRLNLMFLGQFRLQPTINTNKDSEIDAHKQESGIAPNFVHSQDGNHLRMTVVWAHEKYGIESFALIHDSFGTIPADAANLFKAVRETMVSTYESCDVLADFYDQFADQLHESQLDKMPALPAKGNLNLRDILKSDFAFA

SEQ ID NO: 211 - DNA, 2670 bp, synthetic construct
  misc_feature 1..2670: note = Variant of RNA polymerase
  source 1..2670: mol_type = other DNA
atgcaccatcaccatcaccatatgaacacgattaacatcgctaagaacgacttctctgacatcgaactggctgctatcccgttcaacactctggctgaccattacggtgagcgtttagctcgcgaacagttggcccttgagcatgagtcttacgagatgggtgaagcacgcttccgcaagatgtttgagcgtcaacttaaagctggtgaggttgcggataacgctgccgccaagcctctcatcctgaccctactccctaagatgattgcacgcatcaacgactggtttgaggaagtgaaagctaagcgcggcaagcgcccgacagccttccagttcctgcaagaaatcaagccggaagccgtagcgtacatcaccattaagaccactctggcttgcctaaccagtgcggacaatacaaccgttcaggctgtagcaagcgcaatcggtcgggccattgaggacgaggctcgcttcggtcgtatccgtgaccttgaagctaagcacttcaagaaaaacgttgaggaacaactcagcaagcgcgtagggcacgtctacaagaaagcatttatgcaagttgtcgaggctgacatgctctctaagggtctactcggtggcgaggcgtggtcttcgtggcataaggaagactctattcatgtaggagtacgctgcatcgagatgctcattgagtcaaccggaatggttagcttacaccgccaaaatgctggcgtagtaggtcaagactctgagactatcgaactcgcacctgaatacgctgaggctatcgcaacccgtgcaggtgcgctggctggcatctctccgatgttccaaccttgcgtagttcctcctaagccgtggactggcattactggtggtggctattgggctgcggggcgcaaacccctgcagttagtacgtactcgcagtctggcggcgcttcgccgctatgaagaagtgtcgatgccggaggtcatcaaagcagtcaacattgcgcagaatacagcatggcgtgtgaacaagaaagttctcgacgtagcgaatgcaatcacccaatggcagcactgtccagtcgcggatgtgcctgcgatggatcgtggcgaaatgccagctcgtccgttggacatcgataccaacgagattgcacttaaagcgtggaagaaagaagcttccgcgttctaccgcaaagacaaagcacgcgttagccgtcgtctgtcaatggagtttatgttatctcaggcgaacaagtttgcgaattataaagcaatctggtttccgcaaaacatggattggcgtgggcgcgtgtacgctgtcccgatgttcaatcctcagggcaacgatatgacgaaaggcctgctgacctttgcgcagggtaaacccattggtgaagacggcttctattggctcaagattcatggcgcaaatacagctggagtggataaagtaccgtttccacaacgcatcaaatttgttgaggataaccatacgaatattatggaatgcgcgaaagcaccgctggaaaacacttggtgggcggaacaggactcgccgttctgttttctggcgttctgctttgagtatgctggcgtcatcaatcacggtctgtcgtacaactgtagcttgcctctggcatttgatggtagttgctccggcattcaacatttctcagcgatgttacgcgacgaaattggcggcaaagctgtgaatctcctcccatctgcggaagtgcaggatatttatcgtatcgtcagcgacaaagttaacgaggtactgaaacaagatctgattaacggtacctctaccaccttggaaacggtgactgataagaagacaggcgaaattaccgaacgcacgaaatacgggaccaaagttatggcacagtggtggttagaacacggtgtgaatcgtggcgtcacgaaacgctcggttatgactttggcgtatgggagcaaagagtttggattccgcgatcaagtgctgagtgacaccattcaaccggcgatcgataacggcaaaggtgacatgtttctgaatccgaatcaggctgctggttacatggcgaaactgatctggaacgcagtgtccgtcaccgtagtcgcagcagttgaggcgatgaactggctgaaaagtgcggcgaaattacttgctgctgaagtgaaggataagaagacggatacagttctgcgtggccgctgcgcagtacattgggtgactcccgacggcttccctgtgtggcaggaatacaagaagcctattcagacgcgcttgaacctgatgttcctcggtcagttccgcttacagcctaccattaacaccaacaaagatagcgagattgatgcacacaaacaggagtctggtatcgctcctaactttgtacacagccaagacggtaaccaccttcgtatgactgtagtgtgggcacacgagaagtacggaatcgaatcttttgcactgattcacgactccttcggtaccattccggctgacgctgcgaacctgttcaaagcagtgcgcgaaactatggtttcgacatatgagtcttgtgatgtactggctgatttctacgaccagttcgctgaccagttgcacgagtctcaattggacaaaatgccagcacttccggctaaaggtaacttgaacctccgtgacatcttaaaatcggacttcgcgttcgcg

SEQ ID NO: 212 - protein, 890 aa, synthetic construct
  REGION 1..890: note = Variant of RNA polymerase
MHHHHHHMNTINIAKNDFSDIELAAIPFNTLADHYGERLAREQLALEHESYEMGEARFRKMFERQLKAGEVADNAAAKPLILTLLPKMIARINDWFEEVKAKRGKRPTAFQFLQEIKPEAVAYITIKTTLACLTSADNTTVQAVASAIGRAIEDEARFGRIRDLEAKHFKKNVEEQLSKRVGHVYKKAFMQVVEADMLSKGLLGGEAWSSWHKEDSIHVGVRCIEMLIESTGMVSLHRQNAGVVGQDSETIELAPEYAEAIATRAGALAGISPMFQPCVVPPKPWTGITGGGYWAAGRKPLQLVRTRSLAALRRYEEVSMPEVIKAVNIAQNTAWRVNKKVLDVANAITQWQHCPVADVPAMDRGEMPARPLDIDTNEIALKAWKKEASAFYRKDKARVSRRLSMEFMLSQANKFANYKAIWFPQNMDWRGRVYAVPMFNPQGNDMTKGLLTFAQGKPIGEDGFYWLKIHGANTAGVDKVPFPQRIKFVEDNHTNIMECAKAPLENTWWAEQDSPFCFLAFCFEYAGVINHGLSYNCSLPLAFDGSCSGIQHFSAMLRDEIGGKAVNLLPSAEVQDIYRIVSDKVNEVLKQDLINGTSTTLETVTDKKTGEITERTKYGTKVMAQWWLEHGVNRGVTKRSVMTLAYGSKEFGFRDQVLSDTIQPAIDNGKGDMFLNPNQAAGYMAKLIWNAVSVTVVAAVEAMNWLKSAAKLLAAEVKDKKTDTVLRGRCAVHWVTPDGFPVWQEYKKPIQTRLNLMFLGQFRLQPTINTNKDSEIDAHKQESGIAPNFVHSQDGNHLRMTVVWAHEKYGIESFALIHDSFGTIPADAANLFKAVRETMVSTYESCDVLADFYDQFADQLHESQLDKMPALPAKGNLNLRDILKSDFAFA

SEQ ID NO: 213 - DNA, 2670 bp, synthetic construct
  misc_feature 1..2670: note = Variant of RNA polymerase
  source 1..2670: mol_type = other DNA
atgcaccatcaccatcaccatatgaacacgattaacatcgctaagaacgacttctctgacatcgaactggctgctatcccgttcaacactctggctgaccattacggtgagcgtttagctcgcgaacagttggcccttgagcatgagtcttacgagatgggtgaagcacgcttccgcaagatgtttgagcgtcaacttaaagctggtgaggttgcggataacgctgccgccaagcctctcatcactaccctactccctaagatgattgcacgcatcaacgactggtttgaggaagtgaaagctaagcgcggcaagcgcccgacagccttccagttcctgcaagaaatcaagccggaagccgtagcgtacatcaccattaagaccactctggcttgcctaaccagtgcggacaatacaaccgttcaggctgtagcaagcgcaatcggtcgggccattgaggacgaggctcgcttcggtcgtatccgtgaccttgaagctgatcacttcaagaaaaacgttgaggaacaactcaacaagcgcgtagggcacgtctacaagaaagcatttatgcaagttgtcgaggctgacatgctctctaagggtctactcggtggcgaggcgtggtcttcgtggcataaggaagactctattcatgtaggagtacgctgcatcgagatgctcattgagtcaaccggaatggttagcttacaccgccaaaatgctggcgtagtaggtcaagactctgagactatcgaactcgcacctgaatacgctgaggctatcgcaacccgtgcaggtgcgctggctggcatctctccgatgttccaaccttgcgtagttcctcctaagccgtggactggcattactggtggtggctattgggctgcggggcgcaaacccctgcagttagtacgtactcgcagtctggcggcgcttcgccgctatgaagaagtgtcgatgccggaggtcatcaaagcagtcaacattgcgcagaatacagcatggcgtgtgaacaagaaagttctcgacgtagcgaatgcaatcacccaatggcagcactgtccagtcgcggatgtgcctgcgatggatcgtggcgaaatgccagctcgtccgttggacatcgataccaacgagattgcacttaaagcgtggaagaaagaagcttccgcgttctaccgcaaagacaaagcacgcgttagccgtcgtctgtcaatggagtttatgttatctcaggcgaacaagtttgcgaattataaagcaatctggtttccgcaaaacatggattggcgtgggcgcgtgtacgctgtcccgatgttcaatcctcagggcaacgatatgacgaaaggcctgctgacctttgcgcagggtaaacccattggtgaagacggcttctattggctcaagattcatggcgcaaatacagctggagtggataaagtaccgtttccacaacgcatcaaatttgttgaggataaccatacgaatattatggaatgcgcgaaagcaccgctggaaaacacttggtgggcggaacaggactcgccgttctgttttctggcgttctgctttgagtatgctggcgtcatcaatcacggtctgtcgtacaactgtagcttgcctctggcatttgatggtagttgctccggcattcaacatttctcagcgatgttacgcgacgaaattggcggcaaagctgtgaatctcctcccatctgcggaagtgcaggatatttatcgtatcgtcagcgacaaagttaacgaggtactgaaacaagatctgattaacggtacctctaccaccttggaaacggtgactgataagaagacaggcgaaattaccgaacgcacgaaatacgggaccaaagttatggcacagtggtggttagaacacggtgtgaatcgtggcgtcacgaaacgctcggttatgactttggcgtatgggagcaaagagtttggattccgcgatcaagtgctgagtgacaccattcaaccggcgatcgataacggcaaaggtgacatgtttctgaatccgaatcaggctgctggttacatggcgaaactgatctggaacgcagtgtccgtcaccgtagtcgcagcagttgaggcgatgaactggctgaaaagtgcggcgaaattacttgctgctgaagtgaaggataagaagacggatacagttctgcgtggccgctgcgcagtacattgggtgactcccgacggcttccctgtgtggcaggaatacaagaagcctattcagacgcgcttgaacctgatgttcctcggtcagttccgcttacagcctaccattaacaccaacaaagatagcgagattgatgcacacaaacaggagtctggtatcgctcctaactttgtacacagccaagacggtaaccaccttcgtatgactgtagtgtgggcacacgagaagtacggaatcgaatcttttgcactgattcacgactccttcggtaccattccggctgacgctgcgaacctgttcaaagcagtgcgcgaaactatggtttcgacatatgagtcttgtgatgtactggctgatttctacgaccagttcgctgaccagttgcacgagtctcaattggacaaaatgccagcacttccggctaaaggtaacttgaacctccgtgacatcttaaaatcggacttcgcgttcgcg

SEQ ID NO: 214 - protein, 890 aa, synthetic construct
  REGION 1..890: note = Variant of RNA polymerase
MHHHHHHMNTINIAKNDFSDIELAAIPFNTLADHYGERLAREQLALEHESYEMGEARFRKMFERQLKAGEVADNAAAKPLITTLLPKMIARINDWFEEVKAKRGKRPTAFQFLQEIKPEAVAYITIKTTLACLTSADNTTVQAVASAIGRAIEDEARFGRIRDLEADHFKKNVEEQLNKRVGHVYKKAFMQVVEADMLSKGLLGGEAWSSWHKEDSIHVGVRCIEMLIESTGMVSLHRQNAGVVGQDSETIELAPEYAEAIATRAGALAGISPMFQPCVVPPKPWTGITGGGYWAAGRKPLQLVRTRSLAALRRYEEVSMPEVIKAVNIAQNTAWRVNKKVLDVANAITQWQHCPVADVPAMDRGEMPARPLDIDTNEIALKAWKKEASAFYRKDKARVSRRLSMEFMLSQANKFANYKAIWFPQNMDWRGRVYAVPMFNPQGNDMTKGLLTFAQGKPIGEDGFYWLKIHGANTAGVDKVPFPQRIKFVEDNHTNIMECAKAPLENTWWAEQDSPFCFLAFCFEYAGVINHGLSYNCSLPLAFDGSCSGIQHFSAMLRDEIGGKAVNLLPSAEVQDIYRIVSDKVNEVLKQDLINGTSTTLETVTDKKTGEITERTKYGTKVMAQWWLEHGVNRGVTKRSVMTLAYGSKEFGFRDQVLSDTIQPAIDNGKGDMFLNPNQAAGYMAKLIWNAVSVTVVAAVEAMNWLKSAAKLLAAEVKDKKTDTVLRGRCAVHWVTPDGFPVWQEYKKPIQTRLNLMFLGQFRLQPTINTNKDSEIDAHKQESGIAPNFVHSQDGNHLRMTVVWAHEKYGIESFALIHDSFGTIPADAANLFKAVRETMVSTYESCDVLADFYDQFADQLHESQLDKMPALPAKGNLNLRDILKSDFAFA

SEQ ID NO: 215 - DNA, 2670 bp, synthetic construct
  misc_feature 1..2670: note = Variant of RNA polymerase
  source 1..2670: mol_type = other DNA
atgcaccatcaccatcaccatatgaacacgattaacatcgctaagaacgacttctctgacatcgaactggctgctatcccgttcaacactctggctgaccattacggtgagcgtttagctcgcgaacagttggcccttgagcatgagtcttacgagatgggtgaagcacgcttccgcaagatgtttgagcgtcaacttaaagctggtgaggttgcggataacgctgccgccaagcctctcatcactaccctactccctaagatgattgcacgcatcaacgactggtttgaggaagtgaaagctaagcgcggcaagcgcccgacagccttccagttcctgcaagaaatcaagccggaagccgtagcgtacatcaccattaagaccactctggcttgcctaaccagtgcggacaatacaaccgttcaggctgtagcaagcgcaatcggtcgggccattgaggacgaggctcgcttcggtcgtatccgtgaccttgaagctaagcacttcaagaaaaacgttgaggaacaactcaacaagcgcgtagggcacgtctacaataaagcatttatgcaagttgtcgaggctgacatgctctctaagggtctactcggtggcgaggcgtggtcttcgtggcataaggaagactctattcatgtaggagtacgctgcatcgagatgctcattgagtcaaccggaatggttagcttacaccgccaaaatgctggcgtagtaggtcaagactctgagactatcgaactcgcacctgaatacgctgaggctatcgcaacccgtgcaggtgcgctggctggcatctctccgatgttccaaccttgcgtagttcctcctaagccgtggactggcattactggtggtggctattgggctgcggggcgcaaacccctgcagttagtacgtactcgcagtctggcggcgcttcgccgctatgaagaagtgtcgatgccggaggtcatcaaagcagtcaacattgcgcagaatacagcatggcgtgtgaacaagaaagttctcgacgtagcgaatgcaatcacccaatggcagcactgtccagtcgcggatgtgcctgcgatggatcgtggcgaaatgccagctcgtccgttggacatcgataccaacgagattgcacttaaagcgtggaagaaagaagcttccgcgttctaccgcaaagacaaagcacgcgttagccgtcgtctgtcaatggagtttatgttatctcaggcgaacaagtttgcgaattataaagcaatctggtttccgcaaaacatggattggcgtgggcgcgtgtacgctgtcccgatgttcaatcctcagggcaacgatatgacgaaaggcctgctgacctttgcgcagggtaaacccattggtgaagacggcttctattggctcaagattcatggcgcaaatacagctggagtggataaagtaccgtttccacaacgcatcaaatttgttgaggataaccatacgaatattatggaatgcgcgaaagcaccgctggaaaacacttggtgggcggaacaggactcgccgttctgttttctggcgttctgctttgagtatgctggcgtcatcaatcacggtctgtcgtacaactgtagcttgcctctggcatttgatggtagttgctccggcattcaacatttctcagcgatgttacgcgacgaaattggcggcaaagctgtgaatctcctcccatctgcggaagtgcaggatatttatcgtatcgtcagcgacaaagttaacgaggtactgaaacaagatctgattaacggtacctctaccaccttggaaacggtgactgataagaagacaggcgaaattaccgaacgcacgaaatacgggaccaaagttatggcacagtggtggttagaacacggtgtgaatcgtggcgtcacgaaacgctcggttatgactttggcgtatgggagcaaagagtttggattccgcgatcaagtgctgagtgacaccattcaaccggcgatcgataacggcaaaggtgacatgtttctgaatccgaatcaggctgctggttacatggcgaaactgatctggaacgcagtgtccgtcaccgtagtcgcagcagttgaggcgatgaactggctgaaaagtgcggcgaaattacttgctgctgaagtgaaggataagaagacggatacagttctgcgtggccgctgcgcagtacattgggtgactcccgacggcttccctgtgtggcaggaatacaagaagcctattcagacgcgcttgaacctgatgttcctcggtcagttccgcttacagcctaccattaacaccaacaaagatagcgagattgatgcacacaaacaggagtctggtatcgctcctaactttgtacacagccaagacggtaaccaccttcgtatgactgtagtgtgggcacacgagaagtacggaatcgaatcttttgcactgattcacgactccttcggtaccattccggctgacgctgcgaacctgttcaaagcagtgcgcgaaactatggtttcgacatatgagtcttgtgatgtactggctgatttctacgaccagttcgctgaccagttgcacgagtctcaattggacaaaatgccagcacttccggctaaaggtaacttgaacctccgtgacatcttaaaatcggacttcgcgttcgcg

SEQ ID NO: 216 - protein, 890 aa, synthetic construct
  REGION 1..890: note = Variant of RNA polymerase
MHHHHHHMNTINIAKNDFSDIELAAIPFNTLADHYGERLAREQLALEHESYEMGEARFRKMFERQLKAGEVADNAAAKPLITTLLPKMIARINDWFEEVKAKRGKRPTAFQFLQEIKPEAVAYITIKTTLACLTSADNTTVQAVASAIGRAIEDEARFGRIRDLEAKHFKKNVEEQLNKRVGHVYNKAFMQVVEADMLSKGLLGGEAWSSWHKEDSIHVGVRCIEMLIESTGMVSLHRQNAGVVGQDSETIELAPEYAEAIATRAGALAGISPMFQPCVVPPKPWTGITGGGYWAAGRKPLQLVRTRSLAALRRYEEVSMPEVIKAVNIAQNTAWRVNKKVLDVANAITQWQHCPVADVPAMDRGEMPARPLDIDTNEIALKAWKKEASAFYRKDKARVSRRLSMEFMLSQANKFANYKAIWFPQNMDWRGRVYAVPMFNPQGNDMTKGLLTFAQGKPIGEDGFYWLKIHGANTAGVDKVPFPQRIKFVEDNHTNIMECAKAPLENTWWAEQDSPFCFLAFCFEYAGVINHGLSYNCSLPLAFDGSCSGIQHFSAMLRDEIGGKAVNLLPSAEVQDIYRIVSDKVNEVLKQDLINGTSTTLETVTDKKTGEITERTKYGTKVMAQWWLEHGVNRGVTKRSVMTLAYGSKEFGFRDQVLSDTIQPAIDNGKGDMFLNPNQAAGYMAKLIWNAVSVTVVAAVEAMNWLKSAAKLLAAEVKDKKTDTVLRGRCAVHWVTPDGFPVWQEYKKPIQTRLNLMFLGQFRLQPTINTNKDSEIDAHKQESGIAPNFVHSQDGNHLRMTVVWAHEKYGIESFALIHDSFGTIPADAANLFKAVRETMVSTYESCDVLADFYDQFADQLHESQLDKMPALPAKGNLNLRDILKSDFAFA

SEQ ID NO: 217 - DNA, 2670 bp, synthetic construct
  misc_feature 1..2670: note = Variant of RNA polymerase
  source 1..2670: mol_type = other DNA
atgcaccatcaccatcaccatatgaacacgattaacatcgctaagaacgacttctctgacatcgaactggctgctatcccgttcaacactctggctgaccattacggtgagcgtttagctcgcgaacagttggcccttgagcatgagtcttacgagatgggtgaagcacgcttccgcaagatgtttgagcgtcaacttaaagctggtgaggttgcggataacgctgccgccaagcctctcatcactaccctactccctaagatgattgcacgcatcaacgactggtttgaggaagtgaaagctaagcgcggcaagcgcccgacagccttccagttcctgcaagaaatcaagccggaagccgtagcgtacatcaccattaagaccactctggcttgcctaaccagtgcggacaatacaaccgttcaggctgtagcaagcgcaatcggtcgggccattgaggacgaggctcgcttcggtcgtatccgtgaccttgaagctaagcacttcaagaaaaacgttgaggaacaactcaacaagcgcgtagggcacgtctacaagaaagcatttatgcaagttgtcgaggctgacatgctctctaagggtctactcggtggcgaggcgtggtcttcgtggcataaggaagactctattcatgtaggagtacgctgcatcgagatgctcattgagtcaaccggaatggttagcttacaccgccaaaatgctggcgtagtaggtcaagactctgagactatcgaactcgcacctgaatacgctgaggctatcgcaacccgtgcaggtgcgctggctggcatctctccgatgttccaaccttgcgtagttcctcctaagccgtggactggcattactggtggtggctattgggctgcggggcgcaaacccctgcagttagtacgtactcgcagtctggcggcgcttcgccgctatgaagaagtgtcgatgccggaggtcatcaaagcagtcaacattgcgcagaatacagcatggcgtgtgaacaagactgttctcgacgtagcgaatgcaatcacccaatggcagcactgtccagtcgcggatgtgcctgcgatggatcgtggcgaaatgccagctcgtccgttggacatcgataccaacgagattgcacttaaagcgtggaagaaagaagcttccgcgttctaccgcaaagacaaagcacgcgttagccgtcgtctgtcaatggagtttatgttatctcaggcgaacaagtttgcgaattataaagcaatctggtttccgcaaaacatggattggcgtgggcgcgtgtacgctgtcccgatgttcaatcctcagggcaacgatatgacgaaaggcctgctgacctttgcgcagggtaaacccattggtgaagacggcttctattggctcaagattcatggcgcaaatacagctggagtggataaagtaccgtttccacaacgcatcaaatttgttgaggataaccatacgaatattatggaatgcgcgaaagcaccgctggaaaacacttggtgggcggaacaggactcgccgttctgttttctggcgttctgctttgagtatgctggcgtcatcaatcacggtctgtcgtacaactgtagcttgcctctggcatttgatggtagttgctccggcattcaacatttctcagcgatgttacgcgacgaaattggcggcaaagctgtgaatctcctcccatctgcggaagtgcaggatatttatcgtatcgtcagcgacaaagttaacgaggtactgaaacaagatctgattaacggtacctctaccaccttggaaacggtgactgataagaagacaggcgaaattaccgaacgcacgaaatacgggaccaaagttatggcacagtggtggttagaacacggtgtgaatcgtggcgtcacgaaacgctcggttatgactttggcgtatgggagcaaagagtttggattccgcgatcaagtgctgagtgacaccattcaaccggcgatcgataacggcaaaggtgacatgtttctgaatccgaatcaggctgctggttacatggcgaaactgatctggaacgcagtgtccgtcaccgtagtcgcagcagttgaggcgatgaactggctgaaaagtgcggcgaaattacttgctgctgaagtgaaggataagaagacggatacagttctgcgtggccgctgcgcagtacattgggtgactcccgacggcttccctgtgtggcaggaatacaagaagcctattcagacgcgcttgaacctgatgttcctcggtcagttccgcttacagcctaccattaacaccaacaaagatagcgagattgatgcacacaaacaggagtctggtatcgctcctaactttgtacacagccaagacggtaaccaccttcgtatgactgtagtgtgggcacacgagaagtacggaatcgaatcttttgcactgattcacgactccttcggtaccattccggctgacgctgcgaacctgttcaaagcagtgcgcgaaactatggtttcgacatatgagtcttgtgatgtactggctgatttctacgaccagttcgctgaccagttgcacgagtctcaattggacaaaatgccagcacttccggctaaaggtaacttgaacctccgtgacatcttaaaatcggacttcgcgttcgcg

SEQ ID NO: 218 - protein, 890 aa, synthetic construct
  REGION 1..890: note = Variant of RNA polymerase
MHHHHHHMNTINIAKNDFSDIELAAIPFNTLADHYGERLAREQLALEHESYEMGEARFRKMFERQLKAGEVADNAAAKPLITTLLPKMIARINDWFEEVKAKRGKRPTAFQFLQEIKPEAVAYITIKTTLACLTSADNTTVQAVASAIGRAIEDEARFGRIRDLEAKHFKKNVEEQLNKRVGHVYKKAFMQVVEADMLSKGLLGGEAWSSWHKEDSIHVGVRCIEMLIESTGMVSLHRQNAGVVGQDSETIELAPEYAEAIATRAGALAGISPMFQPCVVPPKPWTGITGGGYWAAGRKPLQLVRTRSLAALRRYEEVSMPEVIKAVNIAQNTAWRVNKTVLDVANAITQWQHCPVADVPAMDRGEMPARPLDIDTNEIALKAWKKEASAFYRKDKARVSRRLSMEFMLSQANKFANYKAIWFPQNMDWRGRVYAVPMFNPQGNDMTKGLLTFAQGKPIGEDGFYWLKIHGANTAGVDKVPFPQRIKFVEDNHTNIMECAKAPLENTWWAEQDSPFCFLAFCFEYAGVINHGLSYNCSLPLAFDGSCSGIQHFSAMLRDEIGGKAVNLLPSAEVQDIYRIVSDKVNEVLKQDLINGTSTTLETVTDKKTGEITERTKYGTKVMAQWWLEHGVNRGVTKRSVMTLAYGSKEFGFRDQVLSDTIQPAIDNGKGDMFLNPNQAAGYMAKLIWNAVSVTVVAAVEAMNWLKSAAKLLAAEVKDKKTDTVLRGRCAVHWVTPDGFPVWQEYKKPIQTRLNLMFLGQFRLQPTINTNKDSEIDAHKQESGIAPNFVHSQDGNHLRMTVVWAHEKYGIESFALIHDSFGTIPADAANLFKAVRETMVSTYESCDVLADFYDQFADQLHESQLDKMPALPAKGNLNLRDILKSDFAFA

SEQ ID NO: 219 - DNA, 2670 bp, synthetic construct
  misc_feature 1..2670: note = Variant of RNA polymerase
  source 1..2670: mol_type = other DNA
atgcaccatcaccatcaccatatgaacacgattaacatcgctaagaacgacttctctgacatcgaactggctgctatcccgttcaacactctggctgaccattacggtgagcgtttagctcgcgaacagttggcccttgagcatgagtcttacgagatgggtgaagcacgcttccgcaagatgtttgagcgtcaacttaaagctggtgaggttgcggataacgctgccgccaagcctctcatcactaccctactccctaagatgattgcacgcatcaacgactggtttgaggaagtgaaagctaagcgcggcaagcgcccgacagccttccagttcctgcaagaaatcaagccggaagccgtagcgtacatcaccattaagaccactctggcttgcctaaccagtgcggacaatacaaccgttcaggctgtagcaagcgcaatcggtcgggccattgaggacgaggctcgcttcggtcgtatccgtgaccttgaagctaagcacttcaagaaaaacgttgaggaacaactcaacaagcgcgtagggcacgtctacaagaaagcaaagatgcaagttgtcgaggctgacatgctctctaagggtctactcggtggcgaggcgtggtcttcgtggcataaggaagactctattcatgtaggagtacgctgcatcgagatgctcattgagtcaaccggaatggttagcttacaccgccaaaatgctggcgtagtaggtcaagactctgagactatcgaactcgcacctgaatacgctgaggctatcgcaacccgtgcaggtgcgctggctggcatctctccgatgttccaaccttgcgtagttcctcctaagccgtggactggcattactggtggtggctattgggctgcggggcgcaaacccctgcagttagtacgtactcgcagtctggcggcgcttcgccgctatgaagaagtgtcgatgccggaggtcatcaaagcagtcaacattgcgcagaatacagcatggcgtgtgaacaagaaagttctcgacgtagcgaatgcaatcacccaatggcagcactgtccagtcgcggatgtgcctgcgatggatcgtggcgaaatgccagctcgtccgttggacatcgataccaacgagattgcacttaaagcgtggaagaaagaagcttccgcgttctaccgcaaagacaaagcacgcgttagccgtcgtctgtcaatggagtttatgttatctcaggcgaacaagtttgcgaattataaagcaatctggtttccgcaaaacatggattggcgtgggcgcgtgtacgctgtcccgatgttcaatcctcagggcaacgatatgacgaaaggcctgctgacctttgcgcagggtaaacccattggtgaagacggcttctattggctcaagattcatggcgcaaatacagctggagtggataaagtaccgtttccacaacgcatcaaatttgttgaggataaccatacgaatattatggaatgcgcgaaagcaccgctggaaaacacttggtgggcggaacaggactcgccgttctgttttctggcgttctgctttgagtatgctggcgtcatcaatcacggtctgtcgtacaactgtagcttgcctctggcatttgatggtagttgctccggcattcaacatttctcagcgatgttacgcgacgaaattggcggcaaagctgtgaatctcctcccatctgcggaagtgcaggatatttatcgtatcgtcagcgacaaagttaacgaggtactgaaacaagatctgattaacggtacctctaccaccttggaaacggtgactgataagaagacaggcgaaattaccgaacgcacgaaatacgggaccaaagttatggcacagtggtggttagaacacggtgtgaatcgtggcgtcacgaaacgctcggttatgactttggcgtatgggagcaaagagtttggattccgcgatcaagtgctgagtgacaccattcaaccggcgatcgataacggcaaaggtgacatgtttctgaatccgaatcaggctgctggttacatggcgaaactgatctggaacgcagtgtccgtcaccgtagtcgcagcagttgaggcgatgaactggctgaaaagtgcggcgaaattacttgctgctgaagtgaaggataagaagacggatacagttctgcgtggccgctgcgcagtacattgggtgactcccgacggcttccctgtgtggcaggaatacaagaagcctattcagacgcgcttgaacctgatgttcctcggtcagttccgcttacagcctaccattaacaccaacaaagatagcgagattgatgcacacaaacaggagtctggtatcgctcctaactttgtacacagccaagacggtaaccaccttcgtatgactgtagtgtgggcacacgagaagtacggaatcgaatcttttgcactgattcacgactccttcggtaccattccggctgacgctgcgaacctgttcaaagcagtgcgcgaaactatggtttcgacatatgagtcttgtgatgtactggctgatttctacgaccagttcgctgaccagttgcacgagtctcaattggacaaaatgccagcacttccggctaaaggtaacttgaacctccgtgacatcttaaaatcggacttcgcgttcgcg

SEQ ID NO: 220 - protein, 890 aa, synthetic construct
  REGION 1..890: note = Variant of RNA polymerase
MHHHHHHMNTINIAKNDFSDIELAAIPFNTLADHYGERLAREQLALEHESYEMGEARFRKMFERQLKAGEVADNAAAKPLITTLLPKMIARINDWFEEVKAKRGKRPTAFQFLQEIKPEAVAYITIKTTLACLTSADNTTVQAVASAIGRAIEDEARFGRIRDLEAKHFKKNVEEQLNKRVGHVYKKAKMQVVEADMLSKGLLGGEAWSSWHKEDSIHVGVRCIEMLIESTGMVSLHRQNAGVVGQDSETIELAPEYAEAIATRAGALAGISPMFQPCVVPPKPWTGITGGGYWAAGRKPLQLVRTRSLAALRRYEEVSMPEVIKAVNIAQNTAWRVNKKVLDVANAITQWQHCPVADVPAMDRGEMPARPLDIDTNEIALKAWKKEASAFYRKDKARVSRRLSMEFMLSQANKFANYKAIWFPQNMDWRGRVYAVPMFNPQGNDMTKGLLTFAQGKPIGEDGFYWLKIHGANTAGVDKVPFPQRIKFVEDNHTNIMECAKAPLENTWWAEQDSPFCFLAFCFEYAGVINHGLSYNCSLPLAFDGSCSGIQHFSAMLRDEIGGKAVNLLPSAEVQDIYRIVSDKVNEVLKQDLINGTSTTLETVTDKKTGEITERTKYGTKVMAQWWLEHGVNRGVTKRSVMTLAYGSKEFGFRDQVLSDTIQPAIDNGKGDMFLNPNQAAGYMAKLIWNAVSVTVVAAVEAMNWLKSAAKLLAAEVKDKKTDTVLRGRCAVHWVTPDGFPVWQEYKKPIQTRLNLMFLGQFRLQPTINTNKDSEIDAHKQESGIAPNFVHSQDGNHLRMTVVWAHEKYGIESFALIHDSFGTIPADAANLFKAVRETMVSTYESCDVLADFYDQFADQLHESQLDKMPALPAKGNLNLRDILKSDFAFA

SEQ ID NO: 221 - DNA, 2670 bp, synthetic construct
  misc_feature 1..2670: note = Variant of RNA polymerase
  source 1..2670: mol_type = other DNA
atgcaccatcaccatcaccatatgaacacgattaacatcgctaagaacgacttctctgacatcgaactggctgctatcccgttcaacactctggctgaccattacggtgagcgtttagctcgcgaacagttggcccttgagcatgagtcttacgagatgggtgaagcacgcttccgcaagatgtttgagcgtcaacttaaagctggtgaggttgcggataacgctgccgccaagcctctcatcactaccctactccctaagatgattgcacgcatcaacgactggtttgaggaagtgaaagctaagcgcggcaagcgcccgacagccttccagttcctgcaagaaatcaagccggaagccgtagcgtacatcaccattaagaccactctggcttgcctaaccagtgcggacaatacaaccgttcaggctgtagcaagcgcaatcggtcgggccattgaggacgaggctcgcttcggtcgtatccgtgaccttgaagctaagcacttcaagaaaaacgttgaggaacaactcaacgatcgcgtagggcacgtctacaagaaagcatttatgcaagttgtcgaggctgacatgctctctaagggtctactcggtggcgaggcgtggtcttcgtggcataaggaagactctattcatgtaggagtacgctgcatcgagatgctcattgagtcaaccggaatggttagcttacaccgccaaaatgctggcgtagtaggtcaagactctgagactatcgaactcgcacctgaatacgctgaggctatcgcaacccgtgcaggtgcgctggctggcatctctccgatgttccaaccttgcgtagttcctcctaagccgtggactggcattactggtggtggctattgggctgcggggcgcaaacccctgcagttagtacgtactcgcagtctggcggcgcttcgccgctatgaagaagtgtcgatgccggaggtcatcaaagcagtcaacattgcgcagaatacagcatggcgtgtgaacaagaaagttctcgacgtagcgaatgcaatcacccaatggcagcactgtccagtcgcggatgtgcctgcgatggatcgtggcgaaatgccagctcgtccgttggacatcgataccaacgagattgcacttaaagcgtggaagaaagaagcttccgcgttctaccgcaaagacaaagcacgcgttagccgtcgtctgtcaatggagtttatgttatctcaggcgaacaagtttgcgaattataaagcaatctggtttccgcaaaacatggattggcgtgggcgcgtgtacgctgtcccgatgttcaatcctcagggcaacgatatgacgaaaggcctgctgacctttgcgcagggtaaacccattggtgaagacggcttctattggctcaagattcatggcgcaaatacagctggagtggataaagtaccgtttccacaacgcatcaaatttgttgaggataaccatacgaatattatggaatgcgcgaaagcaccgctggaaaacacttggtgggcggaacaggactcgccgttctgttttctggcgttctgctttgagtatgctggcgtcatcaatcacggtctgtcgtacaactgtagcttgcctctggcatttgatggtagttgctccggcattcaacatttctcagcgatgttacgcgacgaaattggcggcaaagctgtgaatctcctcccatctgcggaagtgcaggatatttatcgtatcgtcagcgacaaagttaacgaggtactgaaacaagatctgattaacggtacctctaccaccttggaaacggtgactgataagaagacaggcgaaattaccgaacgcacgaaatacgggaccaaagttatggcacagtggtggttagaacacggtgtgaatcgtggcgtcacgaaacgctcggttatgactttggcgtatgggagcaaagagtttggattccgcgatcaagtgctgagtgacaccattcaaccggcgatcgataacggcaaaggtgacatgtttctgaatccgaatcaggctgctggttacatggcgaaactgatctggaacgcagtgtccgtcaccgtagtcgcagcagttgaggcgatgaactggctgaaaagtgcggcgaaattacttgctgctgaagtgaaggataagaagacggatacagttctgcgtggccgctgcgcagtacattgggtgactcccgacggcttccctgtgtggcaggaatacaagaagcctattcagacgcgcttgaacctgatgttcctcggtcagttccgcttacagcctaccattaacaccaacaaagatagcgagattgatgcacacaaacaggagtctggtatcgctcctaactttgtacacagccaagacggtaaccaccttcgtatgactgtagtgtgggcacacgagaagtacggaatcgaatcttttgcactgattcacgactccttcggtaccattccggctgacgctgcgaacctgttcaaagcagtgcgcgaaactatggtttcgacatatgagtcttgtgatgtactggctgatttctacgaccagttcgctgaccagttgcacgagtctcaattggacaaaatgccagcacttccggctaaaggtaacttgaacctccgtgacatcttaaaatcggacttcgcgttcgcg

SEQ ID NO: 222 - protein, 890 aa, synthetic construct
  REGION 1..890: note = Variant of RNA polymerase
MHHHHHHMNTINIAKNDFSDIELAAIPFNTLADHYGERLAREQLALEHESYEMGEARFRKMFERQLKAGEVADNAAAKPLITTLLPKMIARINDWFEEVKAKRGKRPTAFQFLQEIKPEAVAYITIKTTLACLTSADNTTVQAVASAIGRAIEDEARFGRIRDLEAKHFKKNVEEQLNDRVGHVYKKAFMQVVEADMLSKGLLGGEAWSSWHKEDSIHVGVRCIEMLIESTGMVSLHRQNAGVVGQDSETIELAPEYAEAIATRAGALAGISPMFQPCVVPPKPWTGITGGGYWAAGRKPLQLVRTRSLAALRRYEEVSMPEVIKAVNIAQNTAWRVNKKVLDVANAITQWQHCPVADVPAMDRGEMPARPLDIDTNEIALKAWKKEASAFYRKDKARVSRRLSMEFMLSQANKFANYKAIWFPQNMDWRGRVYAVPMFNPQGNDMTKGLLTFAQGKPIGEDGFYWLKIHGANTAGVDKVPFPQRIKFVEDNHTNIMECAKAPLENTWWAEQDSPFCFLAFCFEYAGVINHGLSYNCSLPLAFDGSCSGIQHFSAMLRDEIGGKAVNLLPSAEVQDIYRIVSDKVNEVLKQDLINGTSTTLETVTDKKTGEITERTKYGTKVMAQWWLEHGVNRGVTKRSVMTLAYGSKEFGFRDQVLSDTIQPAIDNGKGDMFLNPNQAAGYMAKLIWNAVSVTVVAAVEAMNWLKSAAKLLAAEVKDKKTDTVLRGRCAVHWVTPDGFPVWQEYKKPIQTRLNLMFLGQFRLQPTINTNKDSEIDAHKQESGIAPNFVHSQDGNHLRMTVVWAHEKYGIESFALIHDSFGTIPADAANLFKAVRETMVSTYESCDVLADFYDQFADQLHESQLDKMPALPAKGNLNLRDILKSDFAFA

SEQ ID NO: 223 - DNA, 2670 bp, synthetic construct
  misc_feature 1..2670: note = Variant of RNA polymerase
  source 1..2670: mol_type = other DNA
atgcaccatcaccatcaccatatgaacacgattaacatcgctaagaacgacttctctgacatcgaactggctgctatcccgttcaacactctggctgaccattacggtgagcgtttagctcgcgaacagttggcccttgagcatgagtcttacgagatgggtgaagcacgcttccgcaagatgtttgagcgtcaacttaaagctggtgaggttgcggataacgctgccgccaagcctctcatcactaccctactccctaagatgattgcacgcatcaacgactggtttgaggaagtgaaagctaagcgcggcaagcgcccgacagccttccagttcctgcaagaaatcaagccggaagccgtagcgtacatcaccattaagaccactctggcttgcctaaccagtgcggacaatacaaccgttcaggctgtagcaagcgcaatcggtcgggccattgaggacgaggctcgcttcggtcgtatccgtgaccttgaagctaagcacttcaagaaaaacgttgaggaacaactcaacaagcgcgtagggcacgtctacaagaaagcatttatgcaagttgtcgaggctgacatgctctctaagggtctactcggtggcgaggcgtggtcttcgtggcataaggaagactctattcatgtaggagtacgctgcatcgagatgctcattgagtcaaccggaatggttagcttacaccgccaaaatgctggcgtagtaggtcaagactctgagactatcgaactcgcacctgaatacgctgaggctatcgcaacccgtgcaggtgcgctggctggcatctctccgatgttccaaccttgcgtagttcctcctaagccgtggactggcattactggtggtggctattgggctgcggggcgcaaacccctgcagttagtacgtactcgcagtctggcggcgcttcgccgctatgaagaagtgtcgatgccggaggtcatcaaagcagtcaacattgcgcagaatacagcatggcgtgtgaacaagaaagttctcgacgtagcgaatgcaatcacccaatggcagcactgtccagtcgcggatgtgcctgcgatggatcgtggcgaaatgccagctcgtccgttggacatcgataccaacgagattgcacttaaagcgtggaagaaagaagcttccgcgttctaccgcaaagacaaagcacgcgttagccgtcgtctgtcaatggagtttatgttatctcaggcgaacaagtttgcgaattataaagcaatctggtttccgcaaaacatggattggcgtgggcgcgtgtacgctgtcccgatgttcaatcctcagggcaacgatatgacgaaaggcctgctgacctttgcgcagggtaaacccattggtgaagacggcttctattggctcaagattcatggcgcaaatacagctggagtggataaagtaccgtttccacaacgcatcaaatttgttgaggataaccatacgaatattatggaatgcgcgaaagcaccgctggaaaacacttggtgggcggaacaggactcgccgttctgttttctggcgttctgctttgagtatgctggcgtcatcaatcacggtctgtcgtacaactgtagcttgcctctggcatttgatggtagttgctccggcattcaacatttctcagcgatgttacgcgacgaaattggcggcaaagctgtgaatctcctcccatctgcggaagtgcaggatatttatcgtatcgtcagcgacaaagttaacgaggtactgaaacaagatctgattaacggtacctctaccaccttggaaacggtgactgataagaagacaggcgaaattaccgaacgcacgaaatacgggaccaaagttatggcacagtggtggttagaacacggtgtgaatcgtggcgtcacgaaacgctcggttatgactttggcgtatgggagcaaagagtttggattccgcgatcaagtgctgagtgacaccattcaaccggcgatcgataacggcaaaggtgacatgtttctgaatccgaatcaggctgctggttacatggcgaaactgatctggaacgcagtgtccgtcaccgtagtcgcagcagttgaggcgatgaactggctgaaaagtgcggcgaaattacttgctgctgaagtgaaggatgagaagacggatacagttctgcgtggccgctgcgcagtacattgggtgactcccgacggcttccctgtgtggcaggaatacaagaagcctattcagacgcgcttgaacctgatgttcctcggtcagttccgcttacagcctaccattaacaccaacaaagatagcgagattgatgcacacaaacaggagtctggtatcgctcctaactttgtacacagccaagacggtaaccaccttcgtatgactgtagtgtgggcacacgagaagtacggaatcgaatcttttgcactgattcacgactccttcggtaccattccggctgacgctgcgaacctgttcaaagcagtgcgcgaaactatggtttcgacatatgagtcttgtgatgtactggctgatttctacgaccagttcgctgaccagttgcacgagtctcaattggacaaaatgccagcacttccggctaaaggtaacttgaacctccgtgacatcttaaaatcggacttcgcgttcgcg

SEQ ID NO: 224 - protein, 890 aa, synthetic construct
  REGION 1..890: note = Variant of RNA polymerase
MHHHHHHMNTINIAKNDFSDIELAAIPFNTLADHYGERLAREQLALEHESYEMGEARFRKMFERQLKAGEVADNAAAKPLITTLLPKMIARINDWFEEVKAKRGKRPTAFQFLQEIKPEAVAYITIKTTLACLTSADNTTVQAVASAIGRAIEDEARFGRIRDLEAKHFKKNVEEQLNKRVGHVYKKAFMQVVEADMLSKGLLGGEAWSSWHKEDSIHVGVRCIEMLIESTGMVSLHRQNAGVVGQDSETIELAPEYAEAIATRAGALAGISPMFQPCVVPPKPWTGITGGGYWAAGRKPLQLVRTRSLAALRRYEEVSMPEVIKAVNIAQNTAWRVNKKVLDVANAITQWQHCPVADVPAMDRGEMPARPLDIDTNEIALKAWKKEASAFYRKDKARVSRRLSMEFMLSQANKFANYKAIWFPQNMDWRGRVYAVPMFNPQGNDMTKGLLTFAQGKPIGEDGFYWLKIHGANTAGVDKVPFPQRIKFVEDNHTNIMECAKAPLENTWWAEQDSPFCFLAFCFEYAGVINHGLSYNCSLPLAFDGSCSGIQHFSAMLRDEIGGKAVNLLPSAEVQDIYRIVSDKVNEVLKQDLINGTSTTLETVTDKKTGEITERTKYGTKVMAQWWLEHGVNRGVTKRSVMTLAYGSKEFGFRDQVLSDTIQPAIDNGKGDMFLNPNQAAGYMAKLIWNAVSVTVVAAVEAMNWLKSAAKLLAAEVKDEKTDTVLRGRCAVHWVTPDGFPVWQEYKKPIQTRLNLMFLGQFRLQPTINTNKDSEIDAHKQESGIAPNFVHSQDGNHLRMTVVWAHEKYGIESFALIHDSFGTIPADAANLFKAVRETMVSTYESCDVLADFYDQFADQLHESQLDKMPALPAKGNLNLRDILKSDFAFA

SEQ ID NO: 225 - DNA, 2670 bp, synthetic construct
  misc_feature 1..2670: note = Variant of RNA polymerase
  source 1..2670: mol_type = other DNA
atgcaccatcaccatcaccatatgaacacgattaacatcgctaagaacgacttctctgacatcgaactggctgctatcccgttcaacactctggctgaccattacggtgagcgtttagctcgcgaacagttggcccttgagcatgagtcttacgagatgggtgaagcacgcttccgcaagtgttttgagcgtcaacttaaagctggtgaggttgcggataacgctgccgccaagcctctcatcactaccctactccctaagatgattgcacgcatcaacgactggtttgaggaagtgaaagctaagcgcggcaagcgcccgacagccttccagttcctgcaagaaatcaagccggaagccgtagcgtacatcaccattaagaccactctggcttgcctaaccagtgcggacaatacaaccgttcaggctgtagcaagcgcaatcggtcgggccattgaggacgaggctcgcttcggtcgtatccgtgaccttgaagctaagcacttcaagaaaaacgttgaggaacaactcaacaagcgcgtagggcacgtctacaagaaagcatttatgcaagttgtcgaggctgacatgctctctaagggtctactcggtggcgaggcgtggtcttcgtggcataaggaagactctattcatgtaggagtacgctgcatcgagatgctcattgagtcaaccggaatggttagcttacaccgccaaaatgctggcgtagtaggtcaagactctgagactatcgaactcgcacctgaatacgctgaggctatcgcaacccgtgcaggtgcgctggctggcatctctccgatgttccaaccttgcgtagttcctcctaagccgtggactggcattactggtggtggctattgggctgcggggcgcaaacccctgcagttagtacgtactcgcagtctggcggcgcttcgccgctatgaagaagtgtcgatgccggaggtcatcaaagcagtcaacattgcgcagaatacagcatggcgtgtgaacaagaaagttctcgacgtagcgaatgcaatcacccaatggcagcactgtccagtcgcggatgtgcctgcgatggatcgtggcgaaatgccagctcgtccgttggacatcgataccaacgagattgcacttaaagcgtggaagaaagaagcttccgcgttctaccgcaaagacaaagcacgcgttagccgtcgtctgtcaatggagtttatgttatctcaggcgaacaagtttgcgaattataaagcaatctggtttccgcaaaacatggattggcgtgggcgcgtgtacgctgtcccgatgttcaatcctcagggcaacgatatgacgaaaggcctgctgacctttgcgcagggtaaacccattggtgaagacggcttctattggctcaagattcatggcgcaaatacagctggagtggataaagtaccgtttccacaacgcatcaaatttgttgaggataaccatacgaatattatggaatgcgcgaaagcaccgctggaaaacacttggtgggcggaacaggactcgccgttctgttttctggcgttctgctttgagtatgctggcgtcatcaatcacggtctgtcgtacaactgtagcttgcctctggcatttgatggtagttgctccggcattcaacatttctcagcgatgttacgcgacgaaattggcggcaaagctgtgaatctcctcccatctgcggaagtgcaggatatttatcgtatcgtcagcgacaaagttaacgaggtactgaaacaagatctgattaacggtacctctaccaccttggaaacggtgactgataagaagacaggcgaaattaccgaacgcacgaaatacgggaccaaagttatggcacagtggtggttagaacacggtgtgaatcgtggcgtcacgaaacgctcggttatgactttggcgtatgggagcaaagagtttggattccgcgatcaagtgctgagtgacaccattcaaccggcgatcgataacggcaaaggtgacatgtttctgaatccgaatcaggctgctggttacatggcgaaactgatctggaacgcagtgtccgtcaccgtagtcgcagcagttgaggcgatgaactggctgaaaagtgcggcgaaattacttgctgctgaagtgaaggataagaagacggatacagttctgcgtggccgctgcgcagtacattgggtgactcccgacggcttccctgtgtggcaggaatacaagaagcctattcagacgcgcttgaacctgatgttcctcggtcagttccgcttacagcctaccattaacaccaacaaagatagcgagattgatgcacacaaacaggagtctggtatcgctcctaactttgtacacagccaagacggtaaccaccttcgtatgactgtagtgtgggcacacgagaagtacggaatcgaatcttttgcactgattcacgactccttcggtaccattccggctgacgctgcgaacctgttcaaagcagtgcgcgaaactatggtttcgacatatgagtcttgtgatgtactggctgatttctacgaccagttcgctgaccagttgcacgagtctcaattggacaaaatgccagcacttccggctaaaggtaacttgaacctccgtgacatcttaaaatcggacttcgcgttcgcg

SEQ ID NO: 226 - protein, 890 aa, synthetic construct
  REGION 1..890: note = Variant of RNA polymerase
MHHHHHHMNTINIAKNDFSDIELAAIPFNTLADHYGERLAREQLALEHESYEMGEARFRKCFERQLKAGEVADNAAAKPLITTLLPKMIARINDWFEEVKAKRGKRPTAFQFLQEIKPEAVAYITIKTTLACLTSADNTTVQAVASAIGRAIEDEARFGRIRDLEAKHFKKNVEEQLNKRVGHVYKKAFMQVVEADMLSKGLLGGEAWSSWHKEDSIHVGVRCIEMLIESTGMVSLHRQNAGVVGQDSETIELAPEYAEAIATRAGALAGISPMFQPCVVPPKPWTGITGGGYWAAGRKPLQLVRTRSLAALRRYEEVSMPEVIKAVNIAQNTAWRVNKKVLDVANAITQWQHCPVADVPAMDRGEMPARPLDIDTNEIALKAWKKEASAFYRKDKARVSRRLSMEFMLSQANKFANYKAIWFPQNMDWRGRVYAVPMFNPQGNDMTKGLLTFAQGKPIGEDGFYWLKIHGANTAGVDKVPFPQRIKFVEDNHTNIMECAKAPLENTWWAEQDSPFCFLAFCFEYAGVINHGLSYNCSLPLAFDGSCSGIQHFSAMLRDEIGGKAVNLLPSAEVQDIYRIVSDKVNEVLKQDLINGTSTTLETVTDKKTGEITERTKYGTKVMAQWWLEHGVNRGVTKRSVMTLAYGSKEFGFRDQVLSDTIQPAIDNGKGDMFLNPNQAAGYMAKLIWNAVSVTVVAAVEAMNWLKSAAKLLAAEVKDKKTDTVLRGRCAVHWVTPDGFPVWQEYKKPIQTRLNLMFLGQFRLQPTINTNKDSEIDAHKQESGIAPNFVHSQDGNHLRMTVVWAHEKYGIESFALIHDSFGTIPADAANLFKAVRETMVSTYESCDVLADFYDQFADQLHESQLDKMPALPAKGNLNLRDILKSDFAFA

SEQ ID NO: 227 - DNA, 2670 bp, synthetic construct
  misc_feature 1..2670: note = Variant of RNA polymerase
  source 1..2670: mol_type = other DNA
atgcaccatcaccatcaccatatgaacacgattaacatcgctaagaacgacttctctgacatcgaactggctgctatcccgttcaacactctggctgaccattacggtgagcgtttagctcgcgaacagttggcccttgagcatgagtcttacgagatgggtgaagcacgcttccgcaagaagtttgagcgtcaacttaaagctggtgaggttgcggataacgctgccgccaagcctctcatcactaccctactccctaagatgattgcacgcatcaacgactggtttgaggaagtgaaagctaagcgcggcaagcgcccgacagccttccagttcctgcaagaaatcaagccggaagccgtagcgtacatcaccattaagaccactctggcttgcctaaccagtgcggacaatacaaccgttcaggctgtagcaagcgcaatcggtcgggccattgaggacgaggctcgcttcggtcgtatccgtgaccttgaagctaagcacttcaagaaaaacgttgaggaacaactcaacaagcgcgtagggcacgtctacaagaaagcatttatgcaagttgtcgaggctgacatgctctctaagggtctactcggtggcgaggcgtggtcttcgtggcataaggaagactctattcatgtaggagtacgctgcatcgagatgctcattgagtcaaccggaatggttagcttacaccgccaaaatgctggcgtagtaggtcaagactctgagactatcgaactcgcacctgaatacgctgaggctatcgcaacccgtgcaggtgcgctggctggcatctctccgatgttccaaccttgcgtagttcctcctaagccgtggactggcattactggtggtggctattgggctgcggggcgcaaacccctgcagttagtacgtactcgcagtctggcggcgcttcgccgctatgaagaagtgtcgatgccggaggtcatcaaagcagtcaacattgcgcagaatacagcatggcgtgtgaacaagaaagttctcgacgtagcgaatgcaatcacccaatggcagcactgtccagtcgcggatgtgcctgcgatggatcgtggcgaaatgccagctcgtccgttggacatcgataccaacgagattgcacttaaagcgtggaagaaagaagcttccgcgttctaccgcaaagacaaagcacgcgttagccgtcgtctgtcaatggagtttatgttatctcaggcgaacaagtttgcgaattataaagcaatctggtttccgcaaaacatggattggcgtgggcgcgtgtacgctgtcccgatgttcaatcctcagggcaacgatatgacgaaaggcctgctgacctttgcgcagggtaaacccattggtgaagacggcttctattggctcaagattcatggcgcaaatacagctggagtggataaagtaccgtttccacaacgcatcaaatttgttgaggataaccatacgaatattatggaatgcgcgaaagcaccgctggaaaacacttggtgggcggaacaggactcgccgttctgttttctggcgttctgctttgagtatgctggcgtcatcaatcacggtctgtcgtacaactgtagcttgcctctggcatttgatggtagttgctccggcattcaacatttctcagcgatgttacgcgacgaaattggcggcaaagctgtgaatctcctcccatctgcggaagtgcaggatatttatcgtatcgtcagcgacaaagttaacgaggtactgaaacaagatctgattaacggtacctctaccaccttggaaacggtgactgataagaagacaggcgaaattaccgaacgcacgaaatacgggaccaaagttatggcacagtggtggttagaacacggtgtgaatcgtggcgtcacgaaacgctcggttatgactttggcgtatgggagcaaagagtttggattccgcgatcaagtgctgagtgacaccattcaaccggcgatcgataacggcaaaggtgacatgtttctgaatccgaatcaggctgctggttacatggcgaaactgatctggaacgcagtgtccgtcaccgtagtcgcagcagttgaggcgatgaactggctgaaaagtgcggcgaaattacttgctgctgaagtgaaggataagaagacggatacagttctgcgtggccgctgcgcagtacattgggtgactcccgacggcttccctgtgtggcaggaatacaagaagcctattcagacgcgcttgaacctgatgttcctcggtcagttccgcttacagcctaccattaacaccaacaaagatagcgagattgatgcacacaaacaggagtctggtatcgctcctaactttgtacacagccaagacggtaaccaccttcgtatgactgtagtgtgggcacacgagaagtacggaatcgaatcttttgcactgattcacgactccttcggtaccattccggctgacgctgcgaacctgttcaaagcagtgcgcgaaactatggtttcgacatatgagtcttgtgatgtactggctgatttctacgaccagttcgctgaccagttgcacgagtctcaattggacaaaatgccagcacttccggctaaaggtaacttgaacctccgtgacatcttaaaatcggacttcgcgttcgcg

SEQ ID NO: 228 - protein, 890 aa, synthetic construct
  REGION 1..890: note = Variant of RNA polymerase
MHHHHHHMNTINIAKNDFSDIELAAIPFNTLADHYGERLAREQLALEHESYEMGEARFRKKFERQLKAGEVADNAAAKPLITTLLPKMIARINDWFEEVKAKRGKRPTAFQFLQEIKPEAVAYITIKTTLACLTSADNTTVQAVASAIGRAIEDEARFGRIRDLEAKHFKKNVEEQLNKRVGHVYKKAFMQVVEADMLSKGLLGGEAWSSWHKEDSIHVGVRCIEMLIESTGMVSLHRQNAGVVGQDSETIELAPEYAEAIATRAGALAGISPMFQPCVVPPKPWTGITGGGYWAAGRKPLQLVRTRSLAALRRYEEVSMPEVIKAVNIAQNTAWRVNKKVLDVANAITQWQHCPVADVPAMDRGEMPARPLDIDTNEIALKAWKKEASAFYRKDKARVSRRLSMEFMLSQANKFANYKAIWFPQNMDWRGRVYAVPMFNPQGNDMTKGLLTFAQGKPIGEDGFYWLKIHGANTAGVDKVPFPQRIKFVEDNHTNIMECAKAPLENTWWAEQDSPFCFLAFCFEYAGVINHGLSYNCSLPLAFDGSCSGIQHFSAMLRDEIGGKAVNLLPSAEVQDIYRIVSDKVNEVLKQDLINGTSTTLETVTDKKTGEITERTKYGTKVMAQWWLEHGVNRGVTKRSVMTLAYGSKEFGFRDQVLSDTIQPAIDNGKGDMFLNPNQAAGYMAKLIWNAVSVTVVAAVEAMNWLKSAAKLLAAEVKDKKTDTVLRGRCAVHWVTPDGFPVWQEYKKPIQTRLNLMFLGQFRLQPTINTNKDSEIDAHKQESGIAPNFVHSQDGNHLRMTVVWAHEKYGIESFALIHDSFGTIPADAANLFKAVRETMVSTYESCDVLADFYDQFADQLHESQLDKMPALPAKGNLNLRDILKSDFAFA

SEQ ID NO: 229 - DNA, 2670 bp, synthetic construct
  misc_feature 1..2670: note = Variant of RNA polymerase
  source 1..2670: mol_type = other DNA
atgcaccatcaccatcaccatatgaacacgattaacatcgctaagaacgacttctctgacatcgaactggctgctatcccgttcaacactctggctgaccattacggtgagcgtttagctcgcgaacagttggcccttgagcatgagtcttacgagatgggtgaagcacgcttccgcaagatgtttgagcgtcaacttaaagctggtgaggttgcggataacgctgccgccaagcctctcatcactaccctactccctaagatgattgcacgcatcaacgactggtttgaggaagtgaaagctaagcgcggcaagcgcccgacagccttccagttcctgcaagaaatcaagccggaagccgtagcgtacatcaccattaagaccactctggcttgcctaaccagtgcggacaatacaaccgttcaggctgtagcaagcgcaatcggtcgggccattgaggacgaggctcgcttcggtcgtatccgtgaccttgaagctaagcacttcaagaaaaacgttgaggaacaactcaacaagcgcgtagggcacgtctacaagaaagcatttatgcaagttgtcgaggctgacatgctctctaagggtctactcggtggcgaggcgtggtcttcgtggcataaggaagactctattcatgtaggagtacgctgcatcgagatgctcattgagtcaaccggaatggttagcttacaccgccaaaatgctggcgtagtaggtcaagactctgagactatcgaactcgcacctgaatacgctgaggctatcgcaacccgtgcaggtgcgctggctggcatctctccgatgttccaaccttgcgtagttcctcctaagccgtggactggcattactggtggtggctattgggctgcggggcgcaaacccctgcagttagtacgtactcgcagtctggcggcgcttcgccgctatgaagaagtgtcgatgccggaggtcatcaaagcagtcaacattgcgcagaatacagcatggcgtgtgaacaagaaagttctcgacgtagcgaatgcaatcacccaatggcagcactgtccagtcgcggatgtgcctgcgatggatcgtggcgaaatgccagctcgtccgttggacatcgataccaacgagattgcacttaaagcgtggaagaaagaagcttccgcgttctaccgcaaagacaaagcacgcgttagccgtcgtctgtcaatggagtttatgttatctcaggcgaacaagtttgcgaattataaagcaatctggtttccgcaaaacatggattggcgtgggcgcgtgtacgctgtcccgatgttcaatcctcagggcaacgatatgacgaaaggcctgctgacctttgcgcagggtaaacccattggtgaagacggcttctattggctcaagattcatggcgcaaatacagctggagtggataaagtaccgtttccacaacgcatcaaatttgttgaggataaccatacgaatattatggaatgcgcgaaagcaccgctgacgaacacttggtgggcggaacaggactcgccgttctgttttctggcgttctgctttgagtatgctggcgtcatcaatcacggtctgtcgtacaactgtagcttgcctctggcatttgatggtagttgctccggcattcaacatttctcagcgatgttacgcgacgaaattggcggcaaagctgtgaatctcctcccatctgcggaagtgcaggatatttatcgtatcgtcagcgacaaagttaacgaggtactgaaacaagatctgattaacggtacctctaccaccttggaaacggtgactgataagaagacaggcgaaattaccgaacgcacgaaatacgggaccaaagttatggcacagtggtggttagaacacggtgtgaatcgtggcgtcacgaaacgctcggttatgactttggcgtatgggagcaaagagtttggattccgcgatcaagtgctgagtgacaccattcaaccggcgatcgataacggcaaaggtgacatgtttctgaatccgaatcaggctgctggttacatggcgaaactgatctggaacgcagtgtccgtcaccgtagtcgcagcagttgaggcgatgaactggctgaaaagtgcggcgaaattacttgctgctgaagtgaaggataagaagacggatacagttctgcgtggccgctgcgcagtacattgggtgactcccgacggcttccctgtgtggcaggaatacaagaagcctattcagacgcgcttgaacctgatgttcctcggtcagttccgcttacagcctaccattaacaccaacaaagatagcgagattgatgcacacaaacaggagtctggtatcgctcctaactttgtacacagccaagacggtaaccaccttcgtatgactgtagtgtgggcacacgagaagtacggaatcgaatcttttgcactgattcacgactccttcggtaccattccggctgacgctgcgaacctgttcaaagcagtgcgcgaaactatggtttcgacatatgagtcttgtgatgtactggctgatttctacgaccagttcgctgaccagttgcacgagtctcaattggacaaaatgccagcacttccggctaaaggtaacttgaacctccgtgacatcttaaaatcggacttcgcgttcgcg

SEQ ID NO: 230 - protein, 890 aa, synthetic construct
  REGION 1..890: note = Variant of RNA polymerase
MHHHHHHMNTINIAKNDFSDIELAAIPFNTLADHYGERLAREQLALEHESYEMGEARFRKMFERQLKAGEVADNAAAKPLITTLLPKMIARINDWFEEVKAKRGKRPTAFQFLQEIKPEAVAYITIKTTLACLTSADNTTVQAVASAIGRAIEDEARFGRIRDLEAKHFKKNVEEQLNKRVGHVYKKAFMQVVEADMLSKGLLGGEAWSSWHKEDSIHVGVRCIEMLIESTGMVSLHRQNAGVVGQDSETIELAPEYAEAIATRAGALAGISPMFQPCVVPPKPWTGITGGGYWAAGRKPLQLVRTRSLAALRRYEEVSMPEVIKAVNIAQNTAWRVNKKVLDVANAITQWQHCPVADVPAMDRGEMPARPLDIDTNEIALKAWKKEASAFYRKDKARVSRRLSMEFMLSQANKFANYKAIWFPQNMDWRGRVYAVPMFNPQGNDMTKGLLTFAQGKPIGEDGFYWLKIHGANTAGVDKVPFPQRIKFVEDNHTNIMECAKAPLTNTWWAEQDSPFCFLAFCFEYAGVINHGLSYNCSLPLAFDGSCSGIQHFSAMLRDEIGGKAVNLLPSAEVQDIYRIVSDKVNEVLKQDLINGTSTTLETVTDKKTGEITERTKYGTKVMAQWWLEHGVNRGVTKRSVMTLAYGSKEFGFRDQVLSDTIQPAIDNGKGDMFLNPNQAAGYMAKLIWNAVSVTVVAAVEAMNWLKSAAKLLAAEVKDKKTDTVLRGRCAVHWVTPDGFPVWQEYKKPIQTRLNLMFLGQFRLQPTINTNKDSEIDAHKQESGIAPNFVHSQDGNHLRMTVVWAHEKYGIESFALIHDSFGTIPADAANLFKAVRETMVSTYESCDVLADFYDQFADQLHESQLDKMPALPAKGNLNLRDILKSDFAFA

SEQ ID NO: 231 - DNA, 2670 bp, synthetic construct
  misc_feature 1..2670: note = Variant of RNA polymerase
  source 1..2670: mol_type = other DNA
atgcaccatcaccatcaccatatgaacacgattaacatcgctaagaacgacttctctgacatcgaactggctgctatcccgttcaacactctggctgaccattacggtgagcgtttagctcgcgaacagttggcccttgagcatgagtcttacgagatgggtgaagcacgcttccgcaagatgtttgagcgtcaacttaaagctggtgaggttgcggataacgctgccgccaagcctctcatcactaccctactccctaagatgattgcacgcatcaacgactggtttgaggaagtgaaagctaagcgcggcaagcgcccgacagccttccagttcctgcaagaaatcaagccggaagccgtagcgtacatcaccattaagaccactctggcttgcctaaccagtgcggacaatacaaccgttcaggctgtagcaagcgcaatcggtcgggccattgaggacgaggctcgcttcggtcgtatccgtgaccttgaagctaagcacttcaagaaaaacgttgaggaacaactcaacaagcgcgtagggcacgtctacaagaaagcatttatgcaagttgtcgaggctgacatgctctctaagggtctactcggtggcgaggcgtggtcttcgtggcataaggaagactctattcatgtaggagtacgctgcatcgagatgctcattgagtcaaccggaatggttagcttacaccgccaaaatgctggcgtagtaggtcaagactctgagactatcgaactcgcacctgaatacgctgaggctatcgcaacccgtgcaggtgcgctggctggcatctctccgatgttccaaccttgcgtagttcctcctaagccgtggactggcattactggtggtggctattgggctgcggggcgcaaacccctgcagttagtacgtactcgcagtctggcggcgcttcgccgctatgaagaagtgtcgatgccggaggtcatcaaagcagtcaacattgcgcagaatacagcatggcgtgtgaacaagaaagttctcgacgtagcgaatgcaatcacccaatggcagcactgtccagtcgcggatgtgcctgcgatggatcgtggcgaaatgccagctcgtccgttggacatcgataccaacgagattgcacttaaagcgtggaagaaagaagcttccgcgttctaccgcaaagacaaagcacgcgttagccgtcgtctgtcaatggagtttatgttatctcaggcgaacaagtttgcgaattataaagcaatctggtttccgcaaaacatggattggcgtgggcgcgtgtacgctgtcccgatgttcaatcctcagggcaacgatatgacgaaaggcctgctgacctttgcgcagggtaaacccattggtgaagacggcttctattggctcaagattcatggcgcaaatacagctggagtggataaagtaccgtttccacaacgcatcaaatttgttgaggataaccatacgaatattatggaatgcgcgaaagcaccgctggaaaacacttggtgggcggaacaggactcgccgttctgttttctggcgttctgctttgagtatgctggcgtcatcaatcacggtctgtcgtacaactgtagcttgcctctggcatttgatggtagttgctccggcattcaacatttctcagcgatgttacgcgacgaaattggcggcaaagctgtgaatctcctcccatctgcggaagtgcaggatatttatcgtatcgtcagcgacaaagttaacgaggtactgaaacaagatctgattaacggtacctctaccaccttggaaacggtgactgatcggaagacaggcgaaattaccgaacgcacgaaatacgggaccaaagttatggcacagtggtggttagaacacggtgtgaatcgtggcgtcacgaaacgctcggttatgactttggcgtatgggagcaaagagtttggattccgcgatcaagtgctgagtgacaccattcaaccggcgatcgataacggcaaaggtgacatgtttctgaatccgaatcaggctgctggttacatggcgaaactgatctggaacgcagtgtccgtcaccgtagtcgcagcagttgaggcgatgaactggctgaaaagtgcggcgaaattacttgctgctgaagtgaaggataagaagacggatacagttctgcgtggccgctgcgcagtacattgggtgactcccgacggcttccctgtgtggcaggaatacaagaagcctattcagacgcgcttgaacctgatgttcctcggtcagttccgcttacagcctaccattaacaccaacaaagatagcgagattgatgcacacaaacaggagtctggtatcgctcctaactttgtacacagccaagacggtaaccaccttcgtatgactgtagtgtgggcacacgagaagtacggaatcgaatcttttgcactgattcacgactccttcggtaccattccggctgacgctgcgaacctgttcaaagcagtgcgcgaaactatggtttcgacatatgagtcttgtgatgtactggctgatttctacgaccagttcgctgaccagttgcacgagtctcaattggacaaaatgccagcacttccggctaaaggtaacttgaacctccgtgacatcttaaaatcggacttcgcgttcgcg

SEQ ID NO: 232 - protein, 890 aa, synthetic construct
  REGION 1..890: note = Variant of RNA polymerase
MHHHHHHMNTINIAKNDFSDIELAAIPFNTLADHYGERLAREQLALEHESYEMGEARFRKMFERQLKAGEVADNAAAKPLITTLLPKMIARINDWFEEVKAKRGKRPTAFQFLQEIKPEAVAYITIKTTLACLTSADNTTVQAVASAIGRAIEDEARFGRIRDLEAKHFKKNVEEQLNKRVGHVYKKAFMQVVEADMLSKGLLGGEAWSSWHKEDSIHVGVRCIEMLIESTGMVSLHRQNAGVVGQDSETIELAPEYAEAIATRAGALAGISPMFQPCVVPPKPWTGITGGGYWAAGRKPLQLVRTRSLAALRRYEEVSMPEVIKAVNIAQNTAWRVNKKVLDVANAITQWQHCPVADVPAMDRGEMPARPLDIDTNEIALKAWKKEASAFYRKDKARVSRRLSMEFMLSQANKFANYKAIWFPQNMDWRGRVYAVPMFNPQGNDMTKGLLTFAQGKPIGEDGFYWLKIHGANTAGVDKVPFPQRIKFVEDNHTNIMECAKAPLENTWWAEQDSPFCFLAFCFEYAGVINHGLSYNCSLPLAFDGSCSGIQHFSAMLRDEIGGKAVNLLPSAEVQDIYRIVSDKVNEVLKQDLINGTSTTLETVTDRKTGEITERTKYGTKVMAQWWLEHGVNRGVTKRSVMTLAYGSKEFGFRDQVLSDTIQPAIDNGKGDMFLNPNQAAGYMAKLIWNAVSVTVVAAVEAMNWLKSAAKLLAAEVKDKKTDTVLRGRCAVHWVTPDGFPVWQEYKKPIQTRLNLMFLGQFRLQPTINTNKDSEIDAHKQESGIAPNFVHSQDGNHLRMTVVWAHEKYGIESFALIHDSFGTIPADAANLFKAVRETMVSTYESCDVLADFYDQFADQLHESQLDKMPALPAKGNLNLRDILKSDFAFA

SEQ ID NO: 233 - DNA, 2670 bp, synthetic construct
  misc_feature 1..2670: note = Variant of RNA polymerase
  source 1..2670: mol_type = other DNA
atgcaccatcaccatcaccatatgaacacgattaacatcgctaagaacgacttctctgacatcgaactggctgctatcccgttcaacactctggctgaccattacggtgagcgtttagctcgcgaacagttggcccttgagcatgagtcttacgagatgggtgaagcacgcttccgcaagatgtttgagcgtcaacttaaagctggtgaggttgcggataacgctgccgccaagcctctcatcactaccctactccctaagatgattgcacgcatcaacgactggtttgaggaagtgaaagctaagcgcggcaagcgcccgacagccttccagttcctgcaagaaatcaagccggaagccgtagcgtacatcaccattaagaccactctggcttgcctaaccagtgcggacaatacaaccgttcaggctgtagcaagcgcaatcggtcgggccattgaggacgaggctcgcttcggtcgtatccgtgaccttgaagctaagcacttcaagaaaaacgttgaggaacaactcaacaagcgcgtagggcacgtctacaagaaagcatttatgcaagttgtcgaggctgacatgctctctaagggtctactcggtggcgaggcgtggtcttcgtggcataaggaagactctattcatgtaggagtacgctgcatcgagatgctcattgagtcaaccggaatggttagcttacaccgccaaaatgctggcgtagtaggtcaagactctgagactatcgaactcgcacctgaatacgctgaggctatcgcaacccgtgcaggtgcgctggctggcatctctccgatgttccaaccttgcgtagttcctcctaagccgtggactggcattactggtggtggctattgggctgcggggcgcaaacccctgcagttagtacgtactcgcagtctggcggcgcttcgccgctatgaagaagtgtcgatgccggaggtcatcaaagcagtcaacattgcgcagaatacagcatggcgtgtgaacaagaaagttctcgacgtagcgaatgcaatcacccaatggcagcactgtccagtcgcggatgtgcctgcgatggatcgtggcgaaatgccagctcgtccgttggacatcgataccaacgagattgcacttaaagcgtggaagaaagaagcttccgcgttctaccgcaaagacaaagcacgcgttagccgtcgtctgtcaatggagtttatgttatctcaggcgaacaagtttgcgaattataaagcaatctggtttccgcaaaacatggattggcgtgggcgcgtgtacgctgtcccgatgttcaatcctcagggcaacgatatgacgaaaggcctgctgacctttgcgcagggtaaacccattggtgaagacggcttctattggctcaagattcatggcgcaaatacagctggagtggataaagtaccgtttccacaacgcatcaaatttgttgaggataaccatacgaatattatggaatgcgcgaaagcaccgctggaaaacacttggtgggcggaacaggactcgccgttctgttttctggcgttctgctttgagtatgctggcgtcatcaatcacggtctgtcgtacaactgtagcttgcctctggcatttgatggtagttgctccggcattcaacatttctcagcgatgttacgcgacgaaattggcggcaaagctgtgaatctcctcccatctgcggaagtgcaggatatttatcgtatcgtcagcgacaaagttaacgaggtactgaaacaagatctgattaacggtacctctaccaccttggaaacggtgactgataagaagacaggcgaaattaccgaacgcacgaaatacgggaccaaagttatggcacagtggtggttagaacacggtgtgaatcgtggcgtcacgaaacgctcggttatgactttggcgtatgggagcaaagagtttggattccgcgatcaagtgctgagtgacaccattcaaccggcgatcgataacggcaaaggtgacatgtttctgaatccgaatcaggctgctggttacatggcgaaactgatctggaacgcagtgtccgtcaccgtagtcgcagcagttgaggcgatgaactggctgaaaagtgcggcgaaattacttgctgctgaagtgaaggataagaagacggatacagttctgcgtggccgctgcgcagtacattgggtgactcccgacggcttccctgtgtggcaggaatacaagaagcctattcagacgcgcttgaacctgatgttcctcggtcagttccgcttacagcctaccattaacaccaacaaagatagcgagattgatgcacacaaacaggagtctgcgatcgctcctaactttgtacacagccaagacggtaaccaccttcgtatgactgtagtgtgggcacacgagaagtacggaatcgaatcttttgcactgattcacgactccttcggtaccattccggctgacgctgcgaacctgttcaaagcagtgcgcgaaactatggtttcgacatatgagtcttgtgatgtactggctgatttctacgaccagttcgctgaccagttgcacgagtctcaattggacaaaatgccagcacttccggctaaaggtaacttgaacctccgtgacatcttaaaatcggacttcgcgttcgcg

SEQ ID NO: 234 - protein, 890 aa, synthetic construct
  REGION 1..890: note = Variant of RNA polymerase
MHHHHHHMNTINIAKNDFSDIELAAIPFNTLADHYGERLAREQLALEHESYEMGEARFRKMFERQLKAGEVADNAAAKPLITTLLPKMIARINDWFEEVKAKRGKRPTAFQFLQEIKPEAVAYITIKTTLACLTSADNTTVQAVASAIGRAIEDEARFGRIRDLEAKHFKKNVEEQLNKRVGHVYKKAFMQVVEADMLSKGLLGGEAWSSWHKEDSIHVGVRCIEMLIESTGMVSLHRQNAGVVGQDSETIELAPEYAEAIATRAGALAGISPMFQPCVVPPKPWTGITGGGYWAAGRKPLQLVRTRSLAALRRYEEVSMPEVIKAVNIAQNTAWRVNKKVLDVANAITQWQHCPVADVPAMDRGEMPARPLDIDTNEIALKAWKKEASAFYRKDKARVSRRLSMEFMLSQANKFANYKAIWFPQNMDWRGRVYAVPMFNPQGNDMTKGLLTFAQGKPIGEDGFYWLKIHGANTAGVDKVPFPQRIKFVEDNHTNIMECAKAPLENTWWAEQDSPFCFLAFCFEYAGVINHGLSYNCSLPLAFDGSCSGIQHFSAMLRDEIGGKAVNLLPSAEVQDIYRIVSDKVNEVLKQDLINGTSTTLETVTDKKTGEITERTKYGTKVMAQWWLEHGVNRGVTKRSVMTLAYGSKEFGFRDQVLSDTIQPAIDNGKGDMFLNPNQAAGYMAKLIWNAVSVTVVAAVEAMNWLKSAAKLLAAEVKDKKTDTVLRGRCAVHWVTPDGFPVWQEYKKPIQTRLNLMFLGQFRLQPTINTNKDSEIDAHKQESAIAPNFVHSQDGNHLRMTVVWAHEKYGIESFALIHDSFGTIPADAANLFKAVRETMVSTYESCDVLADFYDQFADQLHESQLDKMPALPAKGNLNLRDILKSDFAFA

SEQ ID NO: 235 - DNA, 2670 bp, synthetic construct
  misc_feature 1..2670: note = Variant of RNA polymerase
  source 1..2670: mol_type = other DNA
atgcaccatcaccatcaccatatgaacacgattaacatcgctaagaacgacttctctgacatcgaactggctgctatcccgttcaacactctggctgaccattacggtgagcgtttagctcgcgaacagttggcccttgagcatgagtcttacgagatgggtgaagcacgcttccgcaagatgtttgagcgtcaacttaaagctggtgaggttgcggataacgctgccgccaagcctctcatcactaccctactccctaagatgattgcacgcatcaacgactggtttgaggaagtgaaagctaagcgcggcaagcgcccgacagccttccagttcctgcaagaaatcaagccggaagccgtagcgtacatcaccattaagaccactctggcttgcctaaccagtgcggacaatacaaccgttcaggctgtagcaagcgcaatcggtcgggccattgaggacgaggctcgcttcggtcgtatccgtgaccttgaagctaagcacttcaagaaaaacgttgaggaacaactcaacaagcgcgtagggcacgtctacaagaaagcatttatgcaagttgtcgaggctgacatgctctctaagggtctactcggtggcgaggcgtggtcttcgtggcataaggaagactctattcatgtaggagtacgctgcatcgagatgctcattgagtcaaccggaatggttagcttacaccgccaaaatgctggcgtagtaggtcaagactctgagactatcgaactcgcacctgaatacgctgaggctatcgcaacccgtgcaggtgcgctggctggcatctctccgatgttccaaccttgcgtagttcctcctaagccgtggactggcattactggtggtggctattgggctgcggggcgcaaacccctgcagttagtacgtactcgcagtctggcggcgcttcgccgctatgaagaagtgtcgatgccggaggtcatcaaagcagtcaacattgcgcagaatacagcatggcgtgtgaacaagaaagttctcgacgtagcgaatgcaatcacccaatggcagcactgtccagtcgcggatgtgcctgcgatggatcgtggcgaaatgccagctcgtccgttggacatcgataccaacgagattgcacttaaagcgtggaagaaagaagcttccgcgttctaccgcaaagacaaagcacgcgttagccgtcgtctgtcaatggagtttatgttatctcaggcgaacaagtttgcgaattataaagcaatctggtttccgcaaaacatggattggcgtgggcgcgtgtacgctgtcccgatgttcaatcctcagggcaacgatatgacgaaaggcctgctgacctttgcgcagggtaaacccattggtgaagacggcttctattggctcaagattcatggcgcaaatacagctggagtggataaagtaccgtttccacaacgcatcaaatttgttgaggataaccatacgaatattatggaatgcgcgaaagcaccgctggaaaacacttggtgggcggaacaggactcgccgttctgttttctggcgttctgctttgagtatgctggcgtcatcaatcacggtctgtcgtacaactgtagcttgcctctggcatttgatggtagttgctccggcattcaacatttctcagcgatgttacgcgacgaaattggcggcaaagctgtgaatctcctcccatctgcggaagtgcaggatatttatcgtatcgtcagcgacaaagttaacgaggtactgaaacaagatctgattaacggtacctctaccaccttggaaacggtgactgataagaagacaggcgaaattaccgaacgcacgaaatacgggaccaaagttatggcacagtggtggttagaacacggtgtgaatcgtggcgtcacgaaacgctcggttatgactttggcgtatgggagcaaagagtttggattccgcgatcaagtgctgagtgacaccattcaaccggcgatcgataacggcaaaggtgacatgtttctgaatccgaatcaggctgctggttacatggcgcagctgatctggaacgcagtgtccgtcaccgtagtcgcagcagttgaggcgatgaactggctgaaaagtgcggcgaaattacttgctgctgaagtgaaggataagaagacggatacagttctgcgtggccgctgcgcagtacattgggtgactcccgacggcttccctgtgtggcaggaatacaagaagcctattcagacgcgcttgaacctgatgttcctcggtcagttccgcttacagcctaccattaacaccaacaaagatagcgagattgatgcacacaaacaggagtctggtatcgctcctaactttgtacacagccaagacggtaaccaccttcgtatgactgtagtgtgggcacacgagaagtacggaatcgaatcttttgcactgattcacgactccttcggtaccattccggctgacgctgcgaacctgttcaaagcagtgcgcgaaactatggtttcgacatatgagtcttgtgatgtactggctgatttctacgaccagttcgctgaccagttgcacgagtctcaattggacaaaatgccagcacttccggctaaaggtaacttgaacctccgtgacatcttaaaatcggacttcgcgttcgcg

SEQ ID NO: 236 - protein, 890 aa, synthetic construct
  REGION 1..890: note = Variant of RNA polymerase
MHHHHHHMNTINIAKNDFSDIELAAIPFNTLADHYGERLAREQLALEHESYEMGEARFRKMFERQLKAGEVADNAAAKPLITTLLPKMIARINDWFEEVKAKRGKRPTAFQFLQEIKPEAVAYITIKTTLACLTSADNTTVQAVASAIGRAIEDEARFGRIRDLEAKHFKKNVEEQLNKRVGHVYKKAFMQVVEADMLSKGLLGGEAWSSWHKEDSIHVGVRCIEMLIESTGMVSLHRQNAGVVGQDSETIELAPEYAEAIATRAGALAGISPMFQPCVVPPKPWTGITGGGYWAAGRKPLQLVRTRSLAALRRYEEVSMPEVIKAVNIAQNTAWRVNKKVLDVANAITQWQHCPVADVPAMDRGEMPARPLDIDTNEIALKAWKKEASAFYRKDKARVSRRLSMEFMLSQANKFANYKAIWFPQNMDWRGRVYAVPMFNPQGNDMTKGLLTFAQGKPIGEDGFYWLKIHGANTAGVDKVPFPQRIKFVEDNHTNIMECAKAPLENTWWAEQDSPFCFLAFCFEYAGVINHGLSYNCSLPLAFDGSCSGIQHFSAMLRDEIGGKAVNLLPSAEVQDIYRIVSDKVNEVLKQDLINGTSTTLETVTDKKTGEITERTKYGTKVMAQWWLEHGVNRGVTKRSVMTLAYGSKEFGFRDQVLSDTIQPAIDNGKGDMFLNPNQAAGYMAQLIWNAVSVTVVAAVEAMNWLKSAAKLLAAEVKDKKTDTVLRGRCAVHWVTPDGFPVWQEYKKPIQTRLNLMFLGQFRLQPTINTNKDSEIDAHKQESGIAPNFVHSQDGNHLRMTVVWAHEKYGIESFALIHDSFGTIPADAANLFKAVRETMVSTYESCDVLADFYDQFADQLHESQLDKMPALPAKGNLNLRDILKSDFAFA

SEQ ID NO: 237 - DNA, 2670 bp, synthetic construct
  misc_feature 1..2670: note = Variant of RNA polymerase
  source 1..2670: mol_type = other DNA
atgcaccatcaccatcaccatatgaacacgattaacatcgctaagaacgacttctctgacatcgaactggctgctatcccgttcaacactctggctgaccattacggtgagcgtttagctcgcgaacagttggcccttgagcatgagtcttacgagatgggtgaagcacgcttccgcaagatgtttgagcgtcaacttaaagctggtgaggttgcggataacgctgccgccaagcctctcatcactaccctactccctaagatgattgcacgcatcaacgactggtttgaggaagtgaaagctaagcgcggcaagcgcccgacagccttccagttcctgcaagaaatcaagccggaagccgtagcgtacatcaccattaagaccactctggcttgcctaaccagtgcggacaatacaaccgttcaggctgtagcaagcgcaatcggtcgggccattgaggacgaggctcgcttcggtcgtatccgtgaccttgaagctaagcacttcaagaaaaacgttgaggaacaactcaacaagcgcgtagggcacgtctacaagaaagcatttatgcaagttgtcgaggctgacatgctctctgagggtctactcggtggcgaggcgtggtcttcgtggcataaggaagactctattcatgtaggagtacgctgcatcgagatgctcattgagtcaaccggaatggttagcttacaccgccaaaatgctggcgtagtaggtcaagactctgagactatcgaactcgcacctgaatacgctgaggctatcgcaacccgtgcaggtgcgctggctggcatctctccgatgttccaaccttgcgtagttcctcctaagccgtggactggcattactggtggtggctattgggctgcggggcgcaaacccctgcagttagtacgtactcgcagtctggcggcgcttcgccgctatgaagaagtgtcgatgccggaggtcatcaaagcagtcaacattgcgcagaatacagcatggcgtgtgaacaagaaagttctcgacgtagcgaatgcaatcacccaatggcagcactgtccagtcgcggatgtgcctgcgatggatcgtggcgaaatgccagctcgtccgttggacatcgataccaacgagattgcacttaaagcgtggaagaaagaagcttccgcgttctaccgcaaagacaaagcacgcgttagccgtcgtctgtcaatggagtttatgttatctcaggcgaacaagtttgcgaattataaagcaatctggtttccgcaaaacatggattggcgtgggcgcgtgtacgctgtcccgatgttcaatcctcagggcaacgatatgacgaaaggcctgctgacctttgcgcagggtaaacccattggtgaagacggcttctattggctcaagattcatggcgcaaatacagctggagtggataaagtaccgtttccacaacgcatcaaatttgttgaggataaccatacgaatattatggaatgcgcgaaagcaccgctggaaaacacttggtgggcggaacaggactcgccgttctgttttctggcgttctgctttgagtatgctggcgtcatcaatcacggtctgtcgtacaactgtagcttgcctctggcatttgatggtagttgctccggcattcaacatttctcagcgatgttacgcgacgaaattggcggcaaagctgtgaatctcctcccatctgcggaagtgcaggatatttatcgtatcgtcagcgacaaagttaacgaggtactgaaacaagatctgattaacggtacctctaccaccttggaaacggtgactgataagaagacaggcgaaattaccgaacgcacgaaatacgggaccaaagttatggcacagtggtggttagaacacggtgtgaatcgtggcgtcacgaaacgctcggttatgactttggcgtatgggagcaaagagtttggattccgcgatcaagtgctgagtgacaccattcaaccggcgatcgataacggcaaaggtgacatgtttctgaatccgaatcaggctgctggttacatggcgaaactgatctggaacgcagtgtccgtcaccgtagtcgcagcagttgaggcgatgaactggctgaaaagtgcggcgaaattacttgctgctgaagtgaaggataagaagacggatacagttctgcgtggccgctgcgcagtacattgggtgactcccgacggcttccctgtgtggcaggaatacaagaagcctattcagacgcgcttgaacctgatgttcctcggtcagttccgcttacagcctaccattaacaccaacaaagatagcgagattgatgcacacaaacaggagtctggtatcgctcctaactttgtacacagccaagacggtaaccaccttcgtatgactgtagtgtgggcacacgagaagtacggaatcgaatcttttgcactgattcacgactccttcggtaccattccggctgacgctgcgaacctgttcaaagcagtgcgcgaaactatggtttcgacatatgagtcttgtgatgtactggctgatttctacgaccagttcgctgaccagttgcacgagtctcaattggacaaaatgccagcacttccggctaaaggtaacttgaacctccgtgacatcttaaaatcggacttcgcgttcgcg

SEQ ID NO: 238 - protein, 890 aa, synthetic construct
  REGION 1..890: note = Variant of RNA polymerase
MHHHHHHMNTINIAKNDFSDIELAAIPFNTLADHYGERLAREQLALEHESYEMGEARFRKMFERQLKAGEVADNAAAKPLITTLLPKMIARINDWFEEVKAKRGKRPTAFQFLQEIKPEAVAYITIKTTLACLTSADNTTVQAVASAIGRAIEDEARFGRIRDLEAKHFKKNVEEQLNKRVGHVYKKAFMQVVEADMLSEGLLGGEAWSSWHKEDSIHVGVRCIEMLIESTGMVSLHRQNAGVVGQDSETIELAPEYAEAIATRAGALAGISPMFQPCVVPPKPWTGITGGGYWAAGRKPLQLVRTRSLAALRRYEEVSMPEVIKAVNIAQNTAWRVNKKVLDVANAITQWQHCPVADVPAMDRGEMPARPLDIDTNEIALKAWKKEASAFYRKDKARVSRRLSMEFMLSQANKFANYKAIWFPQNMDWRGRVYAVPMFNPQGNDMTKGLLTFAQGKPIGEDGFYWLKIHGANTAGVDKVPFPQRIKFVEDNHTNIMECAKAPLENTWWAEQDSPFCFLAFCFEYAGVINHGLSYNCSLPLAFDGSCSGIQHFSAMLRDEIGGKAVNLLPSAEVQDIYRIVSDKVNEVLKQDLINGTSTTLETVTDKKTGEITERTKYGTKVMAQWWLEHGVNRGVTKRSVMTLAYGSKEFGFRDQVLSDTIQPAIDNGKGDMFLNPNQAAGYMAKLIWNAVSVTVVAAVEAMNWLKSAAKLLAAEVKDKKTDTVLRGRCAVHWVTPDGFPVWQEYKKPIQTRLNLMFLGQFRLQPTINTNKDSEIDAHKQESGIAPNFVHSQDGNHLRMTVVWAHEKYGIESFALIHDSFGTIPADAANLFKAVRETMVSTYESCDVLADFYDQFADQLHESQLDKMPALPAKGNLNLRDILKSDFAFA

SEQ ID NO: 239 - DNA, 2670 bp, synthetic construct
  misc_feature 1..2670: note = Variant of RNA polymerase
  source 1..2670: mol_type = other DNA
atgcaccatcaccatcaccatatgaacacgattaacatcgctaagaacgacttctctgacatcgaactggctgctatcccgttcaacactctggctgaccattacggtgagcgtttagctcgcgaacagttggcccttgagcatgagtcttacgagatgggtgaagcacgcttccgcaagatgtttgagcgtcaacttaaagctggtgaggttgcggataacgctgccgccaagcctctcatcactaccctactccctaagatgattgcacgcatcaacgactggtttgaggaagtgaaagctaagcgcggcaagcgcccgacagccttccagttcctgcaagaaatcaagccggaagccgtagcgtacatcaccattaagaccactctggcttgcctaaccagtgcggacaatacaaccgttcaggctgtagcaagcgcaatcggtcgggccattgaggacgaggctcgcttcggtcgtatccgtgaccttgaagctaagcacttcaagaaaaacgttgaggaacaactcaacaagcgcgtagggcacgtctacaagaaagcatttatgcaagttgtcgaggctgacatgctctctaagggtctactcggtggcgaggcgtggtcttcgtggcataaggaagactctattcatgtaggagtacgctgcatcgagatgctcattgagtcaaccggaatggttagcttacaccgccaaaatgctggcgtagtaggtcaagactctgagactatcgaactcgcacctgaatacgctgaggctatcgcaacccgtgcaggtgcgctggctggcatctctccgatgttccaaccttgcgtagttcctcctaagccgtggactggcattactggtggtggctattgggctgcggggcgcaaacccctgcagttagtacgtactcgcagtctggcggcgcttcgccgctatgaagaagtgtcgatgccggaggtcatcaaagcagtcaacattgcgcagaatacagcatggcgtgtgaacaagaaagttctcgacgtagcgaatgcaatcacccaatggcagcactgtccagtcgcggatgtgcctgcgatggatcgtggcgaaatgccagctcgtccgttggacatcgataccaacgagattgcacttaaagcgtggaagaaagaagcttccgcgttctaccgcaaagacaaagcacgcgttagccgtcgtctgtcaatggagtttatgttatctcaggcgaacaagtttgcgaattataaagcaatctggtttccgcaaaacatggattggcgtgggcgcgtgtacgctgtcccgatgttcaatcctcagggcaacgatatgacgaaaggcctgctgacctttgcgcagggtaaacccattggtgaagacggcttctattggctcaagattcatggcgcaaatacagctggagaggataaagtaccgtttccacaacgcatcaaatttgttgaggataaccatacgaatattatggaatgcgcgaaagcaccgctggaaaacacttggtgggcggaacaggactcgccgttctgttttctggcgttctgctttgagtatgctggcgtcatcaatcacggtctgtcgtacaactgtagcttgcctctggcatttgatggtagttgctccggcattcaacatttctcagcgatgttacgcgacgaaattggcggcaaagctgtgaatctcctcccatctgcggaagtgcaggatatttatcgtatcgtcagcgacaaagttaacgaggtactgaaacaagatctgattaacggtacctctaccaccttggaaacggtgactgataagaagacaggcgaaattaccgaacgcacgaaatacgggaccaaagttatggcacagtggtggttagaacacggtgtgaatcgtggcgtcacgaaacgctcggttatgactttggcgtatgggagcaaagagtttggattccgcgatcaagtgctgagtgacaccattcaaccggcgatcgataacggcaaaggtgacatgtttctgaatccgaatcaggctgctggttacatggcgaaactgatctggaacgcagtgtccgtcaccgtagtcgcagcagttgaggcgatgaactggctgaaaagtgcggcgaaattacttgctgctgaagtgaaggataagaagacggatacagttctgcgtggccgctgcgcagtacattgggtgactcccgacggcttccctgtgtggcaggaatacaagaagcctattcagacgcgcttgaacctgatgttcctcggtcagttccgcttacagcctaccattaacaccaacaaagatagcgagattgatgcacacaaacaggagtctggtatcgctcctaactttgtacacagccaagacggtaaccaccttcgtatgactgtagtgtgggcacacgagaagtacggaatcgaatcttttgcactgattcacgactccttcggtaccattccggctgacgctgcgaacctgttcaaagcagtgcgcgaaactatggtttcgacatatgagtcttgtgatgtactggctgatttctacgaccagttcgctgaccagttgcacgagtctcaattggacaaaatgccagcacttccggctaaaggtaacttgaacctccgtgacatcttaaaatcggacttcgcgttcgcg

SEQ ID NO: 240 - protein, 890 aa, synthetic construct
  REGION 1..890: note = Variant of RNA polymerase
MHHHHHHMNTINIAKNDFSDIELAAIPFNTLADHYGERLAREQLALEHESYEMGEARFRKMFERQLKAGEVADNAAAKPLITTLLPKMIARINDWFEEVKAKRGKRPTAFQFLQEIKPEAVAYITIKTTLACLTSADNTTVQAVASAIGRAIEDEARFGRIRDLEAKHFKKNVEEQLNKRVGHVYKKAFMQVVEADMLSKGLLGGEAWSSWHKEDSIHVGVRCIEMLIESTGMVSLHRQNAGVVGQDSETIELAPEYAEAIATRAGALAGISPMFQPCVVPPKPWTGITGGGYWAAGRKPLQLVRTRSLAALRRYEEVSMPEVIKAVNIAQNTAWRVNKKVLDVANAITQWQHCPVADVPAMDRGEMPARPLDIDTNEIALKAWKKEASAFYRKDKARVSRRLSMEFMLSQANKFANYKAIWFPQNMDWRGRVYAVPMFNPQGNDMTKGLLTFAQGKPIGEDGFYWLKIHGANTAGEDKVPFPQRIKFVEDNHTNIMECAKAPLENTWWAEQDSPFCFLAFCFEYAGVINHGLSYNCSLPLAFDGSCSGIQHFSAMLRDEIGGKAVNLLPSAEVQDIYRIVSDKVNEVLKQDLINGTSTTLETVTDKKTGEITERTKYGTKVMAQWWLEHGVNRGVTKRSVMTLAYGSKEFGFRDQVLSDTIQPAIDNGKGDMFLNPNQAAGYMAKLIWNAVSVTVVAAVEAMNWLKSAAKLLAAEVKDKKTDTVLRGRCAVHWVTPDGFPVWQEYKKPIQTRLNLMFLGQFRLQPTINTNKDSEIDAHKQESGIAPNFVHSQDGNHLRMTVVWAHEKYGIESFALIHDSFGTIPADAANLFKAVRETMVSTYESCDVLADFYDQFADQLHESQLDKMPALPAKGNLNLRDILKSDFAFA

SEQ ID NO: 241 - DNA, 2670 bp, synthetic construct
  misc_feature 1..2670: note = Variant of RNA polymerase
  source 1..2670: mol_type = other DNA
atgcaccatcaccatcaccatatgaacacgattaacatcgctaagaacgacttctctgacatcgaactggctgctatcccgttcaacactctggctgaccattacggtgagcgtttagctcgcgaacagttggcccttgagcatgagtcttacgagatgggtgaagcacgcttccgcaagatgtttgagcgtcaacttaaagctggtgaggttgcggataacgctgccgccaagcctctcatcactaccctactccctaagatgattgcacgcatcaacgactggtttgaggaagtgaaagctaagcgcggcaagcgcccgacagccttccagttcctgcaagaaatcaagccggaagccgtagcgtacatcaccattaagaccactctggcttgcctaaccagtgcggacaatacaaccgttcaggctgtagcaagcgcaatcggtcgggccattgaggacgaggctcgcttcggtcgtatccgtgaccttgaagctaagcacttcaagaaaaacgttgaggaacaactcaacaagcgcgtagggcacgtctacaagaaagcatttatgcaagttgtcgaggctgacatgctctctaagggtctactcggtggcgaggcgtggtcttcgtggcataaggaagactctattcatgtaggagtacgctgcatcgagatgctcattgagtcaaccggaatggttagcttacaccgccaaaatgctggcgtagtaggtcaagactctgagactatcgaactcgcacctgaatacgctgaggctatcgcaacccgtgcaggtgcgctggctggcatctctccgatgttccaaccttgcgtagttcctcctaagccgtggactggcattactggtggtggctattgggctgcggggcgcaaacccctgcagttagtacgtactcgcagtctggcggcgcttcgccgctatgaagaagtgtcgatgccggaggtcatcaaagcagtcaacattgcgcagaatacagcatggcgtgtgaacaagaaagttctcgacgtagcgaatgcaatcacccaatggcagcactgtccagtcgcggatgtgcctgcgatggatcgtggcgaaatgccagctcgtccgttggacatcgataccaacgagattgcacttaaagcgtggaagaaagaagcttccgcgttctaccgcaaagacaaagcacgcgttagccgtcgtctgtcaatggagtttatgttatctcaggcgaacaagtttgcgaattataaagcaatctggtttccgcaaaacatggattggcgtgggcgcgtgtacgctgtcccgatgttcaatcctcagggcaacgatatgacgaaaggcctgctgacctttgcgcagggtaaacccattggtgaagacggcttctattggctcaagattcatggcgcaaatacagctggagtggataaagtaccgtttccacaacgcatcaaatttgttgaggataaccatacgaatattatggaatgcgcgaaagcaccgctggaaaacacttggtgggcggaacaggactcgccgttctgttttctggcgttctgctttgagtatgctggcgtcatcaatcacggtctgtcgtacaactgtagcttgcctctggcatttgatggtagttgctccggcattcaacatttctcagcgatgttacgcgacgaaattggcggcaaagctgtgaatctcctcccatctgcggaagtgcaggatatttatggtatcgtcagcgacaaagttaacgaggtactgaaacaagatctgattaacggtacctctaccaccttggaaacggtgactgataagaagacaggcgaaattaccgaacgcacgaaatacgggaccaaagttatggcacagtggtggttagaacacggtgtgaatcgtggcgtcacgaaacgctcggttatgactttggcgtatgggagcaaagagtttggattccgcgatcaagtgctgagtgacaccattcaaccggcgatcgataacggcaaaggtgacatgtttctgaatccgaatcaggctgctggttacatggcgaaactgatctggaacgcagtgtccgtcaccgtagtcgcagcagttgaggcgatgaactggctgaaaagtgcggcgaaattacttgctgctgaagtgaaggataagaagacggatacagttctgcgtggccgctgcgcagtacattgggtgactcccgacggcttccctgtgtggcaggaatacaagaagcctattcagacgcgcttgaacctgatgttcctcggtcagttccgcttacagcctaccattaacaccaacaaagatagcgagattgatgcacacaaacaggagtctggtatcgctcctaactttgtacacagccaagacggtaaccaccttcgtatgactgtagtgtgggcacacgagaagtacggaatcgaatcttttgcactgattcacgactccttcggtaccattccggctgacgctgcgaacctgttcaaagcagtgcgcgaaactatggtttcgacatatgagtcttgtgatgtactggctgatttctacgaccagttcgctgaccagttgcacgagtctcaattggacaaaatgccagcacttccggctaaaggtaacttgaacctccgtgacatcttaaaatcggacttcgcgttcgcg

SEQ ID NO: 242 - protein, 890 aa, synthetic construct
  REGION 1..890: note = Variant of RNA polymerase
MHHHHHHMNTINIAKNDFSDIELAAIPFNTLADHYGERLAREQLALEHESYEMGEARFRKMFERQLKAGEVADNAAAKPLITTLLPKMIARINDWFEEVKAKRGKRPTAFQFLQEIKPEAVAYITIKTTLACLTSADNTTVQAVASAIGRAIEDEARFGRIRDLEAKHFKKNVEEQLNKRVGHVYKKAFMQVVEADMLSKGLLGGEAWSSWHKEDSIHVGVRCIEMLIESTGMVSLHRQNAGVVGQDSETIELAPEYAEAIATRAGALAGISPMFQPCVVPPKPWTGITGGGYWAAGRKPLQLVRTRSLAALRRYEEVSMPEVIKAVNIAQNTAWRVNKKVLDVANAITQWQHCPVADVPAMDRGEMPARPLDIDTNEIALKAWKKEASAFYRKDKARVSRRLSMEFMLSQANKFANYKAIWFPQNMDWRGRVYAVPMFNPQGNDMTKGLLTFAQGKPIGEDGFYWLKIHGANTAGVDKVPFPQRIKFVEDNHTNIMECAKAPLENTWWAEQDSPFCFLAFCFEYAGVINHGLSYNCSLPLAFDGSCSGIQHFSAMLRDEIGGKAVNLLPSAEVQDIYGIVSDKVNEVLKQDLINGTSTTLETVTDKKTGEITERTKYGTKVMAQWWLEHGVNRGVTKRSVMTLAYGSKEFGFRDQVLSDTIQPAIDNGKGDMFLNPNQAAGYMAKLIWNAVSVTVVAAVEAMNWLKSAAKLLAAEVKDKKTDTVLRGRCAVHWVTPDGFPVWQEYKKPIQTRLNLMFLGQFRLQPTINTNKDSEIDAHKQESGIAPNFVHSQDGNHLRMTVVWAHEKYGIESFALIHDSFGTIPADAANLFKAVRETMVSTYESCDVLADFYDQFADQLHESQLDKMPALPAKGNLNLRDILKSDFAFA

SEQ ID NO: 243 - DNA, 2670 bp, synthetic construct
  misc_feature 1..2670: note = Variant of RNA polymerase
  source 1..2670: mol_type = other DNA
atgcaccatcaccatcaccatatgaacacgattaacatcgctaagaacgacttctctgacatcgaactggctgctatcccgttcaacactctggctgaccattacggtgagcgtttagctcgcgaacagttggcccttgagcatgagtcttacgagatgggtgaagcacgcttccgcaagatgtttgagcgtcaacttaaagctggtgaggttgcggataacgctgccgccaagcctctcatcactaccctactccctaagatgattgcacgcatcaacgactggtttgaggaagtgaaagctaagcgcggcaagcgcccgacagccttccagttcctgcaagaaatcaagccggaagccgtagcgtacatcaccattaagaccactctggcttgcctaaccagtgcggacaatacaaccgttcaggctgtagcaagcgcaatcggtcgggccattgaggacgaggctcgcttcggtcgtatccgtgaccttgaagctaagcacttcaagaaaaacgttgaggaacaactcaacaagcgcgtagggcacgtctacaagaaagcatttatgcaagttgtcgaggctgacatgctctctaagggtctactcggtggcgaggcgtggtcttcgtggcataaggaagactctattcatgtaggagtacgctgcatcgagatgctcattgagtcaaccggaatggttagcttacaccgccaaaatgctggcgtagtaggtcaagactctgagactatcgaactcgcacctgaatacgctgaggctatcgcaacccgtgcaggtgcgctggctggcatctctccgatgttccaaccttgcgtagttcctcctaagccgtggactggcattactggtggtggctattgggctgcggggcgcaaacccctgcagttagtacgtactcgcagtctggcggcgcttcgccgctatgaagaagtgtcgatgccggaggtcatcaaagcactgaacattgcgcagaatacagcatggcgtgtgaacaagaaagttctcgacgtagcgaatgcaatcacccaatggcagcactgtccagtcgcggatgtgcctgcgatggatcgtggcgaaatgccagctcgtccgttggacatcgataccaacgagattgcacttaaagcgtggaagaaagaagcttccgcgttctaccgcaaagacaaagcacgcgttagccgtcgtctgtcaatggagtttatgttatctcaggcgaacaagtttgcgaattataaagcaatctggtttccgcaaaacatggattggcgtgggcgcgtgtacgctgtcccgatgttcaatcctcagggcaacgatatgacgaaaggcctgctgacctttgcgcagggtaaacccattggtgaagacggcttctattggctcaagattcatggcgcaaatacagctggagtggataaagtaccgtttccacaacgcatcaaatttgttgaggataaccatacgaatattatggaatgcgcgaaagcaccgctggaaaacacttggtgggcggaacaggactcgccgttctgttttctggcgttctgctttgagtatgctggcgtcatcaatcacggtctgtcgtacaactgtagcttgcctctggcatttgatggtagttgctccggcattcaacatttctcagcgatgttacgcgacgaaattggcggcaaagctgtgaatctcctcccatctgcggaagtgcaggatatttatcgtatcgtcagcgacaaagttaacgaggtactgaaacaagatctgattaacggtacctctaccaccttggaaacggtgactgataagaagacaggcgaaattaccgaacgcacgaaatacgggaccaaagttatggcacagtggtggttagaacacggtgtgaatcgtggcgtcacgaaacgctcggttatgactttggcgtatgggagcaaagagtttggattccgcgatcaagtgctgagtgacaccattcaaccggcgatcgataacggcaaaggtgacatgtttctgaatccgaatcaggctgctggttacatggcgaaactgatctggaacgcagtgtccgtcaccgtagtcgcagcagttgaggcgatgaactggctgaaaagtgcggcgaaattacttgctgctgaagtgaaggataagaagacggatacagttctgcgtggccgctgcgcagtacattgggtgactcccgacggcttccctgtgtggcaggaatacaagaagcctattcagacgcgcttgaacctgatgttcctcggtcagttccgcttacagcctaccattaacaccaacaaagatagcgagattgatgcacacaaacaggagtctggtatcgctcctaactttgtacacagccaagacggtaaccaccttcgtatgactgtagtgtgggcacacgagaagtacggaatcgaatcttttgcactgattcacgactccttcggtaccattccggctgacgctgcgaacctgttcaaagcagtgcgcgaaactatggtttcgacatatgagtcttgtgatgtactggctgatttctacgaccagttcgctgaccagttgcacgagtctcaattggacaaaatgccagcacttccggctaaaggtaacttgaacctccgtgacatcttaaaatcggacttcgcgttcgcg

SEQ ID NO: 244 - protein, 890 aa, synthetic construct
  REGION 1..890: note = Variant of RNA polymerase
MHHHHHHMNTINIAKNDFSDIELAAIPFNTLADHYGERLAREQLALEHESYEMGEARFRKMFERQLKAGEVADNAAAKPLITTLLPKMIARINDWFEEVKAKRGKRPTAFQFLQEIKPEAVAYITIKTTLACLTSADNTTVQAVASAIGRAIEDEARFGRIRDLEAKHFKKNVEEQLNKRVGHVYKKAFMQVVEADMLSKGLLGGEAWSSWHKEDSIHVGVRCIEMLIESTGMVSLHRQNAGVVGQDSETIELAPEYAEAIATRAGALAGISPMFQPCVVPPKPWTGITGGGYWAAGRKPLQLVRTRSLAALRRYEEVSMPEVIKALNIAQNTAWRVNKKVLDVANAITQWQHCPVADVPAMDRGEMPARPLDIDTNEIALKAWKKEASAFYRKDKARVSRRLSMEFMLSQANKFANYKAIWFPQNMDWRGRVYAVPMFNPQGNDMTKGLLTFAQGKPIGEDGFYWLKIHGANTAGVDKVPFPQRIKFVEDNHTNIMECAKAPLENTWWAEQDSPFCFLAFCFEYAGVINHGLSYNCSLPLAFDGSCSGIQHFSAMLRDEIGGKAVNLLPSAEVQDIYRIVSDKVNEVLKQDLINGTSTTLETVTDKKTGEITERTKYGTKVMAQWWLEHGVNRGVTKRSVMTLAYGSKEFGFRDQVLSDTIQPAIDNGKGDMFLNPNQAAGYMAKLIWNAVSVTVVAAVEAMNWLKSAAKLLAAEVKDKKTDTVLRGRCAVHWVTPDGFPVWQEYKKPIQTRLNLMFLGQFRLQPTINTNKDSEIDAHKQESGIAPNFVHSQDGNHLRMTVVWAHEKYGIESFALIHDSFGTIPADAANLFKAVRETMVSTYESCDVLADFYDQFADQLHESQLDKMPALPAKGNLNLRDILKSDFAFA

SEQ ID NO: 245 - DNA, 2670 bp, synthetic construct
  misc_feature 1..2670: note = Variant of RNA polymerase
  source 1..2670: mol_type = other DNA
atgcaccatcaccatcaccatatgaacacgattaacatcgctaagaacgacttctctgacatcgaactggctgctatcccgttcaacactctggctgaccattacggtgagcgtttagctcgcgaacagttggcccttgagcatgagtcttacgagatgggtgaagcacgcttccgcaagatgtttgagcgtcaacttaaagctggtgaggttgcggataacgctgccgccaagcctctcatcactaccctactccctaagatgattgcacgcatcaacgactggtttgaggaagtgaaagctaagcgcggcaagcgcccgacagccttccagttcctgcaagaaatcaagccggaagccgtagcgtacatcaccattaagaccactctggcttgcctaaccagtgcggacaatacaaccgttcaggctgtagcaagcgcaatcggtcgggccattgaggacgaggctcgcttcggtcgtatccgtgaccttgaagctaagcacttcaagaaaaacgttgaggaacaactcaacaagcgcgtagggcacacttacaagaaagcatttatgcaagttgtcgaggctgacatgctctctaagggtctactcggtggcgaggcgtggtcttcgtggcataaggaagactctattcatgtaggagtacgctgcatcgagatgctcattgagtcaaccggaatggttagcttacaccgccaaaatgctggcgtagtaggtcaagactctgagactatcgaactcgcacctgaatacgctgaggctatcgcaacccgtgcaggtgcgctggctggcatctctccgatgttccaaccttgcgtagttcctcctaagccgtggactggcattactggtggtggctattgggctgcggggcgcaaacccctgcagttagtacgtactcgcagtctggcggcgcttcgccgctatgaagaagtgtcgatgccggaggtcatcaaagcagtcaacattgcgcagaatacagcatggcgtgtgaacaagaaagttctcgacgtagcgaatgcaatcacccaatggcagcactgtccagtcgcggatgtgcctgcgatggatcgtggcgaaatgccagctcgtccgttggacatcgataccaacgagattgcacttaaagcgtggaagaaagaagcttccgcgttctaccgcaaagacaaagcacgcgttagccgtcgtctgtcaatggagtttatgttatctcaggcgaacaagtttgcgaattataaagcaatctggtttccgcaaaacatggattggcgtgggcgcgtgtacgctgtcccgatgttcaatcctcagggcaacgatatgacgaaaggcctgctgacctttgcgcagggtaaacccattggtgaagacggcttctattggctcaagattcatggcgcaaatacagctggagtggataaagtaccgtttccacaacgcatcaaatttgttgaggataaccatacgaatattatggaatgcgcgaaagcaccgctggaaaacacttggtgggcggaacaggactcgccgttctgttttctggcgttctgctttgagtatgctggcgtcatcaatcacggtctgtcgtacaactgtagcttgcctctggcatttgatggtagttgctccggcattcaacatttctcagcgatgttacgcgacgaaattggcggcaaagctgtgaatctcctcccatctgcggaagtgcaggatatttatcgtatcgtcagcgacaaagttaacgaggtactgaaacaagatctgattaacggtacctctaccaccttggaaacggtgactgataagaagacaggcgaaattaccgaacgcacgaaatacgggaccaaagttatggcacagtggtggttagaacacggtgtgaatcgtggcgtcacgaaacgctcggttatgactttggcgtatgggagcaaagagtttggattccgcgatcaagtgctgagtgacaccattcaaccggcgatcgataacggcaaaggtgacatgtttctgaatccgaatcaggctgctggttacatggcgaaactgatctggaacgcagtgtccgtcaccgtagtcgcagcagttgaggcgatgaactggctgaaaagtgcggcgaaattacttgctgctgaagtgaaggataagaagacggatacagttctgcgtggccgctgcgcagtacattgggtgactcccgacggcttccctgtgtggcaggaatacaagaagcctattcagacgcgcttgaacctgatgttcctcggtcagttccgcttacagcctaccattaacaccaacaaagatagcgagattgatgcacacaaacaggagtctggtatcgctcctaactttgtacacagccaagacggtaaccaccttcgtatgactgtagtgtgggcacacgagaagtacggaatcgaatcttttgcactgattcacgactccttcggtaccattccggctgacgctgcgaacctgttcaaagcagtgcgcgaaactatggtttcgacatatgagtcttgtgatgtactggctgatttctacgaccagttcgctgaccagttgcacgagtctcaattggacaaaatgccagcacttccggctaaaggtaacttgaacctccgtgacatcttaaaatcggacttcgcgttcgcg

SEQ ID NO: 246 - protein, 890 aa, synthetic construct
  REGION 1..890: note = Variant of RNA polymerase
MHHHHHHMNTINIAKNDFSDIELAAIPFNTLADHYGERLAREQLALEHESYEMGEARFRKMFERQLKAGEVADNAAAKPLITTLLPKMIARINDWFEEVKAKRGKRPTAFQFLQEIKPEAVAYITIKTTLACLTSADNTTVQAVASAIGRAIEDEARFGRIRDLEAKHFKKNVEEQLNKRVGHTYKKAFMQVVEADMLSKGLLGGEAWSSWHKEDSIHVGVRCIEMLIESTGMVSLHRQNAGVVGQDSETIELAPEYAEAIATRAGALAGISPMFQPCVVPPKPWTGITGGGYWAAGRKPLQLVRTRSLAALRRYEEVSMPEVIKAVNIAQNTAWRVNKKVLDVANAITQWQHCPVADVPAMDRGEMPARPLDIDTNEIALKAWKKEASAFYRKDKARVSRRLSMEFMLSQANKFANYKAIWFPQNMDWRGRVYAVPMFNPQGNDMTKGLLTFAQGKPIGEDGFYWLKIHGANTAGVDKVPFPQRIKFVEDNHTNIMECAKAPLENTWWAEQDSPFCFLAFCFEYAGVINHGLSYNCSLPLAFDGSCSGIQHFSAMLRDEIGGKAVNLLPSAEVQDIYRIVSDKVNEVLKQDLINGTSTTLETVTDKKTGEITERTKYGTKVMAQWWLEHGVNRGVTKRSVMTLAYGSKEFGFRDQVLSDTIQPAIDNGKGDMFLNPNQAAGYMAKLIWNAVSVTVVAAVEAMNWLKSAAKLLAAEVKDKKTDTVLRGRCAVHWVTPDGFPVWQEYKKPIQTRLNLMFLGQFRLQPTINTNKDSEIDAHKQESGIAPNFVHSQDGNHLRMTVVWAHEKYGIESFALIHDSFGTIPADAANLFKAVRETMVSTYESCDVLADFYDQFADQLHESQLDKMPALPAKGNLNLRDILKSDFAFA

SEQ ID NO: 247 - DNA, 2670 bp, synthetic construct
  misc_feature 1..2670: note = Variant of RNA polymerase
  source 1..2670: mol_type = other DNA
atgcaccatcaccatcaccatatgaacacgattaacatcgctaagaacgacttctctgacatcgaactggctgctatcccgttcaacactctggctgaccattacggtgagcgtttagctcgcgaacagttggcccttgagcatgagtcttacgagatgggtgaagcacgcttccgcaagatgtttgagcgtcaacttaaagctggtgaggttgcggataacgctgccgccaagcctctcatcactaccctactccctaagatgattgcacgcatcaacgactggtttgaggaagtgaaagctaagcgcggcaagcgcccgacagccttccagttcctgcaagaaatcaagccggaagccgtagcgtacatcaccattaagaccactctggcttgcctaaccagtgcggacaatacaaccgttcaggctgtagcaagcgcaatcggtcgggccattgaggacgaggctcgcttcggtcgtatccgtgaccttgaagctaagcacttcaagaaaaacgttgaggaacaactcaacaagcgcgtagggcacgtctacaagaaagcatttatgcaagttgtcgaggctgacatgctctctaagggtctactcggtggcgaggcgtggtcttcgtggcataaggaagactctattcatgtaggagtacgctgcatcgagatgctcattgagtcaaccggaatggttagcttacaccgccaaaatgctggcgtagtaggtcaagactctgagactatcgaactcgcacctgaatacgctgaggctatcgcaacccgtgcaggtgcgctggctggcatctctccgatgttccaaccttgcgtagttcctcctaagccgtggactggcattactggtggtggctattgggctgcggggcgcaaacccctgcagttagtacgtactcgcagtctggcggcgcttcgccgctatgaagaagtggatatgccggaggtcatcaaagcagtcaacattgcgcagaatacagcatggcgtgtgaacaagaaagttctcgacgtagcgaatgcaatcacccaatggcagcactgtccagtcgcggatgtgcctgcgatggatcgtggcgaaatgccagctcgtccgttggacatcgataccaacgagattgcacttaaagcgtggaagaaagaagcttccgcgttctaccgcaaagacaaagcacgcgttagccgtcgtctgtcaatggagtttatgttatctcaggcgaacaagtttgcgaattataaagcaatctggtttccgcaaaacatggattggcgtgggcgcgtgtacgctgtcccgatgttcaatcctcagggcaacgatatgacgaaaggcctgctgacctttgcgcagggtaaacccattggtgaagacggcttctattggctcaagattcatggcgcaaatacagctggagtggataaagtaccgtttccacaacgcatcaaatttgttgaggataaccatacgaatattatggaatgcgcgaaagcaccgctggaaaacacttggtgggcggaacaggactcgccgttctgttttctggcgttctgctttgagtatgctggcgtcatcaatcacggtctgtcgtacaactgtagcttgcctctggcatttgatggtagttgctccggcattcaacatttctcagcgatgttacgcgacgaaattggcggcaaagctgtgaatctcctcccatctgcggaagtgcaggatatttatcgtatcgtcagcgacaaagttaacgaggtactgaaacaagatctgattaacggtacctctaccaccttggaaacggtgactgataagaagacaggcgaaattaccgaacgcacgaaatacgggaccaaagttatggcacagtggtggttagaacacggtgtgaatcgtggcgtcacgaaacgctcggttatgactttggcgtatgggagcaaagagtttggattccgcgatcaagtgctgagtgacaccattcaaccggcgatcgataacggcaaaggtgacatgtttctgaatccgaatcaggctgctggttacatggcgaaactgatctggaacgcagtgtccgtcaccgtagtcgcagcagttgaggcgatgaactggctgaaaagtgcggcgaaattacttgctgctgaagtgaaggataagaagacggatacagttctgcgtggccgctgcgcagtacattgggtgactcccgacggcttccctgtgtggcaggaatacaagaagcctattcagacgcgcttgaacctgatgttcctcggtcagttccgcttacagcctaccattaacaccaacaaagatagcgagattgatgcacacaaacaggagtctggtatcgctcctaactttgtacacagccaagacggtaaccaccttcgtatgactgtagtgtgggcacacgagaagtacggaatcgaatcttttgcactgattcacgactccttcggtaccattccggctgacgctgcgaacctgttcaaagcagtgcgcgaaactatggtttcgacatatgagtcttgtgatgtactggctgatttctacgaccagttcgctgaccagttgcacgagtctcaattggacaaaatgccagcacttccggctaaaggtaacttgaacctccgtgacatcttaaaatcggacttcgcgttcgcg

SEQ ID NO: 248 - protein, 890 aa, synthetic construct
  REGION 1..890: note = Variant of RNA polymerase
MHHHHHHMNTINIAKNDFSDIELAAIPFNTLADHYGERLAREQLALEHESYEMGEARFRKMFERQLKAGEVADNAAAKPLITTLLPKMIARINDWFEEVKAKRGKRPTAFQFLQEIKPEAVAYITIKTTLACLTSADNTTVQAVASAIGRAIEDEARFGRIRDLEAKHFKKNVEEQLNKRVGHVYKKAFMQVVEADMLSKGLLGGEAWSSWHKEDSIHVGVRCIEMLIESTGMVSLHRQNAGVVGQDSETIELAPEYAEAIATRAGALAGISPMFQPCVVPPKPWTGITGGGYWAAGRKPLQLVRTRSLAALRRYEEVDMPEVIKAVNIAQNTAWRVNKKVLDVANAITQWQHCPVADVPAMDRGEMPARPLDIDTNEIALKAWKKEASAFYRKDKARVSRRLSMEFMLSQANKFANYKAIWFPQNMDWRGRVYAVPMFNPQGNDMTKGLLTFAQGKPIGEDGFYWLKIHGANTAGVDKVPFPQRIKFVEDNHTNIMECAKAPLENTWWAEQDSPFCFLAFCFEYAGVINHGLSYNCSLPLAFDGSCSGIQHFSAMLRDEIGGKAVNLLPSAEVQDIYRIVSDKVNEVLKQDLINGTSTTLETVTDKKTGEITERTKYGTKVMAQWWLEHGVNRGVTKRSVMTLAYGSKEFGFRDQVLSDTIQPAIDNGKGDMFLNPNQAAGYMAKLIWNAVSVTVVAAVEAMNWLKSAAKLLAAEVKDKKTDTVLRGRCAVHWVTPDGFPVWQEYKKPIQTRLNLMFLGQFRLQPTINTNKDSEIDAHKQESGIAPNFVHSQDGNHLRMTVVWAHEKYGIESFALIHDSFGTIPADAANLFKAVRETMVSTYESCDVLADFYDQFADQLHESQLDKMPALPAKGNLNLRDILKSDFAFA

SEQ ID NO: 249 - DNA, 2670 bp, synthetic construct
  misc_feature 1..2670: note = Variant of RNA polymerase
  source 1..2670: mol_type = other DNA
atgcaccatcaccatcaccatatgaacacgattaacatcgctaagaacgacttctctgacatcgaactggctgctatcccgttcaacactctggctgaccattacggtgagcgtttagctcgcgaacagttggcccttgagcatgagtcttacgagatgggtgaagcacgcttccgcaagatgtttgagcgtcaacttaaagctggtgaggttgcggataacgctgccgccaagcctctcatcactaccctactccctaagatgattgcacgcatcaacgactggtttgaggaagtgaaagctaagcgcggcaagcgcccgacagccttccagttcctgcaagaaatcaagccggaagccgtagcgtacatcaccattaagaccactctggcttgcctaaccagtgcggacaatacaaccgttcaggctgtagcaagcgcaatcggtcgggccattgaggacgaggctcgcttcggtcgtatccgtgaccttgaagctaagcacttcaagaaaaacgttgaggaacaactcaacaagcgcgtagggcacgtctacaagaaagcatttatgcaagttgtcgaggctgacatgctctctaagggtctactcggtggcgaggcgtggtcttcgtggcataaggaagactctattcatgtaggagtacgctgcatcgagatgctcattgagtcaaccggaatggttagcttacaccgccaaaatgctggcgtagtaggtcaagactctgagactatcgaactcgcacctgaatacgctgaggctatcgcaacccgtgcaggtgcgctggctggcatctctccgatgttccaaccttgcgtagttcctcctaagccgtggactggcattactggtggtggctattgggctgcggggcgcaaacccctgcagttagtacgtactcgcagtctggcggcgcttcgccgctatgaagaagtgtcgatgccggaggtcatcaaagcagtcaacattgcgcagaatacagcatggcgtgtgaacaagaaagttctcgacgtagcgaatgcaatcacccaatggcagcactgtccagtcgcggatgtgcctgcgatggatcgtggcgaaatgccagctcgtccgttggacatcgataccaacgagattgcacttaaagcgtggaagaaagaagcttccgcgttctaccgcaaagacaaagcacgcgttagccgtcgtctgtcaatggagtttatgttatctcaggcgaacaagtttgcgaattataaagcaatctggtttccgcaaaacatggattggcgtgggcgcgtgtacgctgtcccgatgttcaatcctcagggcaacgatatgacgaaaggcctgctgacctttgcgcagggtaaacccattggtgaagacggcttctattggctcaagattcatggcgcaaatacagctggagtggataaagtaccgtttccacaacgcatcaaatttgttgaggataaccatacgaatattatggaatgcgcgaaagcaccgctggaaaacacttggtgggcggaacaggactcgccgttctgttttctggcgttctgctttgagtatgctggcgtcatcaatcacggtctgtcgtacaactgtagcttgcctctggcatttgatggtagttgctccggcattcaacatttctcagcgatgttacgcgacgaaattggcggcaaagctgtgaatctcctcccatctgcggaagtgcaggatatttatcgtatcgtcagcgacaaagttaacgaggtactgaaacaagatctgattaacggtacctctaccaccttggaaacggtgactgataagaagacaggcgaaattaccgaacgcacgaaatacgggaccaaagttatggcacagtggtggttagaacacggtgtgaatcgtggcgtcacgaaacgctcggttatgactttggcgtatgggagcaaagagtttggattccgcgatcaagtgctgagtgacaccattcaaccggcgatcgatagtggcaaaggtgacatgtttctgaatccgaatcaggctgctggttacatggcgaaactgatctggaacgcagtgtccgtcaccgtagtcgcagcagttgaggcgatgaactggctgaaaagtgcggcgaaattacttgctgctgaagtgaaggataagaagacggatacagttctgcgtggccgctgcgcagtacattgggtgactcccgacggcttccctgtgtggcaggaatacaagaagcctattcagacgcgcttgaacctgatgttcctcggtcagttccgcttacagcctaccattaacaccaacaaagatagcgagattgatgcacacaaacaggagtctggtatcgctcctaactttgtacacagccaagacggtaaccaccttcgtatgactgtagtgtgggcacacgagaagtacggaatcgaatcttttgcactgattcacgactccttcggtaccattccggctgacgctgcgaacctgttcaaagcagtgcgcgaaactatggtttcgacatatgagtcttgtgatgtactggctgatttctacgaccagttcgctgaccagttgcacgagtctcaattggacaaaatgccagcacttccggctaaaggtaacttgaacctccgtgacatcttaaaatcggacttcgcgttcgcg

SEQ ID NO: 250 - protein, 890 aa, synthetic construct
  REGION 1..890: note = Variant of RNA polymerase
MHHHHHHMNTINIAKNDFSDIELAAIPFNTLADHYGERLAREQLALEHESYEMGEARFRKMFERQLKAGEVADNAAAKPLITTLLPKMIARINDWFEEVKAKRGKRPTAFQFLQEIKPEAVAYITIKTTLACLTSADNTTVQAVASAIGRAIEDEARFGRIRDLEAKHFKKNVEEQLNKRVGHVYKKAFMQVVEADMLSKGLLGGEAWSSWHKEDSIHVGVRCIEMLIESTGMVSLHRQNAGVVGQDSETIELAPEYAEAIATRAGALAGISPMFQPCVVPPKPWTGITGGGYWAAGRKPLQLVRTRSLAALRRYEEVSMPEVIKAVNIAQNTAWRVNKKVLDVANAITQWQHCPVADVPAMDRGEMPARPLDIDTNEIALKAWKKEASAFYRKDKARVSRRLSMEFMLSQANKFANYKAIWFPQNMDWRGRVYAVPMFNPQGNDMTKGLLTFAQGKPIGEDGFYWLKIHGANTAGVDKVPFPQRIKFVEDNHTNIMECAKAPLENTWWAEQDSPFCFLAFCFEYAGVINHGLSYNCSLPLAFDGSCSGIQHFSAMLRDEIGGKAVNLLPSAEVQDIYRIVSDKVNEVLKQDLINGTSTTLETVTDKKTGEITERTKYGTKVMAQWWLEHGVNRGVTKRSVMTLAYGSKEFGFRDQVLSDTIQPAIDSGKGDMFLNPNQAAGYMAKLIWNAVSVTVVAAVEAMNWLKSAAKLLAAEVKDKKTDTVLRGRCAVHWVTPDGFPVWQEYKKPIQTRLNLMFLGQFRLQPTINTNKDSEIDAHKQESGIAPNFVHSQDGNHLRMTVVWAHEKYGIESFALIHDSFGTIPADAANLFKAVRETMVSTYESCDVLADFYDQFADQLHESQLDKMPALPAKGNLNLRDILKSDFAFA

SEQ ID NO: 251 - DNA, 2670 bp, synthetic construct
  misc_feature 1..2670: note = Variant of RNA polymerase
  source 1..2670: mol_type = other DNA
atgcaccatcaccatcaccatatgaacacgattaacatcgctaagaacgacttctctgacatcgaactggctgctatcccgttcaacactctggctgaccattacggtgagcgtttagctcgcgaacagttggcccttgagcatgagtcttacgagatgggtgaagcacgcttccgcaagatgtttgagcgtcaacttaaagctggtgaggttgcggataacgctgccgccaagcctctcatcactaccctactccctaagatgattgcacgcatcaacgactggtttgaggaagtgaaagctaagcgcggcaagcgcccgacagccttccagttcctgcaagaaatcaagccggaagccgtagcgtacatcaccattaagaccactctggcttgcctaaccagtgcggacaatacaaccgttcaggctgtagcaagcgcaatcggtcgggccattgaggacgaggctcgcttcggtcgtatccgtgaccttgaagctaagcacttcaagaaaaacgttgaggaacaactcaacaagcgcgtagggcacgtctacaagaaagcatttatgcaagttgtcgaggctgacatgctctctaagggtctactcggtggcgaggcgtggtcttcgtggcataaggaagactctattcatgtaggagtacgctgcatcgagatgctcattgagtcaaccggaatggttagcttacaccgccaaaatgctggcgtagtaggtcaagactctgagactatcgaactcgcacctgaatacgctgaggctatcgcaacccgtgcaggtgcgctggctggcatctctccgatgttccaaccttgcgtagttcctcctaagccgtggactggcattactggtggtggctattgggctgcggggcgcaaacccctgcagttagtacgtactcgcagtctggcggcgcttcgccgctatgaagaagtgtcgatgccggaggtcatcaaagcagtcaacattgcgcagaatacagcatggcgtgtgaacaagaaagttctcgacgtagcgaatgcaatcacccaatggcagcactgtccagtcgcggatgtgcctgcgatggatcgtggcgaaatgccagctcgtccgttggacatcgataccaacgagattgcacttaaagcgtggaagaaagaagcttccgcgttctaccgcaaagacaaagcacgcgttagccgtcgtctgtcaatggagtttatgttatctcaggcgaacaagtttgcgaattataaagcaatctggtttccgcaaaacatggattggcgtgggcgcgtgtacgctgtcccgatgttcaatcctcagggcaacgatatgacgaaaggcctgctgacctttgcgcagggtaaacccattggtgaagacggcttctattggctcaagattcatggcgcaaatacagctggagtggataaagtaccgtttccacaacgcatcaaatttgttgaggataaccatacgaatattatggaatgcgcgaaagcaccgctggaaaacacttggtgggcggaacaggactcgccgttctgttttctggcgttctgctttgagtatgctggcgtcatcaatcacggtctgtcgtacaactgtagcttgcctctggcatttgatggtagttgctccggcattcaacatttctcagcgatgttacgcgacgaaattggcggcaaagctgtgaatctcctcccatctgcggaagtgcaggatatttatcgtatcgtcagcgacaaagttaacgaggtactgaaacaagatctgattaacggtacctctaccaccttggaaacggtgactgataagaagacaggcgaaattaccgaacgcacgaaatacgggaccaaagagatggcacagtggtggttagaacacggtgtgaatcgtggcgtcacgaaacgctcggttatgactttggtgtatgggagcaaagagtttggattccgcgatcaagtgctgagtgacaccattcaaccggcgatcgataacggcaaaggtgacatgtttctgaatccgaatcaggctgctggttacatggcgaaactgatctggaacgcagtgtccgtcaccgtagtcgcagcagttgaggcgatgaactggctgaaaagtgcggcgaaattacttgctgctgaagtgaaggataagaagacggatacagttctgcgtggccgctgcgcagtacattgggtgactcccgacggcttccctgtgtggcaggaatacaagaagcctattcagacgcgcttgaacctgatgttcctcggtcagttccgcttacagcctaccattaacaccaacaaagatagcgagattgatgcacacaaacaggagtctggtatcgctcctaactttgtacacagccaagacggtaaccaccttcgtatgactgtagtgtgggcacacgagaagtacggaatcgaatcttttgcactgattcacgactccttcggtaccattccggctgacgctgcgaacctgttcaaagcagtgcgcgaaactatggtttcgacatatgagtcttgtgatgtactggctgatttctacgaccagttcgctgaccagttgcacgagtctcaattggacaaaatgccagcacttccggctaaaggtaacttgaacctccgtgacatcttaaaatcggacttcgcgttcgcg

SEQ ID NO: 252 - protein, 890 aa, synthetic construct
  REGION 1..890: note = Variant of RNA polymerase
MHHHHHHMNTINIAKNDFSDIELAAIPFNTLADHYGERLAREQLALEHESYEMGEARFRKMFERQLKAGEVADNAAAKPLITTLLPKMIARINDWFEEVKAKRGKRPTAFQFLQEIKPEAVAYITIKTTLACLTSADNTTVQAVASAIGRAIEDEARFGRIRDLEAKHFKKNVEEQLNKRVGHVYKKAFMQVVEADMLSKGLLGGEAWSSWHKEDSIHVGVRCIEMLIESTGMVSLHRQNAGVVGQDSETIELAPEYAEAIATRAGALAGISPMFQPCVVPPKPWTGITGGGYWAAGRKPLQLVRTRSLAALRRYEEVSMPEVIKAVNIAQNTAWRVNKKVLDVANAITQWQHCPVADVPAMDRGEMPARPLDIDTNEIALKAWKKEASAFYRKDKARVSRRLSMEFMLSQANKFANYKAIWFPQNMDWRGRVYAVPMFNPQGNDMTKGLLTFAQGKPIGEDGFYWLKIHGANTAGVDKVPFPQRIKFVEDNHTNIMECAKAPLENTWWAEQDSPFCFLAFCFEYAGVINHGLSYNCSLPLAFDGSCSGIQHFSAMLRDEIGGKAVNLLPSAEVQDIYRIVSDKVNEVLKQDLINGTSTTLETVTDKKTGEITERTKYGTKEMAQWWLEHGVNRGVTKRSVMTLVYGSKEFGFRDQVLSDTIQPAIDNGKGDMFLNPNQAAGYMAKLIWNAVSVTVVAAVEAMNWLKSAAKLLAAEVKDKKTDTVLRGRCAVHWVTPDGFPVWQEYKKPIQTRLNLMFLGQFRLQPTINTNKDSEIDAHKQESGIAPNFVHSQDGNHLRMTVVWAHEKYGIESFALIHDSFGTIPADAANLFKAVRETMVSTYESCDVLADFYDQFADQLHESQLDKMPALPAKGNLNLRDILKSDFAFA

SEQ ID NO: 253 - DNA, 2670 bp, synthetic construct
  misc_feature 1..2670: note = Variant of RNA polymerase
  source 1..2670: mol_type = other DNA
atgcaccatcaccatcaccatatgaacacgattaacatcgctaagaacgacttctctgacatcgaactggctgctatcccgttcaacactctggctgaccattacggtgagcgtttagctcgcgaacagttggcccttgagcatgagtcttacgagatgggtgaagcacgcttccgcaagatgtttgagcgtcaacttaaagctggtgaggttgcggataacgctgccgccaagcctctcatcactaccctactccctaagatgattgcacgcatcaacgactggtttgaggaagtgaaagctaagcgcggcaagcgcccgacagccttccagttcctgcaagaaatcaagccggaagccgtagcgtacatcaccattaagaccactctggcttgcctaaccagtgcggacaatacaaccgttcaggctgtagcaagcgcaatcggtcgggccattgaggacgaggctcgcttcggtcgtatccgtgaccttgaagctaagcacttcaagaaaaacgttgaggaacaactcaacaagcgcgtagggcacgtctacaagaaagcatttatgcaagttgtcgaggctgacatgctctctaagggtctactcggtggcgaggcgtggtcttcgtggcataaggaagactctattcatgtaggagtacgctgcatcgagatgctcattgagtcaaccggaatggttagcttacaccgccaaaatgctggcgtagtaggtcaagactctgagactatcgaactcgcacctgaatacgctgaggctatcgcaacccgtgcaggtgcgctggctggcatctctccgatgttccaaccttgcgtagttcctcctaagccgtggactggcattactggtggtggctattgggctgcggggcgcaaacccctgcagttagtacgtactcgcagtctggcggcgcttcgccgctatgaagaagtgtcgatgccggaggtcatcaaagcagtcaacattgcgcagaatacagcatggcgtgtgaacaagaaagttctcgacgtagcgaatgcaatcacccaatggcagcactgtccagtcgcggatgtgcctgcgatggatcgtggcgaaatgccagctcgtccgttggacatcgataccaacgagattgcacttaaagcgtggaagaaagaagcttccgcgttctaccgcaaagacaaagcacgcgttagccgtcgtctgtcaatggagtttatgttatctcaggcgaacaagtttgcgaattataaagcaatctggtttccgcaaaacatggattggcgtgggcgcgtgtacgctgtcccgatgttcaatcctcagggcaacgatatgacgaaaggcctgctgacctttgcgcagggtaaacccattggtgaagacggcttctattggctcaagattcatggcgcaaatacagctggagtggataaagtaccgtttccacaacgcatcaaatttgttgaggataaccatacgaatattatggaatgcgcgaaagcaccgctggaaaacacttggtgggcggaacaggactcgccgttctgttttctggcgttctgctttgagtatgctggcgtcatcaatcacggtctgtcgtacaactgtagcttgcctctggcatttgatggtagttgctccggcattcaacatttctcagcgatgttacgcgacgaaattggcggcaaagctgtgaatctcctcccatctgcggaagtgcaggatatttatcgtatcgtcagcgacaaagttaacgaggtactgaaacaagatctgattaacggtacctctaccaccttggaaacggtgactgataagaagacaggcgaaattaccgaacgcacgaaatacgggaccaaagttatggcacagtggtggttagaacacggtgtgaatcgtggcgtcacgaaacgctcggttatgactttggtgtatgggagcaaagagtttggattccgcgatcaagtgctgagtgacaccattcaaccggcgatcgataacggcaaaggtgacatgtttctgaatccgaatcaggctgctggttacatggcgaaactgatctggaacgcagtgtccgtcaccgtagtcgcagcagttgaggcgatgaactggctgaaaagtgcggcgaaattacttgctgctgaagtgaaggataagaagacggatacagttctgcgtggccgctgcgcagtacattgggtgactcccgacggcttccctgtgtggcaggaatacaagaagcctattcagacgcgcttgaacctgatgttcctcggtcagttccgcttacagcctaccattaacaccaacaaagatagcgagattgatgcacacaaacaggagtctggtatcgctcctaactttgtacacagccaagacggtaaccaccttcgtatgactgtagtgtgggcacacgagaagtacggaatcgaatcttttgcactgattcacgactccttcggtaccattccggctgacgctgcgaacaggttcaaagcagtgcgcgaaactatggtttcgacatatgagtcttgtgatgtactggctgatttctacgaccagttcgctgaccagttgcacgagtctcaattggacaaaatgccagcacttccggctaaaggtaacttgaacctccgtgacatcttaaaatcggacttcgcgttcgcg

SEQ ID NO: 254 - protein, 890 aa, synthetic construct
  REGION 1..890: note = Variant of RNA polymerase
MHHHHHHMNTINIAKNDFSDIELAAIPFNTLADHYGERLAREQLALEHESYEMGEARFRKMFERQLKAGEVADNAAAKPLITTLLPKMIARINDWFEEVKAKRGKRPTAFQFLQEIKPEAVAYITIKTTLACLTSADNTTVQAVASAIGRAIEDEARFGRIRDLEAKHFKKNVEEQLNKRVGHVYKKAFMQVVEADMLSKGLLGGEAWSSWHKEDSIHVGVRCIEMLIESTGMVSLHRQNAGVVGQDSETIELAPEYAEAIATRAGALAGISPMFQPCVVPPKPWTGITGGGYWAAGRKPLQLVRTRSLAALRRYEEVSMPEVIKAVNIAQNTAWRVNKKVLDVANAITQWQHCPVADVPAMDRGEMPARPLDIDTNEIALKAWKKEASAFYRKDKARVSRRLSMEFMLSQANKFANYKAIWFPQNMDWRGRVYAVPMFNPQGNDMTKGLLTFAQGKPIGEDGFYWLKIHGANTAGVDKVPFPQRIKFVEDNHTNIMECAKAPLENTWWAEQDSPFCFLAFCFEYAGVINHGLSYNCSLPLAFDGSCSGIQHFSAMLRDEIGGKAVNLLPSAEVQDIYRIVSDKVNEVLKQDLINGTSTTLETVTDKKTGEITERTKYGTKVMAQWWLEHGVNRGVTKRSVMTLVYGSKEFGFRDQVLSDTIQPAIDNGKGDMFLNPNQAAGYMAKLIWNAVSVTVVAAVEAMNWLKSAAKLLAAEVKDKKTDTVLRGRCAVHWVTPDGFPVWQEYKKPIQTRLNLMFLGQFRLQPTINTNKDSEIDAHKQESGIAPNFVHSQDGNHLRMTVVWAHEKYGIESFALIHDSFGTIPADAANRFKAVRETMVSTYESCDVLADFYDQFADQLHESQLDKMPALPAKGNLNLRDILKSDFAFA

SEQ ID NO: 255 - DNA, 2670 bp, synthetic construct
  misc_feature 1..2670: note = Variant of RNA polymerase
  source 1..2670: mol_type = other DNA
atgcaccatcaccatcaccatatgaacacgattaacatcgctaagaacgacttctctgacatcgaactggctgctatcccgttcaacactctggctgaccattacggtgagcgtttagctcgcgaacagttggcccttgagcatgagtcttacgagatgggtgaagcacgcttccgcaagatgtttgagcgtcaacttaaagctggtgaggttgcggataacgctgccgccaagcctctcatcactaccctactccctaagatgattgcacgcatcaacgactggtttgaggaagtgaaagctaagcgcggcaagcgcccgacagccttccagttcctgcaagaaatcaagccggaagccgtagcgtacatcaccattaagaccactctggcttgcctaaccagtgcggacaatacaaccgttcaggctgtagcaagcgcaatcggtcgggccattgaggacgaggctcgcttcggtcgtatccgtgaccttgaagctaagcacttcaagaaaaacgttgaggaacaactcaacaagcgcgtagggcacgtctacaagaaagcatttatgcaagttgtcgaggctgacatgctctctaagggtctactcggtggcgaggcgtggtcttcgtggcataaggaagactctattcatgtaggagtacgctgcatcgagatgctcattgagtcaaccggaatggttagcttacaccgccaaaatgctggcgtagtaggtcaagactctgagactatcgaactcgcacctgaatacgctgaggctatcgcaacccgtgcaggtgcgctggctggcatctctccgatgttccaaccttgcgtagttcctcctaagccgtggactggcattactggtggtggctattgggctgcggggcgcaaacccctgcagttagtacgtactcgcagtctggcggcgcttcgccgctatgaagaagtgtcgatgccggaggtcatcaaagcagtcaacattgcgcagaatacagcatggcgtgtgaacaagaaagttctcgacgtagcgaatgcaatcacccaatggcagcactgtccagtcgcggatgtgcctgcgatggatcgtggcgaaatgccagctcgtccgttggacatcgataccaacgagattgcacttaaagcgtggaagaaagaagcttccgcgttctaccgcaaagacaaagcacgcgttagccgtcgtctgtcaatggagtttatgttatctcaggcgaacaagtttgcgaattataaagcaatctggtttccgcaaaacatggattggcgtgggcgcgtgtacgctgtcccgatgttcaatcctcagggcaacgatatgacgaaaggcctgctgacctttgcgcagggtaaacccattggtgaagacggcttctattggctcaagattcatggcgcaaatacagctggagtggataaagtaccgtttccacaacgcatcaaatttgttgaggataaccatacgaatattatggaatgcgcgaaagcaccgctggaaaacacttggtgggcggaacaggactcgccgttctgttttctggcgttctgctttgagtatgctggcgtcatcaatcacggtctgtcgtacaactgtagcttgcctctggcatttgatggtagttgctccggcattcaacatttctcagcgatgttacgcgacgaaattggcggcaaagctgtgaatctcctcccatctgcggaagtgcaggatatttatcgtatcgtcagcgacaaagttaacgaggtactgaaacaagatctgattaacggtaccgagaccaccttggaaacggtgactgataagaagacaggcgaaattaccgaacgcacgaaatacgggaccaaagttatggcacagtggtggttagaacacggtgtgaatcgtggcgtcacgaaacgctcggttatgactttggtgtatgggagcaaagagtttggattccgcgatcaagtgctgagtgacaccattcaaccggcgatcgataacggcaaaggtgacatgtttctgaatccgaatcaggctgctggttacatggcgaaactgatctggaacgcagtgtccgtcaccgtagtcgcagcagttgaggcgatgaactggctgaaaagtgcggcgaaattacttgctgctgaagtgaaggataagaagacggatacagttctgcgtggccgctgcgcagtacattgggtgactcccgacggcttccctgtgtggcaggaatacaagaagcctattcagacgcgcttgaacctgatgttcctcggtcagttccgcttacagcctaccattaacaccaacaaagatagcgagattgatgcacacaaacaggagtctggtatcgctcctaactttgtacacagccaagacggtaaccaccttcgtatgactgtagtgtgggcacacgagaagtacggaatcgaatcttttgcactgattcacgactccttcggtaccattccggctgacgctgcgaacctgttcaaagcagtgcgcgaaactatggtttcgacatatgagtcttgtgatgtactggctgatttctacgaccagttcgctgaccagttgcacgagtctcaattggacaaaatgccagcacttccggctaaaggtaacttgaacctccgtgacatcttaaaatcggacttcgcgttcgcg

SEQ ID NO: 256 - protein, 890 aa, synthetic construct
  REGION 1..890: note = Variant of RNA polymerase
MHHHHHHMNTINIAKNDFSDIELAAIPFNTLADHYGERLAREQLALEHESYEMGEARFRKMFERQLKAGEVADNAAAKPLITTLLPKMIARINDWFEEVKAKRGKRPTAFQFLQEIKPEAVAYITIKTTLACLTSADNTTVQAVASAIGRAIEDEARFGRIRDLEAKHFKKNVEEQLNKRVGHVYKKAFMQVVEADMLSKGLLGGEAWSSWHKEDSIHVGVRCIEMLIESTGMVSLHRQNAGVVGQDSETIELAPEYAEAIATRAGALAGISPMFQPCVVPPKPWTGITGGGYWAAGRKPLQLVRTRSLAALRRYEEVSMPEVIKAVNIAQNTAWRVNKKVLDVANAITQWQHCPVADVPAMDRGEMPARPLDIDTNEIALKAWKKEASAFYRKDKARVSRRLSMEFMLSQANKFANYKAIWFPQNMDWRGRVYAVPMFNPQGNDMTKGLLTFAQGKPIGEDGFYWLKIHGANTAGVDKVPFPQRIKFVEDNHTNIMECAKAPLENTWWAEQDSPFCFLAFCFEYAGVINHGLSYNCSLPLAFDGSCSGIQHFSAMLRDEIGGKAVNLLPSAEVQDIYRIVSDKVNEVLKQDLINGTETTLETVTDKKTGEITERTKYGTKVMAQWWLEHGVNRGVTKRSVMTLVYGSKEFGFRDQVLSDTIQPAIDNGKGDMFLNPNQAAGYMAKLIWNAVSVTVVAAVEAMNWLKSAAKLLAAEVKDKKTDTVLRGRCAVHWVTPDGFPVWQEYKKPIQTRLNLMFLGQFRLQPTINTNKDSEIDAHKQESGIAPNFVHSQDGNHLRMTVVWAHEKYGIESFALIHDSFGTIPADAANLFKAVRETMVSTYESCDVLADFYDQFADQLHESQLDKMPALPAKGNLNLRDILKSDFAFA

SEQ ID NO: 257 - DNA, 2670 bp, synthetic construct
  misc_feature 1..2670: note = Variant of RNA polymerase
  source 1..2670: mol_type = other DNA
atgcaccatcaccatcaccatatgaacacgattaacatcgctaagaacgacttctctgacatcgaactggctgctatcccgttcaacactctggctgaccattacggtgagcgtttagctcgcgaacagttggcccttgagcatgagtcttacgagatgggtgaagcacgcttccgcaagatgtttgagcgtcaacttaaagctggtgaggttgcggataacgctgccgccaagcctctcatcactaccctactccctaagatgattgcacgcatcaacgactggtttgaggaagtgaaagctaagcgcggcaagcgcccgacagccttccagttcctgcaagaaatcaagccggaagccgtagcgtacatcaccattaagaccactctggcttgcctaaccagtgcggacaatacaaccgttcaggctgtagcaagcgcaatcggtcgggccattgaggacgaggctcgcttcggtcgtatccgtgaccttgaagctaagcacttcaagaaaaacgttgaggaacaactcaacaagcgcgtagggcacgtctacaagaaagcatttatgcaagttgtcgaggctgacatgctctctaagggtctactcggtggcgaggcgtggtcttcgtggcataaggaagactctattcatgtaggagtacgctgcatcgagatgctcattgagtcaaccggaatggttagcttacaccgccaaaatgctggcgtagtaggtcaagactctgagactatcgaactcgcacctgaatacgctgaggctatcgcaacccgtgcaggtgcgctggctggcatctctccgatgttccaaccttgcgtagttcctcctaagccgtggactggcattactggtggtggctattgggctgcggggcgcaaacccctgcagttagtacgtactcgcagtctggcggcgcttcgccgctatgaagaagtgtcgatgccggaggtcatcaaagcagtcaacattgcgcagaatacagcatggcgtgtgaacaagaaagttctcgacgtagcgaatgcaatcacccaatggcagcactgtccagtcgcggatgtgcctgcgatggatcgtggcgaaatgccagctcgtccgttggacatcgataccaacgagattgcacttaaagcgtggaagaaagaagcttccgcgttctaccgcaaagacaaagcacgcgttagccgtcgtctgtcaatggagtttatgttatctcaggcgaacaagtttgcgaattataatgcaatctggtttccgcaaaacatggattggcgtgggcgcgtgtacgctgtcccgatgttcaatcctcagggcaacgatatgacgaaaggcctgctgacctttgcgcagggtaaacccattggtgaagacggcttctattggctcaagattcatggcgcaaatacagctggagtggataaagtaccgtttccacaacgcatcaaatttgttgaggataaccatacgaatattatggaatgcgcgaaagcaccgctggaaaacacttggtgggcggaacaggactcgccgttctgttttctggcgttctgctttgagtatgctggcgtcatcaatcacggtctgtcgtacaactgtagcttgcctctggcatttgatggtagttgctccggcattcaacatttctcagcgatgttacgcgacgaaattggcggcaaagctgtgaatctcctcccatctgcggaagtgcaggatatttatcgtatcgtcagcgacaaagttaacgaggtactgaaacaagatctgattaacggtacctctaccaccttggaaacggtgactgataagaagacaggcgaaattaccgaacgcacgaaatacgggaccaaagttatggcacagtggtggttagaacacggtgtgaatcgtggcgtcacgaaacgctcggttatgactttggtgtatgggagcaaagagtttggattccgcgatcaagtgctgagtgacaccattcaaccggcgatcgataacggcaaaggtgacatgtttctgaatccgaatcaggctgctggttacatggcgaaactgatctggaacgcagtgtccgtcaccgtagtcgcagcagttgaggcgatgaactggctgaaaagtgcggcgaaattacttgctgctgaagtgaaggataagaagacggatacagttctgcgtggccgctgcgcagtacattgggtgactcccgacggcttccctgtgtggcaggaatacaagaagcctattcagacgcgcttgaacctgatgttcctcggtcagttccgcttacagcctaccattaacaccaacaaagatagcgagattgatgcacacaaacaggagtctggtatcgctcctaactttgtacacagccaagacggtaaccaccttcgtatgactgtagtgtgggcacacgagaagtacggaatcgaatcttttgcactgattcacgactccttcggtaccattccggctgacgctgcgaacctgttcaaagcagtgcgcgaaactatggtttcgacatatgagtcttgtgatgtactggctgatttctacgaccagttcgctgaccagttgcacgagtctcaattggacaaaatgccagcacttccggctaaaggtaacttgaacctccgtgacatcttaaaatcggacttcgcgttcgcg

SEQ ID NO: 258 - protein, 890 aa, synthetic construct
  REGION 1..890: note = Variant of RNA polymerase
MHHHHHHMNTINIAKNDFSDIELAAIPFNTLADHYGERLAREQLALEHESYEMGEARFRKMFERQLKAGEVADNAAAKPLITTLLPKMIARINDWFEEVKAKRGKRPTAFQFLQEIKPEAVAYITIKTTLACLTSADNTTVQAVASAIGRAIEDEARFGRIRDLEAKHFKKNVEEQLNKRVGHVYKKAFMQVVEADMLSKGLLGGEAWSSWHKEDSIHVGVRCIEMLIESTGMVSLHRQNAGVVGQDSETIELAPEYAEAIATRAGALAGISPMFQPCVVPPKPWTGITGGGYWAAGRKPLQLVRTRSLAALRRYEEVSMPEVIKAVNIAQNTAWRVNKKVLDVANAITQWQHCPVADVPAMDRGEMPARPLDIDTNEIALKAWKKEASAFYRKDKARVSRRLSMEFMLSQANKFANYNAIWFPQNMDWRGRVYAVPMFNPQGNDMTKGLLTFAQGKPIGEDGFYWLKIHGANTAGVDKVPFPQRIKFVEDNHTNIMECAKAPLENTWWAEQDSPFCFLAFCFEYAGVINHGLSYNCSLPLAFDGSCSGIQHFSAMLRDEIGGKAVNLLPSAEVQDIYRIVSDKVNEVLKQDLINGTSTTLETVTDKKTGEITERTKYGTKVMAQWWLEHGVNRGVTKRSVMTLVYGSKEFGFRDQVLSDTIQPAIDNGKGDMFLNPNQAAGYMAKLIWNAVSVTVVAAVEAMNWLKSAAKLLAAEVKDKKTDTVLRGRCAVHWVTPDGFPVWQEYKKPIQTRLNLMFLGQFRLQPTINTNKDSEIDAHKQESGIAPNFVHSQDGNHLRMTVVWAHEKYGIESFALIHDSFGTIPADAANLFKAVRETMVSTYESCDVLADFYDQFADQLHESQLDKMPALPAKGNLNLRDILKSDFAFA

SEQ ID NO: 259 - DNA, 2670 bp, synthetic construct
  misc_feature 1..2670: note = Variant of RNA polymerase
  source 1..2670: mol_type = other DNA
atgcaccatcaccatcaccatatgaacacgattaacatcgctaagaacgacttctctgacatcgaactggctgctatcccgttcaacactctggctgaccattacggtgagcgtttagctcgcgaacagttggcccttgagcatgagtcttacgagatgggtgaagcacgcttccgcaagatgtttgagcgtcaacttaaagctggtgaggttgcggataacgctgccgccaagcctctcatcactaccctactccctaagatgattgcacgcatcaacgactggtttgaggaagtgaaagctaagcgcggcaagcgcccgacagccttccagttcctgcaagaaatcaagccggaagccgtagcgtacatcaccattaagaccactctggcttgcctaaccagtgcggacaatacaaccgttcaggctgtagcaagcgcaatcggtcgggccattgaggacgaggctcgcttcggtcgtatccgtgaccttgaagctaagcacttcaagaaaaacgttgaggaacaactcaacaagcgcgtagggcacgtctacaagaaagcatttatgcaagttgtcgaggctgacatgagttctaagggtctactcggtggcgaggcgtggtcttcgtggcataaggaagactctattcatgtaggagtacgctgcatcgagatgctcattgagtcaaccggaatggttagcttacaccgccaaaatgctggcgtagtaggtcaagactctgagactatcgaactcgcacctgaatacgctgaggctatcgcaacccgtgcaggtgcgctggctggcatctctccgatgttccaaccttgcgtagttcctcctaagccgtggactggcattactggtggtggctattgggctgcggggcgcaaacccctgcagttagtacgtactcgcagtctggcggcgcttcgccgctatgaagaagtgtcgatgccggaggtcatcaaagcagtcaacattgcgcagaatacagcatggcgtgtgaacaagaaagttctcgacgtagcgaatgcaatcacccaatggcagcactgtccagtcgcggatgtgcctgcgatggatcgtggcgaaatgccagctcgtccgttggacatcgataccaacgagattgcacttaaagcgtggaagaaagaagcttccgcgttctaccgcaaagacaaagcacgcgttagccgtcgtctgtcaatggagtttatgttatctcaggcgaacaagtttgcgaattataaagcaatctggtttccgcaaaacatggattggcgtgggcgcgtgtacgctgtcccgatgttcaatcctcagggcaacgatatgacgaaaggcctgctgacctttgcgcagggtaaacccattggtgaagacggcttctattggctcaagattcatggcgcaaatacagctggagtggataaagtaccgtttccacaacgcatcaaatttgttgaggataaccatacgaatattatggaatgcgcgaaagcaccgctggaaaacacttggtgggcggaacaggactcgccgttctgttttctggcgttctgctttgagtatgctggcgtcatcaatcacggtctgtcgtacaactgtagcttgcctctggcatttgatggtagttgctccggcattcaacatttctcagcgatgttacgcgacgaaattggcggcaaagctgtgaatctcctcccatctgcggaagtgcaggatatttatcgtatcgtcagcgacaaagttaacgaggtactgaaacaagatctgattaacggtacctctaccaccttggaaacggtgactgataagaagacaggcgaaattaccgaacgcacgaaatacgggaccaaagttatggcacagtggtggttagaacacggtgtgaatcgtggcgtcacgaaacgctcggttatgactttggtgtatgggagcaaagagtttggattccgcgatcaagtgctgagtgacaccattcaaccggcgatcgataacggcaaaggtgacatgtttctgaatccgaatcaggctgctggttacatggcgaaactgatctggaacgcagtgtccgtcaccgtagtcgcagcagttgaggcgatgaactggctgaaaagtgcggcgaaattacttgctgctgaagtgaaggataagaagacggatacagttctgcgtggccgctgcgcagtacattgggtgactcccgacggcttccctgtgtggcaggaatacaagaagcctattcagacgcgcttgaacctgatgttcctcggtcagttccgcttacagcctaccattaacaccaacaaagatagcgagattgatgcacacaaacaggagtctggtatcgctcctaactttgtacacagccaagacggtaaccaccttcgtatgactgtagtgtgggcacacgagaagtacggaatcgaatcttttgcactgattcacgactccttcggtaccattccggctgacgctgcgaacctgttcaaagcagtgcgcgaaactatggtttcgacatatgagtcttgtgatgtactggctgatttctacgaccagttcgctgaccagttgcacgagtctcaattggacaaaatgccagcacttccggctaaaggtaacttgaacctccgtgacatcttaaaatcggacttcgcgttcgcg

SEQ ID NO: 260 - protein, 890 aa, synthetic construct
  REGION 1..890: note = Variant of RNA polymerase
MHHHHHHMNTINIAKNDFSDIELAAIPFNTLADHYGERLAREQLALEHESYEMGEARFRKMFERQLKAGEVADNAAAKPLITTLLPKMIARINDWFEEVKAKRGKRPTAFQFLQEIKPEAVAYITIKTTLACLTSADNTTVQAVASAIGRAIEDEARFGRIRDLEAKHFKKNVEEQLNKRVGHVYKKAFMQVVEADMSSKGLLGGEAWSSWHKEDSIHVGVRCIEMLIESTGMVSLHRQNAGVVGQDSETIELAPEYAEAIATRAGALAGISPMFQPCVVPPKPWTGITGGGYWAAGRKPLQLVRTRSLAALRRYEEVSMPEVIKAVNIAQNTAWRVNKKVLDVANAITQWQHCPVADVPAMDRGEMPARPLDIDTNEIALKAWKKEASAFYRKDKARVSRRLSMEFMLSQANKFANYKAIWFPQNMDWRGRVYAVPMFNPQGNDMTKGLLTFAQGKPIGEDGFYWLKIHGANTAGVDKVPFPQRIKFVEDNHTNIMECAKAPLENTWWAEQDSPFCFLAFCFEYAGVINHGLSYNCSLPLAFDGSCSGIQHFSAMLRDEIGGKAVNLLPSAEVQDIYRIVSDKVNEVLKQDLINGTSTTLETVTDKKTGEITERTKYGTKVMAQWWLEHGVNRGVTKRSVMTLVYGSKEFGFRDQVLSDTIQPAIDNGKGDMFLNPNQAAGYMAKLIWNAVSVTVVAAVEAMNWLKSAAKLLAAEVKDKKTDTVLRGRCAVHWVTPDGFPVWQEYKKPIQTRLNLMFLGQFRLQPTINTNKDSEIDAHKQESGIAPNFVHSQDGNHLRMTVVWAHEKYGIESFALIHDSFGTIPADAANLFKAVRETMVSTYESCDVLADFYDQFADQLHESQLDKMPALPAKGNLNLRDILKSDFAFA

SEQ ID NO: 261 - DNA, 2670 bp, synthetic construct
  misc_feature 1..2670: note = Variant of RNA polymerase
  source 1..2670: mol_type = other DNA
atgcaccatcaccatcaccatatgaacacgattaacatcgctaagaacgacttctctgacatcgaactggctgctatcccgttcaacactctggctgaccattacggtgagcgtttagctcgcgaacagttggcccttgagcatgagtcttacgagatgggtgaagcacgcttccgcaagatgtttgagcgtcaacttaaagctggtgaggttgcggataacgctgccgccaagcctctcatcactaccctactccctaagatgattgcacgcatcaacgactggtttgaggaagtgaaagctaagcgcggcaagcgcccgacagccttccagttcctgcaagaaatcaagccggaagccgtagcgtacatcaccattaagaccactctggcttgcctaaccagtgcggacaatacaaccgttcaggctgtagcaagcgcaatcggtcgggccattgaggacgaggctcgcttcggtcgtatccgtgaccttgaagctaagcacttcaagaaaaacgttgaggaacaactcaacaagcgcgtagggcacgtctacaagaaagcatttatgcaagttgtcgaggctgacatgctctctaagggtctactcggtggcgaggcgtggtcttcgtggcataaggaagactctattcatgtaggagtacgctgcatcgagatgctcattgagtcaaccggaatggttagcttacaccgccaaaatgctggcgtagtaggtcaagactctgagactatcgaactcgcacctgaatacgctgaggctatcgcaacccgtgcaggtgcgctggctggcatctctccgatgttccaaccttgcgtagttcctcctaagccgtggactggcattactggtggtggctattgggctgcggggcgcaaacccctgcagttagtacgtactcgcagtctggcggcgcttcgccgctatgaagaagtgtcgatgccggaggtcatcaaagcagtcaacattgcgcagaatacagcatggcgtgtgaacaagaaagttctcgacgtagcgaatgcaatcacccaatggcagcactgtccagtcgcggatgtgcctgcgatggatcgtggcgaaatgccagctcgtccgttggacatcgataccaacgagattgcacttaaagcgtggaagaaagaagcttccgcgttctaccgcaaagacaaagcacgcgttagccgtcgtctgtcaatggagtttatgttatctcaggcgaacaagtttgcgaattataaagcaatctggtttccgcaaaacatggattggcgtgggcgcgtgtacgctgtcccgatgttcaatcctcagggcaacgatatgacgaaaggcctgctgacctttgcgcagggtaaacccattggtgaagacggcttctattggctcaagattcatggcgcaaatacagctggagtggataaagtaccgtttccacaacgcatcaaatttgttgaggataaccatacgaatattatggaatgcgcgaaagcaccgctggaaaacacttggtgggcggaacaggactcgccgttctgttttctggcgttctgctttgagtatgctggcgtcatcaatcacggtctgtcgtacaactgtagcttgcctctggcatttgatggtagttgctccggcattcaacatttctcagcgatgttacgcgacgaaattggcggcaaagctgtgaatctcctcccatctgcggaagtgcaggatatttatcgtatcgtcagcgacaaagttaacgaggcgctgaaacaagatctgattaacggtacctctaccaccttggaaacggtgactgataagaagacaggcgaaattaccgaacgcacgaaatacgggaccaaagttatggcacagtggtggttagaacacggtgtgaatcgtggcgtcacgaaacgctcggttatgactttggtgtatgggagcaaagagtttggattccgcgatcaagtgctgagtgacaccattcaaccggcgatcgataacggcaaaggtgacatgtttctgaatccgaatcaggctgctggttacatggcgaaactgatctggaacgcagtgtccgtcaccgtagtcgcagcagttgaggcgatgaactggctgaaaagtgcggcgaaattacttgctgctgaagtgaaggataagaagacggatacagttctgcgtggccgctgcgcagtacattgggtgactcccgacggcttccctgtgtggcaggaatacaagaagcctattcagacgcgcttgaacctgatgttcctcggtcagttccgcttacagcctaccattaacaccaacaaagatagcgagattgatgcacacaaacaggagtctggtatcgctcctaactttgtacacagccaagacggtaaccaccttcgtatgactgtagtgtgggcacacgagaagtacggaatcgaatcttttgcactgattcacgactccttcggtaccattccggctgacgctgcgaacctgttcaaagcagtgcgcgaaactatggtttcgacatatgagtcttgtgatgtactggctgatttctacgaccagttcgctgaccagttgcacgagtctcaattggacaaaatgccagcacttccggctaaaggtaacttgaacctccgtgacatcttaaaatcggacttcgcgttcgcg

SEQ ID NO: 262 - protein, 890 aa, synthetic construct
  REGION 1..890: note = Variant of RNA polymerase
MHHHHHHMNTINIAKNDFSDIELAAIPFNTLADHYGERLAREQLALEHESYEMGEARFRKMFERQLKAGEVADNAAAKPLITTLLPKMIARINDWFEEVKAKRGKRPTAFQFLQEIKPEAVAYITIKTTLACLTSADNTTVQAVASAIGRAIEDEARFGRIRDLEAKHFKKNVEEQLNKRVGHVYKKAFMQVVEADMLSKGLLGGEAWSSWHKEDSIHVGVRCIEMLIESTGMVSLHRQNAGVVGQDSETIELAPEYAEAIATRAGALAGISPMFQPCVVPPKPWTGITGGGYWAAGRKPLQLVRTRSLAALRRYEEVSMPEVIKAVNIAQNTAWRVNKKVLDVANAITQWQHCPVADVPAMDRGEMPARPLDIDTNEIALKAWKKEASAFYRKDKARVSRRLSMEFMLSQANKFANYKAIWFPQNMDWRGRVYAVPMFNPQGNDMTKGLLTFAQGKPIGEDGFYWLKIHGANTAGVDKVPFPQRIKFVEDNHTNIMECAKAPLENTWWAEQDSPFCFLAFCFEYAGVINHGLSYNCSLPLAFDGSCSGIQHFSAMLRDEIGGKAVNLLPSAEVQDIYRIVSDKVNEALKQDLINGTSTTLETVTDKKTGEITERTKYGTKVMAQWWLEHGVNRGVTKRSVMTLVYGSKEFGFRDQVLSDTIQPAIDNGKGDMFLNPNQAAGYMAKLIWNAVSVTVVAAVEAMNWLKSAAKLLAAEVKDKKTDTVLRGRCAVHWVTPDGFPVWQEYKKPIQTRLNLMFLGQFRLQPTINTNKDSEIDAHKQESGIAPNFVHSQDGNHLRMTVVWAHEKYGIESFALIHDSFGTIPADAANLFKAVRETMVSTYESCDVLADFYDQFADQLHESQLDKMPALPAKGNLNLRDILKSDFAFA

SEQ ID NO: 263 - DNA, 2670 bp, synthetic construct
  misc_feature 1..2670: note = Variant of RNA polymerase
  source 1..2670: mol_type = other DNA
atgcaccatcaccatcaccatatgaacacgattaacatcgctaagaacgacttctctgacctggaactggctgctatcccgttcaacactctggctgaccattacggtgagcgtttagctcgcgaacagttggcccttgagcatgagtcttacgagatgggtgaagcacgcttccgcaagatgtttgagcgtcaacttaaagctggtgaggttgcggataacgctgccgccaagcctctcatcactaccctactccctaagatgattgcacgcatcaacgactggtttgaggaagtgaaagctaagcgcggcaagcgcccgacagccttccagttcctgcaagaaatcaagccggaagccgtagcgtacatcaccattaagaccactctggcttgcctaaccagtgcggacaatacaaccgttcaggctgtagcaagcgcaatcggtcgggccattgaggacgaggctcgcttcggtcgtatccgtgaccttgaagctaagcacttcaagaaaaacgttgaggaacaactcaacaagcgcgtagggcacgtctacaagaaagcatttatgcaagttgtcgaggctgacatgctctctaagggtctactcggtggcgaggcgtggtcttcgtggcataaggaagactctattcatgtaggagtacgctgcatcgagatgctcattgagtcaaccggaatggttagcttacaccgccaaaatgctggcgtagtaggtcaagactctgagactatcgaactcgcacctgaatacgctgaggctatcgcaacccgtgcaggtgcgctggctggcatctctccgatgttccaaccttgcgtagttcctcctaagccgtggactggcattactggtggtggctattgggctgcggggcgcaaacccctgcagttagtacgtactcgcagtctggcggcgcttcgccgctatgaagaagtgtcgatgccggaggtcatcaaagcagtcaacattgcgcagaatacagcatggcgtgtgaacaagaaagttctcgacgtagcgaatgcaatcacccaatggcagcactgtccagtcgcggatgtgcctgcgatggatcgtggcgaaatgccagctcgtccgttggacatcgataccaacgagattgcacttaaagcgtggaagaaagaagcttccgcgttctaccgcaaagacaaagcacgcgttagccgtcgtctgtcaatggagtttatgttatctcaggcgaacaagtttgcgaattataaagcaatctggtttccgcaaaacatggattggcgtgggcgcgtgtacgctgtcccgatgttcaatcctcagggcaacgatatgacgaaaggcctgctgacctttgcgcagggtaaacccattggtgaagacggcttctattggctcaagattcatggcgcaaatacagctggagtggataaagtaccgtttccacaacgcatcaaatttgttgaggataaccatacgaatattatggaatgcgcgaaagcaccgctggaaaacacttggtgggcggaacaggactcgccgttctgttttctggcgttctgctttgagtatgctggcgtcatcaatcacggtctgtcgtacaactgtagcttgcctctggcatttgatggtagttgctccggcattcaacatttctcagcgatgttacgcgacgaaattggcggcaaagctgtgaatctcctcccatctgcggaagtgcaggatatttatcgtatcgtcagcgacaaagttaacgaggtactgaaacaagatctgattaacggtacctctaccaccttggaaacggtgactgataagaagacaggcgaaattaccgaacgcacgaaatacgggaccaaagttatggcacagtggtggttagaacacggtgtgaatcgtggcgtcacgaaacgctcggttatgactttggtgtatgggagcaaagagtttggattccgcgatcaagtgctgagtgacaccattcaaccggcgatcgataacggcaaaggtgacatgtttctgaatccgaatcaggctgctggttacatggcgaaactgatctggaacgcagtgtccgtcaccgtagtcgcagcagttgaggcgatgaactggctgaaaagtgcggcgaaattacttgctgctgaagtgaaggataagaagacggatacagttctgcgtggccgctgcgcagtacattgggtgactcccgacggcttccctgtgtggcaggaatacaagaagcctattcagacgcgcttgaacctgatgttcctcggtcagttccgcttacagcctaccattaacaccaacaaagatagcgagattgatgcacacaaacaggagtctggtatcgctcctaactttgtacacagccaagacggtaaccaccttcgtatgactgtagtgtgggcacacgagaagtacggaatcgaatcttttgcactgattcacgactccttcggtaccattccggctgacgctgcgaacctgttcaaagcagtgcgcgaaactatggtttcgacatatgagtcttgtgatgtactggctgatttctacgaccagttcgctgaccagttgcacgagtctcaattggacaaaatgccagcacttccggctaaaggtaacttgaacctccgtgacatcttaaaatcggacttcgcgttcgcg

SEQ ID NO: 264 - protein, 890 aa, synthetic construct
  REGION 1..890: note = Variant of RNA polymerase
MHHHHHHMNTINIAKNDFSDLELAAIPFNTLADHYGERLAREQLALEHESYEMGEARFRKMFERQLKAGEVADNAAAKPLITTLLPKMIARINDWFEEVKAKRGKRPTAFQFLQEIKPEAVAYITIKTTLACLTSADNTTVQAVASAIGRAIEDEARFGRIRDLEAKHFKKNVEEQLNKRVGHVYKKAFMQVVEADMLSKGLLGGEAWSSWHKEDSIHVGVRCIEMLIESTGMVSLHRQNAGVVGQDSETIELAPEYAEAIATRAGALAGISPMFQPCVVPPKPWTGITGGGYWAAGRKPLQLVRTRSLAALRRYEEVSMPEVIKAVNIAQNTAWRVNKKVLDVANAITQWQHCPVADVPAMDRGEMPARPLDIDTNEIALKAWKKEASAFYRKDKARVSRRLSMEFMLSQANKFANYKAIWFPQNMDWRGRVYAVPMFNPQGNDMTKGLLTFAQGKPIGEDGFYWLKIHGANTAGVDKVPFPQRIKFVEDNHTNIMECAKAPLENTWWAEQDSPFCFLAFCFEYAGVINHGLSYNCSLPLAFDGSCSGIQHFSAMLRDEIGGKAVNLLPSAEVQDIYRIVSDKVNEVLKQDLINGTSTTLETVTDKKTGEITERTKYGTKVMAQWWLEHGVNRGVTKRSVMTLVYGSKEFGFRDQVLSDTIQPAIDNGKGDMFLNPNQAAGYMAKLIWNAVSVTVVAAVEAMNWLKSAAKLLAAEVKDKKTDTVLRGRCAVHWVTPDGFPVWQEYKKPIQTRLNLMFLGQFRLQPTINTNKDSEIDAHKQESGIAPNFVHSQDGNHLRMTVVWAHEKYGIESFALIHDSFGTIPADAANLFKAVRETMVSTYESCDVLADFYDQFADQLHESQLDKMPALPAKGNLNLRDILKSDFAFA

SEQ ID NO: 265 - DNA, 2670 bp, synthetic construct
  misc_feature 1..2670: note = Variant of RNA polymerase
  source 1..2670: mol_type = other DNA
atgcaccatcaccatcaccatatgaacacgattaacatcgctaagaacgacttctctgacatcgaactggctgctatcccgttcaacactctggctgaccattacggtgagcgtttagctcgcgaacagttggcccttgagcatgagtcttacgagatgggtgaagcacgcttccgcaagatgtttgagcgtcaacttaaagctggtgaggttgcggataacgctgccgccaagcctctcatcactaccctactccctaagatgattgcacgcatcaacgactggtttgaggaagtgaaagctaagcgcggcaagcgcccgacagccttccagttcctgcaagaaatcaagccggaagccgtagcgtacatcaccattaagaccactctggcttgcctaaccagtgcggacaatacaaccgttcaggctgtagcaagcgcaatcggtcgggccattgaggacgaggctcgcttcggtcgtatccgtgaccttgaagctaagcacttcaagaaaaacgttgaggaacaactcaacaagcgcgtagggcacgtctacaagaaagcatttatgcaagttgtcgaggctgacatgctctctaagggtctactcggtggcgaggcgtggtcttcgtggcataaggaagactctattcatgtaggagtacgctgcatcgagatgctcattgagtcaaccggaatggttagcttacaccgccaaaatgctggcgtagtaggtcaagactctgagactatcgaactcgcacctgaatacgctgaggctatcgcaacccgtgcaggtgcgctggctggcatctctccgatgttccaaccttgcgtagttcctcctaagccgtggactggcattactggtggtggctattgggctgcggggcgcaaacccctgcagttagtacgtactcgcagtctggcggcgcttcgccgctatgaagaagtgtcgatgccggaggtcatcaaagcagtcaacattgcgcagaatacagcatggcgtgtgaacaagaaagttctcgacgtagcgaatgcaatcacccaatggcagcactgtccagtcgcggatgtgcctgcgatggatcgtggcgaaatgccagctcgtccgttggacatcgataccaacgagattgcacttaaagcgtggaagaaagaagcttccgcgttctaccgcaaagacaaagcacgcgttagccgtcgtctgtcaatggagtttatgttatctcaggcgaacaagtttgcgaattataaagcaatctggtttccgcaaaacatggattggcgtgggcgcgtgtacgctgtcccgatgttcaatcctcagggcaacgatatgacgaaaggcctgctgacctttgcgcagggtaaacccattggtgaagacggcttctattggctcaagattcatggcgcaaatacagctggagtggataaagtaccgtttccacaacgcatcaaatttgttgaggataaccatacgaatattatggaatgcgcgaaagcaccgctggaaaacacttggtgggcggaacaggactcgccgttctgttttctggcgttctgctttgagtatgctggcgtcatcaatcacggtctgtcgtacaactgtagcttgcctctggcatttgatggtagttgctccggcattcaacatttctcagcgatgttacgcgacgaaattggcggcaaagctgtgaatctcctcccatctgcggaagtgcaggatatttatcagatcgtcagcgacaaagttaacgaggtactgaaacaagatctgattaacggtacctctaccaccttggaaacggtgactgataagaagacaggcgaaattaccgaacgcacgaaatacgggaccaaagttatggcacagtggtggttagaacacggtgtgaatcgtggcgtcacgaaacgctcggttatgactttggtgtatgggagcaaagagtttggattccgcgatcaagtgctgagtgacaccattcaaccggcgatcgataacggcaaaggtgacatgtttctgaatccgaatcaggctgctggttacatggcgaaactgatctggaacgcagtgtccgtcaccgtagtcgcagcagttgaggcgatggactggctgaaaagtgcggcgaaattacttgctgctgaagtgaaggataagaagacggatacagttctgcgtggccgctgcgcagtacattgggtgactcccgacggcttccctgtgtggcaggaatacaagaagcctattcagacgcgcttgaacctgatgttcctcggtcagttccgcttacagcctaccattaacaccaacaaagatagcgagattgatgcacacaaacaggagtctggtatcgctcctaactttgtacacagccaagacggtaaccaccttcgtatgactgtagtgtgggcacacgagaagtacggaatcgaatcttttgcactgattcacgactccttcggtaccattccggctgacgctgcgaacctgttcaaagcagtgcgcgaaactatggtttcgacatatgagtcttgtgatgtactggctgatttctacgaccagttcgctgaccagttgcacgagtctcaattggacaaaatgccagcacttccggctaaaggtaacttgaacctccgtgacatcttaaaatcggacttcgcgttcgcg

SEQ ID NO: 266 - protein, 890 aa, synthetic construct
  REGION 1..890: note = Variant of RNA polymerase
MHHHHHHMNTINIAKNDFSDIELAAIPFNTLADHYGERLAREQLALEHESYEMGEARFRKMFERQLKAGEVADNAAAKPLITTLLPKMIARINDWFEEVKAKRGKRPTAFQFLQEIKPEAVAYITIKTTLACLTSADNTTVQAVASAIGRAIEDEARFGRIRDLEAKHFKKNVEEQLNKRVGHVYKKAFMQVVEADMLSKGLLGGEAWSSWHKEDSIHVGVRCIEMLIESTGMVSLHRQNAGVVGQDSETIELAPEYAEAIATRAGALAGISPMFQPCVVPPKPWTGITGGGYWAAGRKPLQLVRTRSLAALRRYEEVSMPEVIKAVNIAQNTAWRVNKKVLDVANAITQWQHCPVADVPAMDRGEMPARPLDIDTNEIALKAWKKEASAFYRKDKARVSRRLSMEFMLSQANKFANYKAIWFPQNMDWRGRVYAVPMFNPQGNDMTKGLLTFAQGKPIGEDGFYWLKIHGANTAGVDKVPFPQRIKFVEDNHTNIMECAKAPLENTWWAEQDSPFCFLAFCFEYAGVINHGLSYNCSLPLAFDGSCSGIQHFSAMLRDEIGGKAVNLLPSAEVQDIYQIVSDKVNEVLKQDLINGTSTTLETVTDKKTGEITERTKYGTKVMAQWWLEHGVNRGVTKRSVMTLVYGSKEFGFRDQVLSDTIQPAIDNGKGDMFLNPNQAAGYMAKLIWNAVSVTVVAAVEAMDWLKSAAKLLAAEVKDKKTDTVLRGRCAVHWVTPDGFPVWQEYKKPIQTRLNLMFLGQFRLQPTINTNKDSEIDAHKQESGIAPNFVHSQDGNHLRMTVVWAHEKYGIESFALIHDSFGTIPADAANLFKAVRETMVSTYESCDVLADFYDQFADQLHESQLDKMPALPAKGNLNLRDILKSDFAFA

SEQ ID NO: 267 - DNA, 2670 bp, synthetic construct
  misc_feature 1..2670: note = Variant of RNA polymerase
  source 1..2670: mol_type = other DNA
atgcaccatcaccatcaccatatgaacacgattaacatcgctaagaacgacttctctgacatcgaactggctgctatcccgttcaacactctggctgaccattacggtgagcgtttagctcgcgaacagttggcccttgagcatgagtcttacgagatgggtgaagcacgcttccgcaagatgtttgagcgtcaacttaaagctggtgaggttgcggataacgctgccgccaagcctctcatcactaccctactccctaagatgattgcacgcatcaacgactggtttgaggaagtgaaagctaagcgcggcaagcgcccgacagccttccagttcctgcaagaaatcaagccggaagccgtagcgtacatcaccattaagaccactctggcttgcctaaccagtgcggacaatacaaccgttcaggctgtagcaagcgcaatcggtcgggccattgaggacgaggctcgcttcggtcgtatccgtgaccttgaagctaagcacttcaagaaaaacgttgaggaacaactcaacaagcgcgtagggcacgtctacaagaaagcatttagtcaagttgtcgaggctgacatgctctctaagggtctactcggtggcgaggcgtggtcttcgtggcataaggaagactctattcatgtaggagtacgctgcatcgagatgctcattgagtcaaccggaatggttagcttacaccgccaaaatgctggcgtagtaggtcaagactctgagactatcgaactcgcacctgaatacgctgaggctatcgcaacccgtgcaggtgcgctggctggcatctctccgatgttccaaccttgcgtagttcctcctaagccgtggactggcattactggtggtggctattgggctgcggggcgcaaacccctgcagttagtacgtactcgcagtctggcggcgcttcgccgctatgaagaagtgtcgatgccggaggtcatcaaagcagtcaacattgcgcagaatacagcatggcgtgtgaacaagaaagttctcgacgtagcgaatgcaatcacccaatggcagcactgtccagtcgcggatgtgcctgcgatggatcgtggcgaaatgccagctcgtccgttggacatcgataccaacgagattgcacttaaagcgtggaagaaagaagcttccgcgttctaccgcaaagacaaagcacgcgttagccgtcgtctgtcaatggagtttatgttatctcaggcgaacaagtttgcgaattataaagcaatctggtttccgcaaaacatggattggcgtgggcgcgtgtacgctgtcccgatgttcaatcctcagggcaacgatatgacgaaaggcctgctgacctttgcgcagggtaaacccattggtgaagacggcttctattggctcaagattcatggcgcaaatacagctggagtggataaagtaccgtttccacaacgcatcaaatttgttgaggataaccatacgaatattatggaatgcgcgaaagcaccgctggaaaacacttggtgggcggaacaggactcgccgttctgttttctggcgttctgctttgagtatgctggcgtcatcaatcacggtctgtcgtacaactgtagcttgcctctggcatttgatggtagttgctccggcattcaacatttctcagcgatgttacgcgacgaaattggcggcaaagctgtgaatctcctcccatctgcggaagtgcaggatatttatcgtatcgtcagcgacaaagttaacgaggtactgaaacaagatctgattaacggtacctctaccaccttggaaacggtgactgataagaagacaggcgaaattaccgaacgcacgaaatacgggaccaaagttatggcacagtggtggttagaacacggtgtgaatcgtggcgtcacgaaacgctcggttatgactttggtgtatgggagcaaagagtttggattccgcgatcaagtgctgagtgacaccattcaaccggcgatcgataacggcaaaggtgacatgtttctgaatccgaatcaggctgctggttacatggcgaaactgatctggaacgcagtgtccgtcaccgtagtcgcagcagttgaggcgatgaactggctgaaaagtgcggcgaaattacttgctgctgaagtgaaggataagaagacggatacagttctgcgtggccgctgcgcagtacattgggtgactcccgacggcttccctgtgtggcaggaatacaagaagcctattcagacgcgcttgaacctgatgttcctcggtcagttccgcttacagcctaccattaacaccaacaaagatagcgagattgatgcacacaaacaggagtctggtatcgctcctaactttgtacacagccaagacggtaaccaccttcgtatgactgtagtgtgggcacacgagaagtacggaatcgaatcttttgcactgattcacgactccttcggtaccattccggctgacgctgcgaacctgttcaaagcagtgcgcgaaactatggtttcgacatatgagtcttgtgatgtactggctgatttctacgaccagttcgctgaccagttgcacgagtctcaattggacaaaatgccagcacttccggctaaaggtaacttgaacctccgtgacatcttaaaatcggacttcgcgttcgcg

SEQ ID NO: 268 - protein, 890 aa, synthetic construct
  REGION 1..890: note = Variant of RNA polymerase
MHHHHHHMNTINIAKNDFSDIELAAIPFNTLADHYGERLAREQLALEHESYEMGEARFRKMFERQLKAGEVADNAAAKPLITTLLPKMIARINDWFEEVKAKRGKRPTAFQFLQEIKPEAVAYITIKTTLACLTSADNTTVQAVASAIGRAIEDEARFGRIRDLEAKHFKKNVEEQLNKRVGHVYKKAFSQVVEADMLSKGLLGGEAWSSWHKEDSIHVGVRCIEMLIESTGMVSLHRQNAGVVGQDSETIELAPEYAEAIATRAGALAGISPMFQPCVVPPKPWTGITGGGYWAAGRKPLQLVRTRSLAALRRYEEVSMPEVIKAVNIAQNTAWRVNKKVLDVANAITQWQHCPVADVPAMDRGEMPARPLDIDTNEIALKAWKKEASAFYRKDKARVSRRLSMEFMLSQANKFANYKAIWFPQNMDWRGRVYAVPMFNPQGNDMTKGLLTFAQGKPIGEDGFYWLKIHGANTAGVDKVPFPQRIKFVEDNHTNIMECAKAPLENTWWAEQDSPFCFLAFCFEYAGVINHGLSYNCSLPLAFDGSCSGIQHFSAMLRDEIGGKAVNLLPSAEVQDIYRIVSDKVNEVLKQDLINGTSTTLETVTDKKTGEITERTKYGTKVMAQWWLEHGVNRGVTKRSVMTLVYGSKEFGFRDQVLSDTIQPAIDNGKGDMFLNPNQAAGYMAKLIWNAVSVTVVAAVEAMNWLKSAAKLLAAEVKDKKTDTVLRGRCAVHWVTPDGFPVWQEYKKPIQTRLNLMFLGQFRLQPTINTNKDSEIDAHKQESGIAPNFVHSQDGNHLRMTVVWAHEKYGIESFALIHDSFGTIPADAANLFKAVRETMVSTYESCDVLADFYDQFADQLHESQLDKMPALPAKGNLNLRDILKSDFAFA

SEQ ID NO: 269 - DNA, 2670 bp, synthetic construct
  misc_feature 1..2670: note = Variant of RNA polymerase
  source 1..2670: mol_type = other DNA
atgcaccatcaccatcaccatatgaacacgattaacatcgctaagaacgacttctctgacatcgaactggctgctatcccgttcaacactctggctgaccattacggtgagcgtttagctcgcgaacagttggcccttgagcatgagtcttacgagatgggtgaagcacgcttccgcaagatgtttgagcgtcaacttaaagctggtgaggttgcggataacgctgccgccaagcctctcatcactaccctactccctaagatgattgcacgcatcaacgactggtttgaggaagtgaaagctaagcgcggcaagcgcccgacagccttccagttcctgcaagaaatcaagccggaagccgtagcgtacatcaccattaagaccactctggcttgcctaaccagtgcggacaatacaaccgttcaggctgtagcaagcgcaatcggtcgggccattgaggacgaggctcgcttcggtcgtatccgtgaccttgaagctaagcacttcaagaaaaacgttgaggaacaactcaacaagcgcgtagggcacgtctacaagaaagcatttatgcaagttgtcgaggctgacgttctctctaagggtctactcggtggcgaggcgtggtcttcgtggcataaggaagactctattcatgtaggagtacgctgcatcgagatgctcattgagtcaaccggaatggttagcttacaccgccaaaatgctggcgtagtaggtcaagactctgagactatcgaactcgcacctgaatacgctgaggctatcgcaacccgtgcaggtgcgctggctggcatctctccgatgttccaaccttgcgtagttcctcctaagccgtggactggcattactggtggtggctattgggctgcggggcgcaaacccctgcagttagtacgtactcgcagtctggcggcgcttcgccgctatgaagaagtgtcgatgccggaggtcatcaaagcagtcaacattgcgcagaatacagcatggcgtgtgaacaagaaagttctcgacgtagcgaatgcaatcacccaatggcagcactgtccagtcgcggatgtgcctgcgatggatcgtggcgaaatgccagctcgtccgttggacatcgataccaacgagattgcacttaaagcgtggaagaaagaagcttccgcgttctaccgcaaagacaaagcacgcgttagccgtcgtctgtcaatggagtttatgttatctcaggcgaacaagtttgcgaattataaagcaatctggtttccgcaaaacatggattggcgtgggcgcgtgtacgctgtcccgatgttcaatcctcagggcaacgatatgacgaaaggcctgctgacctttgcgcagggtaaacccattggtgaagacggcttctattggctcaagattcatggcgcaaatacagctggagtggataaagtaccgtttccacaacgcatcaaatttgttgaggataaccatacgaatattatggaatgcgcgaaagcaccgctggaaaacacttggtgggcggaacaggactcgccgttctgttttctggcgttctgctttgagtatgctggcgtcatcaatcacggtctgtcgtacaactgtagcttgcctctggcatttgatggtagttgctccggcattcaacatttctcagcgatgttacgcgacgaaattggcggcaaagctgtgaatctcctcccatctgcggaagtgcaggatatttatcgtatcgtcagcgacaaagttaacgaggtactgaaacaagatctgattaacggtacctctaccaccttggaaacggtgactgataagaagacaggcgaaattaccgaacgcacgaaatacgggaccaaagttatggcacagtggtggttagaacacggtgtgaatcgtggcgtcacgaaacgctcggttatgactttggtgtatgggagcaaagagtttggattccgcgatcaagtgctgagtgacaccattcaaccggcgatcgataacggcaaaggtgacatgtttctgaatccgaatcaggctgctggttacatggcgaaactgatctggaacgcagtgtccgtcaccgtagtcgcagcagttgaggcgatgaactggctgaaaagtgcggcgaaattacttgctgctgaagtgaaggataagaagacggatacagttctgcgtggccgctgcgcagtacattgggtgactcccgacggcttccctgtgtggcaggaatacaagaagcctattcagacgcgcttgaacctgatgttcctcggtcagttccgcttacagcctaccattaacaccaacaaagatagcgagattgatgcacacaaacaggagtctggtatcgctcctaactttgtacacagccaagacggtaaccaccttcgtatgactgtagtgtgggcacacgagaagtacggaatcgaatcttttgcactgattcacgactccttcggtaccattccggctgacgctgcgaacctgttcaaagcagtgcgcgaaactatggtttcgacatatgagtcttgtgatgtactggctgatttctacgaccagttcgctgaccagttgcacgagtctcaattggacaaaatgccagcacttccggctaaaggtaacttgaacctccgtgacatcttaaaatcggacttcgcgttcgcg

SEQ ID NO: 270 - protein, 890 aa, synthetic construct
  REGION 1..890: note = Variant of RNA polymerase
MHHHHHHMNTINIAKNDFSDIELAAIPFNTLADHYGERLAREQLALEHESYEMGEARFRKMFERQLKAGEVADNAAAKPLITTLLPKMIARINDWFEEVKAKRGKRPTAFQFLQEIKPEAVAYITIKTTLACLTSADNTTVQAVASAIGRAIEDEARFGRIRDLEAKHFKKNVEEQLNKRVGHVYKKAFMQVVEADVLSKGLLGGEAWSSWHKEDSIHVGVRCIEMLIESTGMVSLHRQNAGVVGQDSETIELAPEYAEAIATRAGALAGISPMFQPCVVPPKPWTGITGGGYWAAGRKPLQLVRTRSLAALRRYEEVSMPEVIKAVNIAQNTAWRVNKKVLDVANAITQWQHCPVADVPAMDRGEMPARPLDIDTNEIALKAWKKEASAFYRKDKARVSRRLSMEFMLSQANKFANYKAIWFPQNMDWRGRVYAVPMFNPQGNDMTKGLLTFAQGKPIGEDGFYWLKIHGANTAGVDKVPFPQRIKFVEDNHTNIMECAKAPLENTWWAEQDSPFCFLAFCFEYAGVINHGLSYNCSLPLAFDGSCSGIQHFSAMLRDEIGGKAVNLLPSAEVQDIYRIVSDKVNEVLKQDLINGTSTTLETVTDKKTGEITERTKYGTKVMAQWWLEHGVNRGVTKRSVMTLVYGSKEFGFRDQVLSDTIQPAIDNGKGDMFLNPNQAAGYMAKLIWNAVSVTVVAAVEAMNWLKSAAKLLAAEVKDKKTDTVLRGRCAVHWVTPDGFPVWQEYKKPIQTRLNLMFLGQFRLQPTINTNKDSEIDAHKQESGIAPNFVHSQDGNHLRMTVVWAHEKYGIESFALIHDSFGTIPADAANLFKAVRETMVSTYESCDVLADFYDQFADQLHESQLDKMPALPAKGNLNLRDILKSDFAFA

SEQ ID NO: 271 - DNA, 2670 bp, synthetic construct
  misc_feature 1..2670: note = Variant of RNA polymerase
  source 1..2670: mol_type = other DNA
atgcaccatcaccatcaccatatgaacacgattaacatcgctaagaacgacttctctgacatcgaactggctgctatcccgttcaacactctggctgaccattacggtgagcgtttagctcgcgaacagttggcccttgagcatgagtcttacgagatgggtgaagcagttttccgcaagatgtttgagcgtcaacttaaagctggtgaggttgcggataacgctgccgccaagcctctcatcactaccctactccctaagatgattgcacgcatcaacgactggtttgaggaagtgaaagctaagcgcggcaagcgcccgacagccttccagttcctgcaagaaatcaagccggaagccgtagcgtacatcaccattaagaccactctggcttgcctaaccagtgcggacaatacaaccgttcaggctgtagcaagcgcaatcggtcgggccattgaggacgaggctcgcttcggtcgtatccgtgaccttgaagctaagcacttcaagaaaaacgttgaggaacaactcaacaagcgcgtagggcacgtctacaagaaagcatttatgcaagttgtcgaggctgacatgctctctaagggtctactcggtggcgaggcgtggtcttcgtggcataaggaagactctattcatgtaggagtacgctgcatcgagatgctcattgagtcaaccggaatggttagcttacaccgccaaaatgctggcgtagtaggtcaagactctgagactatcgaactcgcacctgaatacgctgaggctatcgcaacccgtgcaggtgcgctggctggcatctctccgatgttccaaccttgcgtagttcctcctaagccgtggactggcattactggtggtggctattgggctgcggggcgcaaacccctgcagttagtacgtactcgcagtctggcggcgcttcgccgctatgaagaagtgtcgatgccggaggtcatcaaagcagtcaacattgcgcagaatacagcatggcgtgtgaacaagaaagttctcgacgtagcgaatgcaatcacccaatggcagcactgtccagtcgcggatgtgcctgcgatggatcgtggcgaaatgccagctcgtccgttggacatcgataccaacgagattgcacttaaagcgtggaagaaagaagcttccgcgttctaccgcaaagacaaagcacgcgttagccgtcgtctgtcaatggagtttatgttatctcaggcgaacaagtttgcgaattataaagcaatctggtttccgcaaaacatggattggcgtgggcgcgtgtacgctgtcccgatgttcaatcctcagggcaacgatatgacgaaaggcctgctgacctttgcgcagggtaaacccattggtgaagacggcttctattggctcaagattcatggcgcaaatacagctggagtggataaagtaccgtttccacaacgcatcaaatttgttgaggataaccatacgaatattatggaatgcgcgaaagcaccgctggaaaacacttggtgggcggaacaggactcgccgttctgttttctggcgttctgctttgagtatgctggcgtcatcaatcacggtctgtcgtacaactgtagcttgcctctggcatttgatggtagttgctccggcattcaacatttctcagcgatgttacgcgacgaaattggcggcaaagctgtgaatctcctcccatctgcggaagtgcaggatatttatcgtatcgtcagcgacaaagttaacgaggtactgaaacaagatctgattaacggtacctctaccaccttggaaacggtgactgataagaagacaggcgaaattaccgaacgcacgaaatacgggaccaaagttatggcacagtggtggttagaacacggtgtgaatcgtggcgtcacgaaacgctcggttatgactttggtgtatgggagcaaagagtttggattccgcgatcaagtgctgagtgacaccattcaaccggcgatcgataacggcaaaggtgacatgtttctgaatccgaatcaggctgctggttacatggcgaaactgatctggaacgcagtgtccgtcaccgtagtcgcagcagttgaggcgatgaactggctgaaaagtgcggcgaaattacttgctgctgaagtgaaggataagaagacggatacagttctgcgtggccgctgcgcagtacattgggtgactcccgacggcttccctgtgtggcaggaatacaagaagcctattcagacgcgcttgaacctgatgttcctcggtcagttccgcttacagcctaccattaacaccaacaaagatagcgagattgatgcacacaaacaggagtctggtatcgctcctaactttgtacacagccaagacggtaaccaccttcgtatgactgtagtgtgggcacacgagaagtacggaatcgaatcttttgcactgattcacgactccttcggtaccattccggctgacgctgcgaacctgttcaaagcagtgcgcgaaactatggtttcgacatatgagtcttgtgatgtactggctgatttctacgaccagttcgctgaccagttgcacgagtctcaattggacaaaatgccagcacttccggctaaaggtaacttgaacctccgtgacatcttaaaatcggacttcgcgttcgcg

SEQ ID NO: 272 - protein, 890 aa, synthetic construct
  REGION 1..890: note = Variant of RNA polymerase
MHHHHHHMNTINIAKNDFSDIELAAIPFNTLADHYGERLAREQLALEHESYEMGEAVFRKMFERQLKAGEVADNAAAKPLITTLLPKMIARINDWFEEVKAKRGKRPTAFQFLQEIKPEAVAYITIKTTLACLTSADNTTVQAVASAIGRAIEDEARFGRIRDLEAKHFKKNVEEQLNKRVGHVYKKAFMQVVEADMLSKGLLGGEAWSSWHKEDSIHVGVRCIEMLIESTGMVSLHRQNAGVVGQDSETIELAPEYAEAIATRAGALAGISPMFQPCVVPPKPWTGITGGGYWAAGRKPLQLVRTRSLAALRRYEEVSMPEVIKAVNIAQNTAWRVNKKVLDVANAITQWQHCPVADVPAMDRGEMPARPLDIDTNEIALKAWKKEASAFYRKDKARVSRRLSMEFMLSQANKFANYKAIWFPQNMDWRGRVYAVPMFNPQGNDMTKGLLTFAQGKPIGEDGFYWLKIHGANTAGVDKVPFPQRIKFVEDNHTNIMECAKAPLENTWWAEQDSPFCFLAFCFEYAGVINHGLSYNCSLPLAFDGSCSGIQHFSAMLRDEIGGKAVNLLPSAEVQDIYRIVSDKVNEVLKQDLINGTSTTLETVTDKKTGEITERTKYGTKVMAQWWLEHGVNRGVTKRSVMTLVYGSKEFGFRDQVLSDTIQPAIDNGKGDMFLNPNQAAGYMAKLIWNAVSVTVVAAVEAMNWLKSAAKLLAAEVKDKKTDTVLRGRCAVHWVTPDGFPVWQEYKKPIQTRLNLMFLGQFRLQPTINTNKDSEIDAHKQESGIAPNFVHSQDGNHLRMTVVWAHEKYGIESFALIHDSFGTIPADAANLFKAVRETMVSTYESCDVLADFYDQFADQLHESQLDKMPALPAKGNLNLRDILKSDFAFA

SEQ ID NO: 273 - DNA, 2670 bp, synthetic construct
  misc_feature 1..2670: note = Variant of RNA polymerase
  source 1..2670: mol_type = other DNA
atgcaccatcaccatcaccatatgaacacgattaacatcgctaagaacgacttctctgacatcgaactggctgctatcccgttcaacactctggctgaccattacggtgagcgtttagctcgcgaacagttggcccttgagcatgagtcttacgagatgggtgaagcacgcttccgcaagatgtttgagcgtcaacttaaagctggtgaggttgcggataacgctgccgccaagcctctcatcactaccctactccctaagatgattgcacgcatcaacgactggtttgaggaagtgaaagctaagcgcggcaagcgcccgacagccttccagttcctgcaagaaatcaagccggaagccgtagcgtacatcaccattaagaccactctggcttgcctaaccagtgcggacaatacaaccgttcaggctgtagcaagcgcaatcggtcgggccattgaggacgaggctcgcttcggtcgtatccgtgaccttgaagctaagcacttcaagaaaaacgttgaggaacaactcaacaagcgcgtagggcacgtctacaagaaagcaattatgcaagttgtcgaggctgacatgctctctaagggtctactcggtggcgaggcgtggtcttcgtggcataaggaagactctattcatgtaggagtacgctgcatcgagatgctcattgagtcaaccggaatggttagcttacaccgccaaaatgctggcgtagtaggtcaagactctgagactatcgaactcgcacctgaatacgctgaggctatcgcaacccgtgcaggtgcgctggctggcatctctccgatgttccaaccttgcgtagttcctcctaagccgtggactggcattactggtggtggctattgggctgcggggcgcaaacccctgcagttagtacgtactcgcagtctggcggcgcttcgccgctatgaagaagtgtcgatgccggaggtcatcaaagcagtcaacattgcgcagaatacagcatggcgtgtgaacaagaaagttctcgacgtagcgaatgcaatcacccaatggcagcactgtccagtcgcggatgtgcctgcgatggatcgtggcgaaatgccagctcgtccgttggacatcgataccaacgagattgcacttaaagcgtggaagaaagaagcttccgcgttctaccgcaaagacaaagcacgcgttagccgtcgtctgtcaatggagtttatgttatctcaggcgaacaagtttgcgaattataaagcaatctggtttccgcaaaacatggattggcgtgggcgcgtgtacgctgtcccgatgttcaatcctcagggcaacgatatgacgaaaggcctgctgacctttgcgcagggtaaacccattggtgaagacggcttctattggctcaagattcatggcgcaaatacagctggagtggataaagtaccgtttccacaacgcatcaaatttgttgaggataaccatacgaatattatggaatgcgcgaaagcaccgctggaaaacacttggtgggcggaacaggactcgccgttctgttttctggcgttctgctttgagtatgctggcgtcatcaatcacggtctgtcgtacaactgtagcttgcctctggcatttgatggtagttgctccggcattcaacatttctcagcgatgttacgcgacgaaattggcggcaaagctgtgaatctcctcccatctgcggaagtgcaggatatttatcgtatcgtcagcgacaaagttaacgaggtactgaaacaagatctgattaacggtacctctaccaccttggaaacggtgactgataagaagacaggcgaaattaccgaacgcacgaaatacgggaccaaagttatggcacagtggtggttagaacacggtgtgaatcgtggcgtcacgaaacgctcggttatgactttggtgtatgggagcaaagagtttggattccgcgatcaagtgctgagtgacaccattcaaccggcgatcgataacggcaaaggtgacatgtttctgaatccgaatcaggctgctggttacatggcgaaactgatctggaacgcagtgtccgtcaccgtagtcgcagcagttgaggcgatgaactggctgaaaagtgcggcgaaattacttgctgctgaagtgaaggataagaagacggatacagttctgcgtggccgctgcgcagtacattgggtgactcccgacggcttccctgtgtggcaggaatacaagaagcctattcagacgcgcttgaacctgatgttcctcggtcagttccgcttacagcctaccattaacaccaacaaagatagcgagattgatgcacacaaacaggagtctggtatcgctcctaactttgtacacagccaagacggtaaccaccttcgtatgactgtagtgtgggcacacgagaagtacggaatcgaatcttttgcactgattcacgactccttcggtaccattccggctgacgctgcgaacctgttcaaagcagtgcgcgaaactatggtttcgacatatgagtcttgtgatgtactggctgatttctacgaccagttcgctgaccagttgcacgagtctcaattggacaaaatgccagcacttccggctaaaggtaacttgaacctccgtgacatcttaaaatcggacttcgcgttcgcg

SEQ ID NO: 274 - protein, 890 aa, synthetic construct
  REGION 1..890: note = Variant of RNA polymerase
MHHHHHHMNTINIAKNDFSDIELAAIPFNTLADHYGERLAREQLALEHESYEMGEARFRKMFERQLKAGEVADNAAAKPLITTLLPKMIARINDWFEEVKAKRGKRPTAFQFLQEIKPEAVAYITIKTTLACLTSADNTTVQAVASAIGRAIEDEARFGRIRDLEAKHFKKNVEEQLNKRVGHVYKKAIMQVVEADMLSKGLLGGEAWSSWHKEDSIHVGVRCIEMLIESTGMVSLHRQNAGVVGQDSETIELAPEYAEAIATRAGALAGISPMFQPCVVPPKPWTGITGGGYWAAGRKPLQLVRTRSLAALRRYEEVSMPEVIKAVNIAQNTAWRVNKKVLDVANAITQWQHCPVADVPAMDRGEMPARPLDIDTNEIALKAWKKEASAFYRKDKARVSRRLSMEFMLSQANKFANYKAIWFPQNMDWRGRVYAVPMFNPQGNDMTKGLLTFAQGKPIGEDGFYWLKIHGANTAGVDKVPFPQRIKFVEDNHTNIMECAKAPLENTWWAEQDSPFCFLAFCFEYAGVINHGLSYNCSLPLAFDGSCSGIQHFSAMLRDEIGGKAVNLLPSAEVQDIYRIVSDKVNEVLKQDLINGTSTTLETVTDKKTGEITERTKYGTKVMAQWWLEHGVNRGVTKRSVMTLVYGSKEFGFRDQVLSDTIQPAIDNGKGDMFLNPNQAAGYMAKLIWNAVSVTVVAAVEAMNWLKSAAKLLAAEVKDKKTDTVLRGRCAVHWVTPDGFPVWQEYKKPIQTRLNLMFLGQFRLQPTINTNKDSEIDAHKQESGIAPNFVHSQDGNHLRMTVVWAHEKYGIESFALIHDSFGTIPADAANLFKAVRETMVSTYESCDVLADFYDQFADQLHESQLDKMPALPAKGNLNLRDILKSDFAFA

SEQ ID NO: 275 - DNA, 2670 bp, synthetic construct
  misc_feature 1..2670: note = Variant of RNA polymerase
  source 1..2670: mol_type = other DNA
atgcaccatcaccatcaccatatgaacacgattaacatcgctaagaacgacttctctgacatcgaactggctgctatcccgttcaacactctggctgaccattacggtgagcgtttagctcgcgaacagttggcccttgagcatgagtcttacgagatgggtgaagcacgcttccgcaagatgtttgagcgtcaacttaaagctggtgaggttgcggataacgctgccgccaagcctctcatcactaccctactccctaagatgattgcacgcatcaacgactggtttgaggaagtgaaagctaagcgcggcaagcgcccgacagccttccagttcctgcaagaaatcaagccggaagccgtagcgtacatcaccattaagaccactctggcttgcctaaccagtgcggacaatacaaccgttcaggctgtagcaagcgcaatcggtcgggccattgaggacgaggctcgcttcggtcgtatccgtgaccttgaagctaagcacttcaagaaaaacgttgaggaacaactcaacaagcgcgtagggcacgtctacaaggctgcatttatgcaagttgtcgaggctgacatgctctctaagggtctactcggtggcgaggcgtggtcttcgtggcataaggaagactctattcatgtaggagtacgctgcatcgagatgctcattgagtcaaccggaatggttagcttacaccgccaaaatgctggcgtagtaggtcaagactctgagactatcgaactcgcacctgaatacgctgaggctatcgcaacccgtgcaggtgcgctggctggcatctctccgatgttccaaccttgcgtagttcctcctaagccgtggactggcattactggtggtggctattgggctgcggggcgcaaacccctgcagttagtacgtactcgcagtctggcggcgcttcgccgctatgaagaagtgtcgatgccggaggtcatcaaagcagtcaacattgcgcagaatacagcatggcgtgtgaacaagaaagttctcgacgtagcgaatgcaatcacccaatggcagcactgtccagtcgcggatgtgcctgcgatggatcgtggcgaaatgccagctcgtccgttggacatcgataccaacgagattgcacttaaagcgtggaagaaagaagcttccgcgttctaccgcaaagacaaagcacgcgttagccgtcgtctgtcaatggagtttatgttatctcaggcgaacaagtttgcgaattataaagcaatctggtttccgcaaaacatggattggcgtgggcgcgtgtacgctgtcccgatgttcaatcctcagggcaacgatatgacgaaaggcctgctgacctttgcgcagggtaaacccattggtgaagacggcttctattggctcaagattcatggcgcaaatacagctggagtggataaagtaccgtttccacaacgcatcaaatttgttgaggataaccatacgaatattatggaatgcgcgaaagcaccgctggaaaacacttggtgggcggaacaggactcgccgttctgttttctggcgttctgctttgagtatgctggcgtcatcaatcacggtctgtcgtacaactgtagcttgcctctggcatttgatggtagttgctccggcattcaacatttctcagcgatgttacgcgacgaaattggcggcaaagctgtgaatctcctcccatctgcggaagtgcaggatatttatcgtatcgtcagcgacaaagttaacgaggtactgaaacaagatctgattaacggtacctctaccaccttggaaacggtgactgataagaagacaggcgaaattaccgaacgcacgaaatacgggaccaaagttatggcacagtggtggttagaacacggtgtgaatcgtggcgtcacgaaacgctcggttatgactttggtgtatgggagcaaagagtttggattccgcgatcaagtgctgagtgacaccattcaaccggcgatcgataacggcaaaggtgacatgtttctgaatccgaatcaggctgctggttacatggcgaaactgatctggaacgcagtgtccgtcaccgtagtcgcagcagttgaggcgatgaactggctgaaaagtgcggcgaaattacttgctgctgaagtgaaggataagaagacggatacagttctgcgtggccgctgcgcagtacattgggtgactcccgacggcttccctgtgtggcaggaatacaagaagcctattcagacgcgcttgaacctgatgttcctcggtcagttccgcttacagcctaccattaacaccaacaaagatagcgagattgatgcacacaaacaggagtctggtatcgctcctaactttgtacacagccaagacggtaaccaccttcgtatgactgtagtgtgggcacacgagaagtacggaatcgaatcttttgcactgattcacgactccttcggtaccattccggctgacgctgcgaacctgttcaaagcagtgcgcgaaactatggtttcgacatatgagtcttgtgatgtactggctgatttctacgaccagttcgctgaccagttgcacgagtctcaattggacaaaatgccagcacttccggctaaaggtaacttgaacctccgtgacatcttaaaatcggacttcgcgttcgcg

SEQ ID NO: 276 - protein, 890 aa, synthetic construct
  REGION 1..890: note = Variant of RNA polymerase
MHHHHHHMNTINIAKNDFSDIELAAIPFNTLADHYGERLAREQLALEHESYEMGEARFRKMFERQLKAGEVADNAAAKPLITTLLPKMIARINDWFEEVKAKRGKRPTAFQFLQEIKPEAVAYITIKTTLACLTSADNTTVQAVASAIGRAIEDEARFGRIRDLEAKHFKKNVEEQLNKRVGHVYKAAFMQVVEADMLSKGLLGGEAWSSWHKEDSIHVGVRCIEMLIESTGMVSLHRQNAGVVGQDSETIELAPEYAEAIATRAGALAGISPMFQPCVVPPKPWTGITGGGYWAAGRKPLQLVRTRSLAALRRYEEVSMPEVIKAVNIAQNTAWRVNKKVLDVANAITQWQHCPVADVPAMDRGEMPARPLDIDTNEIALKAWKKEASAFYRKDKARVSRRLSMEFMLSQANKFANYKAIWFPQNMDWRGRVYAVPMFNPQGNDMTKGLLTFAQGKPIGEDGFYWLKIHGANTAGVDKVPFPQRIKFVEDNHTNIMECAKAPLENTWWAEQDSPFCFLAFCFEYAGVINHGLSYNCSLPLAFDGSCSGIQHFSAMLRDEIGGKAVNLLPSAEVQDIYRIVSDKVNEVLKQDLINGTSTTLETVTDKKTGEITERTKYGTKVMAQWWLEHGVNRGVTKRSVMTLVYGSKEFGFRDQVLSDTIQPAIDNGKGDMFLNPNQAAGYMAKLIWNAVSVTVVAAVEAMNWLKSAAKLLAAEVKDKKTDTVLRGRCAVHWVTPDGFPVWQEYKKPIQTRLNLMFLGQFRLQPTINTNKDSEIDAHKQESGIAPNFVHSQDGNHLRMTVVWAHEKYGIESFALIHDSFGTIPADAANLFKAVRETMVSTYESCDVLADFYDQFADQLHESQLDKMPALPAKGNLNLRDILKSDFAFA

SEQ ID NO: 277 - DNA, 2670 bp, synthetic construct
  misc_feature 1..2670: note = Variant of RNA polymerase
  source 1..2670: mol_type = other DNA
atgcaccatcaccatcaccatatgaacacgattaacatcgctaagaacgacttctctgacatcgaactggctgctatcccgttcaacactctggctgaccattacggtgagcgtttagctcgcgaacagttggcccttgagcatgagtcttacgagatgggtgaagcacgcttccgcaagatgtttgagcgtcaacttaaagctggtgaggttgcggataacgctgccgccaagcctctcatcactaccctactccctaagatgattgcacgcatcaacgactggtttgaggaagtgaaagctaagcgcggcaagcgcccgacagccttccagttcctgcaagaaatcaagccggaagccgtagcgtacatcaccattaagaccactctggcttgcctaaccagtgcggacaatacaaccgttcaggctgtagcaagcgcaatcggtcgggccattgaggacgaggctcgcttcggtcgtatccgtgaccttgaagctaagcacttcaagaaaaacgttgaggaacaactcaacaagcgcgtagggcacgtctacaagaaagcatttatgcaagttgtcgaggaggacatgctctctaagggtctactcggtggcgaggcgtggtcttcgtggcataaggaagactctattcatgtaggagtacgctgcatcgagatgctcattgagtcaaccggaatggttagcttacaccgccaaaatgctggcgtagtaggtcaagactctgagactatcgaactcgcacctgaatacgctgaggctatcgcaacccgtgcaggtgcgctggctggcatctctccgatgttccaaccttgcgtagttcctcctaagccgtggactggcattactggtggtggctattgggctgcggggcgcaaacccctgcagttagtacgtactcgcagtctggcggcgcttcgccgctatgaagaagtgtcgatgccggaggtcatcaaagcagtcaacattgcgcagaatacagcatggcgtgtgaacaagaaagttctcgacgtagcgaatgcaatcacccaatggcagcactgtccagtcgcggatgtgcctgcgatggatcgtggcgaaatgccagctcgtccgttggacatcgataccaacgagattgcacttaaagcgtggaagaaagaagcttccgcgttctaccgcaaagacaaagcacgcgttagccgtcgtctgtcaatggagtttatgttatctcaggcgaacaagtttgcgaattataaagcaatctggtttccgcaaaacatggattggcgtgggcgcgtgtacgctgtcccgatgttcaatcctcagggcaacgatatgacgaaaggcctgctgacctttgcgcagggtaaacccattggtgaagacggcttctattggctcaagattcatggcgcaaatacagctggagtggataaagtaccgtttccacaacgcatcaaatttgttgaggataaccatacgaatattatggaatgcgcgaaagcaccgctggaaaacacttggtgggcggaacaggactcgccgttctgttttctggcgttctgctttgagtatgctggcgtcatcaatcacggtctgtcgtacaactgtagcttgcctctggcatttgatggtagttgctccggcattcaacatttctcagcgatgttacgcgacgaaattggcggcaaagctgtgaatctcctcccatctgcggaagtgcaggatatttatcgtatcgtcagcgacaaagttaacgaggtactgaaacaagatctgattaacggtacctctaccaccttggaaacggtgactgataagaagacaggcgaaattaccgaacgcacgaaatacgggaccaaagttatggcacagtggtggttagaacacggtgtgaatcgtggcgtcacgaaacgctcggttatgactttggtgtatgggagcaaagagtttggattccgcgatcaagtgctgagtgacaccattcaaccggcgatcgataacggcaaaggtgacatgtttctgaatccgaatcaggctgctggttacatggcgaaactgatctggaacgcagtgtccgtcaccgtagtcgcagcagttgaggcgatgaactggctgaaaagtgcggcgaaattacttgctgctgaagtgaaggataagaagacggatacagttctgcgtggccgctgcgcagtacattgggtgactcccgacggcttccctgtgtggcaggaatacaagaagcctattcagacgcgcttgaacctgatgttcctcggtcagttccgcttacagcctaccattaacaccaacaaagatagcgagattgatgcacacaaacaggagtctggtatcgctcctaactttgtacacagccaagacggtaaccaccttcgtatgactgtagtgtgggcacacgagaagtacggaatcgaatcttttgcactgattcacgactccttcggtaccattccggctgacgctgcgaacctgttcaaagcagtgcgcgaaactatggtttcgacatatgagtcttgtgatgtactggctgatttctacgaccagttcgctgaccagttgcacgagtctcaattggacaaaatgccagcacttccggctaaaggtaacttgaacctccgtgacatcttaaaatcggacttcgcgttcgcg

SEQ ID NO: 278 - protein, 890 aa, synthetic construct
  REGION 1..890: note = Variant of RNA polymerase
MHHHHHHMNTINIAKNDFSDIELAAIPFNTLADHYGERLAREQLALEHESYEMGEARFRKMFERQLKAGEVADNAAAKPLITTLLPKMIARINDWFEEVKAKRGKRPTAFQFLQEIKPEAVAYITIKTTLACLTSADNTTVQAVASAIGRAIEDEARFGRIRDLEAKHFKKNVEEQLNKRVGHVYKKAFMQVVEEDMLSKGLLGGEAWSSWHKEDSIHVGVRCIEMLIESTGMVSLHRQNAGVVGQDSETIELAPEYAEAIATRAGALAGISPMFQPCVVPPKPWTGITGGGYWAAGRKPLQLVRTRSLAALRRYEEVSMPEVIKAVNIAQNTAWRVNKKVLDVANAITQWQHCPVADVPAMDRGEMPARPLDIDTNEIALKAWKKEASAFYRKDKARVSRRLSMEFMLSQANKFANYKAIWFPQNMDWRGRVYAVPMFNPQGNDMTKGLLTFAQGKPIGEDGFYWLKIHGANTAGVDKVPFPQRIKFVEDNHTNIMECAKAPLENTWWAEQDSPFCFLAFCFEYAGVINHGLSYNCSLPLAFDGSCSGIQHFSAMLRDEIGGKAVNLLPSAEVQDIYRIVSDKVNEVLKQDLINGTSTTLETVTDKKTGEITERTKYGTKVMAQWWLEHGVNRGVTKRSVMTLVYGSKEFGFRDQVLSDTIQPAIDNGKGDMFLNPNQAAGYMAKLIWNAVSVTVVAAVEAMNWLKSAAKLLAAEVKDKKTDTVLRGRCAVHWVTPDGFPVWQEYKKPIQTRLNLMFLGQFRLQPTINTNKDSEIDAHKQESGIAPNFVHSQDGNHLRMTVVWAHEKYGIESFALIHDSFGTIPADAANLFKAVRETMVSTYESCDVLADFYDQFADQLHESQLDKMPALPAKGNLNLRDILKSDFAFA

SEQ ID NO: 279 - DNA, 2670 bp, synthetic construct
  misc_feature 1..2670: note = Variant of RNA polymerase
  source 1..2670: mol_type = other DNA
atgcaccatcaccatcaccatatgaacacgattaacatcgctaagaacgacttctctgacatcgaactggctgctatcccgttcaacactctggctgaccattacggtgagcgtttagctcgcgaacagttggcccttgagcatgagtcttacgagatgggtgaagcacgcttccgcaagatgtttgagcgtcaacttaaagctggtgaggttgcggataacgctgccgccaagcctctcatcactaccctactccctaagatgattgcacgcatcaacgactggtttgaggaagtgaaagctaagcgcggcaagcgcccgacagccttccagttcctgcaagaaatcaagccggaagccgtagcgtacatcaccattaagaccactctggcttgcctaaccagtgcggacaatacaaccgttcaggctgtagcaagcgcaatcggtcgggccattgaggacgaggctcgcttcggtcgtatccgtgaccttgaagctaagcacttcaagaaaaacgttgaggaacaactcaacaagcgcgtagggcacgtctacaagaaagcatttatgcaagttgtcgagacggacatgctctctaagggtctactcggtggcgaggcgtggtcttcgtggcataaggaagactctattcatgtaggagtacgctgcatcgagatgctcattgagtcaaccggaatggttagcttacaccgccaaaatgctggcgtagtaggtcaagactctgagactatcgaactcgcacctgaatacgctgaggctatcgcaacccgtgcaggtgcgctggctggcatctctccgatgttccaaccttgcgtagttcctcctaagccgtggactggcattactggtggtggctattgggctgcggggcgcaaacccctgcagttagtacgtactcgcagtctggcggcgcttcgccgctatgaagaagtgtcgatgccggaggtcatcaaagcagtcaacattgcgcagaatacagcatggcgtgtgaacaagaaagttctcgacgtagcgaatgcaatcacccaatggcagcactgtccagtcgcggatgtgcctgcgatggatcgtggcgaaatgccagctcgtccgttggacatcgataccaacgagattgcacttaaagcgtggaagaaagaagcttccgcgttctaccgcaaagacaaagcacgcgttagccgtcgtctgtcaatggagtttatgttatctcaggcgaacaagtttgcgaattataaagcaatctggtttccgcaaaacatggattggcgtgggcgcgtgtacgctgtcccgatgttcaatcctcagggcaacgatatgacgaaaggcctgctgacctttgcgcagggtaaacccattggtgaagacggcttctattggctcaagattcatggcgcaaatacagctggagtggataaagtaccgtttccacaacgcatcaaatttgttgaggataaccatacgaatattatggaatgcgcgaaagcaccgctggaaaacacttggtgggcggaacaggactcgccgttctgttttctggcgttctgctttgagtatgctggcgtcatcaatcacggtctgtcgtacaactgtagcttgcctctggcatttgatggtagttgctccggcattcaacatttctcagcgatgttacgcgacgaaattggcggcaaagctgtgaatctcctcccatctgcggaagtgcaggatatttatcgtatcgtcagcgacaaagttaacgaggtactgaaacaagatctgattaacggtacctctaccaccttggaaacggtgactgataagaagacaggcgaaattaccgaacgcacgaaatacgggaccaaagttatggcacagtggtggttagaacacggtgtgaatcgtggcgtcacgaaacgctcggttatgactttggtgtatgggagcaaagagtttggattccgcgatcaagtgctgagtgacaccattcaaccggcgatcgataacggcaaaggtgacatgtttctgaatccgaatcaggctgctggttacatggcgaaactgatctggaacgcagtgtccgtcaccgtagtcgcagcagttgaggcgatgaactggctgaaaagtgcggcgaaattacttgctgctgaagtgaaggataagaagacggatacagttctgcgtggccgctgcgcagtacattgggtgactcccgacggcttccctgtgtggcaggaatacaagaagcctattcagacgcgcttgaacctgatgttcctcggtcagttccgcttacagcctaccattaacaccaacaaagatagcgagattgatgcacacaaacaggagtctggtatcgctcctaactttgtacacagccaagacggtaaccaccttcgtatgactgtagtgtgggcacacgagaagtacggaatcgaatcttttgcactgattcacgactccttcggtaccattccggctgacgctgcgaacctgttcaaagcagtgcgcgaaactatggtttcgacatatgagtcttgtgatgtactggctgatttctacgaccagttcgctgaccagttgcacgagtctcaattggacaaaatgccagcacttccggctaaaggtaacttgaacctccgtgacatcttaaaatcggacttcgcgttcgcg

SEQ ID NO: 280 - protein, 890 aa, synthetic construct
  REGION 1..890: note = Variant of RNA polymerase
MHHHHHHMNTINIAKNDFSDIELAAIPFNTLADHYGERLAREQLALEHESYEMGEARFRKMFERQLKAGEVADNAAAKPLITTLLPKMIARINDWFEEVKAKRGKRPTAFQFLQEIKPEAVAYITIKTTLACLTSADNTTVQAVASAIGRAIEDEARFGRIRDLEAKHFKKNVEEQLNKRVGHVYKKAFMQVVETDMLSKGLLGGEAWSSWHKEDSIHVGVRCIEMLIESTGMVSLHRQNAGVVGQDSETIELAPEYAEAIATRAGALAGISPMFQPCVVPPKPWTGITGGGYWAAGRKPLQLVRTRSLAALRRYEEVSMPEVIKAVNIAQNTAWRVNKKVLDVANAITQWQHCPVADVPAMDRGEMPARPLDIDTNEIALKAWKKEASAFYRKDKARVSRRLSMEFMLSQANKFANYKAIWFPQNMDWRGRVYAVPMFNPQGNDMTKGLLTFAQGKPIGEDGFYWLKIHGANTAGVDKVPFPQRIKFVEDNHTNIMECAKAPLENTWWAEQDSPFCFLAFCFEYAGVINHGLSYNCSLPLAFDGSCSGIQHFSAMLRDEIGGKAVNLLPSAEVQDIYRIVSDKVNEVLKQDLINGTSTTLETVTDKKTGEITERTKYGTKVMAQWWLEHGVNRGVTKRSVMTLVYGSKEFGFRDQVLSDTIQPAIDNGKGDMFLNPNQAAGYMAKLIWNAVSVTVVAAVEAMNWLKSAAKLLAAEVKDKKTDTVLRGRCAVHWVTPDGFPVWQEYKKPIQTRLNLMFLGQFRLQPTINTNKDSEIDAHKQESGIAPNFVHSQDGNHLRMTVVWAHEKYGIESFALIHDSFGTIPADAANLFKAVRETMVSTYESCDVLADFYDQFADQLHESQLDKMPALPAKGNLNLRDILKSDFAFA

SEQ ID NO: 281 - DNA, 2670 bp, synthetic construct
  misc_feature 1..2670: note = Variant of RNA polymerase
  source 1..2670: mol_type = other DNA
atgcaccatcaccatcaccatatgaacacgattaacatcgctaagaacgacttctctgacatcgaactggctgctatcccgttcaacactctggctgaccattacggtgagcgtttagctcgcgaacagttggcccttgagcatgagtcttacgagatgggtgaagcacgcttccgcaagatgtttgagcgtcaacttaaagctggtgaggttgcggataacgctgccgccaagcctctcatcactaccctactccctaagatgattgcacgcatcaacgactggtttgaggaagtgaaagctaagcgcggcaagcgcccgacagccttccagttcctgcaagaaatcaagccggaagccgtagcgtacatcaccattaagaccactctggcttgcctaaccagtgcggacaatacaaccgttcaggctgtagcaagcgcaatcggtcgggccattgaggacgaggctcgcttcggtcgtatccgtgaccttgaagctaagcacttcaagaaaaacgttgaggaacaactcaacaagcgcgtagggcacgtctacaaggtggcatttatgcaagttgtcgaggctgacatgctctctaagggtctactcggtggcgaggcgtggtcttcgtggcataaggaagactctattcatgtaggagtacgctgcatcgagatgctcattgagtcaaccggaatggttagcttacaccgccaaaatgctggcgtagtaggtcaagactctgagactatcgaactcgcacctgaatacgctgaggctatcgcaacccgtgcaggtgcgctggctggcatctctccgatgttccaaccttgcgtagttcctcctaagccgtggactggcattactggtggtggctattgggctgcggggcgcaaacccctgcagttagtacgtactcgcagtctggcggcgcttcgccgctatgaagaagtgtcgatgccggaggtcatcaaagcagtcaacattgcgcagaatacagcatggcgtgtgaacaagaaagttctcgacgtagcgaatgcaatcacccaatggcagcactgtccggtcgcggatgtgcctgcgatggatcgtggcgaaatgccagctcgtccgttggacatcgataccaacgagattgcacttaaagcgtggaagaaagaagcttccgcgttctaccgcaaagacaaagcacgcgttagccgtcgtctgtcaatggagtttatgttatctcaggcgaacaagtttgcgaattataaagcaatctggtttccgcaaaacatggattggcgtgggcgcgtgtacgctgtcccgatgttcaatcctcagggcaacgatatgacgaaaggcctgctgacctttgcgcagggtaaacccattggtgaagacggcttctattggctcaagattcatggcgcaaatacagctggagtggataaagtaccgtttccacaacgcatcaaatttgttgaggataaccatacgaatattatggaatgcgcgaaagcaccgctggaaaacacttggtgggcggaacaggactcgccgttctgttttctggcgttctgctttgagtatgctggcgtcatcaatcacggtctgtcgtacaactgtagcttgcctctggcatttgatggtagttgctccggcattcaacatttctcagcgatgttacgcgacgaaattggcggcaaagctgtgaatctcctcccatctgcggaagtgcaggatatttatcgtatcgtcagcgacaaagttaacgaggtactgaaacaagatctgattaacggtacctctaccaccttggaaacggtgactgataagaagacaggcgaaattaccgaacgcacgaaatacgggaccaaagttatggcacagtggtggttagaacacggtgtgaatcgtggcgtcacgaaacgctcggttatgactttggtgtatgggagcaaagagtttggattccgcgatcaagtgctgagtgacaccattcaaccggcgatcgataacggcaaaggtgacatgtttctgaatccgaatcaggctgctggttacatggcgaaactgatctggaacgcagtgtccgtcaccgtagtcgcagcagttgaggcgatgaactggctgaaaagtgcggcgaaattacttgctgctgaagtgaaggataagaagacggatacagttctgcgtggccgctgcgcagtacattgggtgactcccgacggcttccctgtgtggcaggaatacaagaagcctattcagacgcgcttgaacctgatgttcctcggtcagttccgcttacagcctaccattaacaccaacaaagatagcgagattgatgcacacaaacaggagtctggtatcgctcctaactttgtacacagccaagacggtaaccaccttcgtatgactgtagtgtgggcacacgagaagtacggaatcgaatcttttgcactgattcacgactccttcggtaccattccggctgacgctgcgaacctgttcaaagcagtgcgcgaaactatggtttcgacatatgagtcttgtgatgtactggctgatttctacgaccagttcgctgaccagttgcacgagtctcaattggacaaaatgccagcacttccggctaaaggtaacttgaacctccgtgacatcttaaaatcggacttcgcgttcgcg

SEQ ID NO: 282 - protein, 890 aa, synthetic construct
  REGION 1..890: note = Variant of RNA polymerase
MHHHHHHMNTINIAKNDFSDIELAAIPFNTLADHYGERLAREQLALEHESYEMGEARFRKMFERQLKAGEVADNAAAKPLITTLLPKMIARINDWFEEVKAKRGKRPTAFQFLQEIKPEAVAYITIKTTLACLTSADNTTVQAVASAIGRAIEDEARFGRIRDLEAKHFKKNVEEQLNKRVGHVYKVAFMQVVEADMLSKGLLGGEAWSSWHKEDSIHVGVRCIEMLIESTGMVSLHRQNAGVVGQDSETIELAPEYAEAIATRAGALAGISPMFQPCVVPPKPWTGITGGGYWAAGRKPLQLVRTRSLAALRRYEEVSMPEVIKAVNIAQNTAWRVNKKVLDVANAITQWQHCPVADVPAMDRGEMPARPLDIDTNEIALKAWKKEASAFYRKDKARVSRRLSMEFMLSQANKFANYKAIWFPQNMDWRGRVYAVPMFNPQGNDMTKGLLTFAQGKPIGEDGFYWLKIHGANTAGVDKVPFPQRIKFVEDNHTNIMECAKAPLENTWWAEQDSPFCFLAFCFEYAGVINHGLSYNCSLPLAFDGSCSGIQHFSAMLRDEIGGKAVNLLPSAEVQDIYRIVSDKVNEVLKQDLINGTSTTLETVTDKKTGEITERTKYGTKVMAQWWLEHGVNRGVTKRSVMTLVYGSKEFGFRDQVLSDTIQPAIDNGKGDMFLNPNQAAGYMAKLIWNAVSVTVVAAVEAMNWLKSAAKLLAAEVKDKKTDTVLRGRCAVHWVTPDGFPVWQEYKKPIQTRLNLMFLGQFRLQPTINTNKDSEIDAHKQESGIAPNFVHSQDGNHLRMTVVWAHEKYGIESFALIHDSFGTIPADAANLFKAVRETMVSTYESCDVLADFYDQFADQLHESQLDKMPALPAKGNLNLRDILKSDFAFA

SEQ ID NO: 283 - DNA, 2670 bp, synthetic construct
  misc_feature 1..2670: note = Variant of RNA polymerase
  source 1..2670: mol_type = other DNA
atgcaccatcaccatcaccatatgaacacgattaacatcgctaagaacgacttctctgacatcgaactggctgctatcccgttcaacactctggctgaccattacggtgagcgtttagctcgcgaacagttggcccttgagcatgagtcttacgagatgggtgaagcacgcttccgcaagatgtttgagcgtcaacttaaagctggtgaggttgcggataacgctgccgccaagcctctcatcactaccctactccctaagatgattgcacgcatcaacgactggtttgaggaagtgaaagctaagcgcggcaagcgcccgacagccttccagttcctgcaagaaatcaagccggaagccgtagcgtacatcaccattaagaccactctggcttgcctaaccagtgcggacaatacaaccgttcaggctgtagcaagcgcaatcggtcgggccattgaggacgaggctcgcttcggtcgtatccgtgaccttgaagctaagcacttcaagaaaaacgttgaggaacaactcaacaagcgcccggggcacgtctacaagaaagcatttatgcaagttgtcgaggctgacatgctctctaagggtctactcggtggcgaggcgtggtcttcgtggcataaggaagactctattcatgtaggagtacgctgcatcgagatgctcattgagtcaaccggaatggttagcttacaccgccaaaatgctggcgtagtaggtcaagactctgagactatcgaactcgcacctgaatacgctgaggctatcgcaacccgtgcaggtgcgctggctggcatctctccgatgttccaaccttgcgtagttcctcctaagccgtggactggcattactggtggtggctattgggctgcggggcgcaaacccctgcagttagtacgtactcgcagtctggcggcgcttcgccgctatgaagaagtgtcgatgccggaggtcatcaaagcagtcaacattgcgcagaatacagcatggcgtgtgaacaagaaagttctcgacgtagcgaatgcaatcacccaatggcagcactgtccagtcgcggatgtgcctgcgatggatcgtggcgaaatgccagctcgtccgttggacatcgataccaacgagattgcacttaaagcgtggaagaaagaagcttccgcgttctaccgcaaagacaaagcacgcgttagccgtcgtctgtcaatggagtttatgttatctcaggcgaacaagtttgcgaattataaagcaatctggtttccgcaaaacatggattggcgtgggcgcgtgtacgctgtcccgatgttcaatcctcagggcaacgatatgacgaaaggcctgctgacctttgcgcagggtaaacccattggtgaagacggcttctattggctcaagattcatggcgcaaatacagctggagtggataaagtaccgtttccacaacgcatcaaatttgttgaggataaccatacgaatattatggaatgcgcgaaagcaccgctggaaaacacttggtgggcggaacaggactcgccgttctgttttctggcgttctgctttgagtatgctggcgtcatcaatcacggtctgtcgtacaactgtagcttgcctctggcatttgatggtagttgctccggcattcaacatttctcagcgatgttacgcgacgaaattggcggcaaagctgtgaatctcctcccatctgcggaagtgcaggatatttatcgtatcgtcagcgacaaagttaacgaggtactgaaacaagatctgattaacggtacctctaccaccttggaaacggtgactgataagaagacaggcgaaattaccgaacgcacgaaatacgggaccaaagttatggcacagtggtggttagaacacggtgtgaatcgtggcgtcacgaaacgctcggttatgactttggtgtatgggagcaaagagtttggattccgcgatcaagtgctgagtgacaccattcaaccggcgatcgataacggcaaaggtgacatgtttctgaatccgaatcaggctgctggttacatggcgaaactgatctggaacgcagtgtccgtcaccgtagtcgcagcagttgaggcgatgaactggctgaaaagtgcggcgaaattacttgctgctgaagtgaaggataagaagacggatacagttctgcgtggccgctgcgcagtacattgggtgactcccgacggcttccctgtgtggcaggaatacaagaagcctattcagacgcgcttgaacctgatgttcctcggtcagttccgcttacagcctaccattaacaccaacaaagatagcgagattgatgcacacaaacaggagtctggtatcgctcctaactttgtacacagccaagacggtaaccaccttcgtatgactgtagtgtgggcacacgagaagtacggaatcgaatcttttgcactgattcacgactccttcggtaccattccggctgacgctgcgaacctgttcaaagcagtgcgcgaaactatggtttcgacatatgagtcttgtgatgtactggctgatttctacgaccagttcgctgaccagttgcacgagtctcaattggacaaaatgccagcacttccggctaaaggtaacttgaacctccgtgacatcttaaaatcggacttcgcgttcgcg

SEQ ID NO: 284 - protein, 890 aa, synthetic construct
  REGION 1..890: note = Variant of RNA polymerase
MHHHHHHMNTINIAKNDFSDIELAAIPFNTLADHYGERLAREQLALEHESYEMGEARFRKMFERQLKAGEVADNAAAKPLITTLLPKMIARINDWFEEVKAKRGKRPTAFQFLQEIKPEAVAYITIKTTLACLTSADNTTVQAVASAIGRAIEDEARFGRIRDLEAKHFKKNVEEQLNKRPGHVYKKAFMQVVEADMLSKGLLGGEAWSSWHKEDSIHVGVRCIEMLIESTGMVSLHRQNAGVVGQDSETIELAPEYAEAIATRAGALAGISPMFQPCVVPPKPWTGITGGGYWAAGRKPLQLVRTRSLAALRRYEEVSMPEVIKAVNIAQNTAWRVNKKVLDVANAITQWQHCPVADVPAMDRGEMPARPLDIDTNEIALKAWKKEASAFYRKDKARVSRRLSMEFMLSQANKFANYKAIWFPQNMDWRGRVYAVPMFNPQGNDMTKGLLTFAQGKPIGEDGFYWLKIHGANTAGVDKVPFPQRIKFVEDNHTNIMECAKAPLENTWWAEQDSPFCFLAFCFEYAGVINHGLSYNCSLPLAFDGSCSGIQHFSAMLRDEIGGKAVNLLPSAEVQDIYRIVSDKVNEVLKQDLINGTSTTLETVTDKKTGEITERTKYGTKVMAQWWLEHGVNRGVTKRSVMTLVYGSKEFGFRDQVLSDTIQPAIDNGKGDMFLNPNQAAGYMAKLIWNAVSVTVVAAVEAMNWLKSAAKLLAAEVKDKKTDTVLRGRCAVHWVTPDGFPVWQEYKKPIQTRLNLMFLGQFRLQPTINTNKDSEIDAHKQESGIAPNFVHSQDGNHLRMTVVWAHEKYGIESFALIHDSFGTIPADAANLFKAVRETMVSTYESCDVLADFYDQFADQLHESQLDKMPALPAKGNLNLRDILKSDFAFA

SEQ ID NO: 285 - DNA, 2670 bp, synthetic construct
  misc_feature 1..2670: note = Variant of RNA polymerase
  source 1..2670: mol_type = other DNA
atgcaccatcaccatcaccatatgaacacgattaacatcgctaagaacgacttctctgacatcgaactggctgctatcccgttcaacactctggctgaccattacggtgagcgtttagctcgcgaacagttggcccttgagcatgagtcttacgagatgggtgaagcacgcttccgcaagatgtttgagcgtcaacttaaagctggtgaggttgcggataacgctgccgccaagcctctcatcactaccctactccctaagatgattgcacgcatcaacgactggtttgaggaagtgaaagctaagcgcggcaagcgcccgacagccttccagttcctgcaagaaatcaagccggaagccgtagcgtacatcaccattaagaccactctggcttgcctaaccagtgcggacaatacaaccgttcaggctgtagcaagcgcaatcggtcgggccattgaggacgaggctcgcttcggtcgtatccgtgaccttgaagctaagcacttcaagaaaaacgttgaggaacaactcaacaagcgcgtagggcacgtctacaagaaagcatttatgccggttgtcgaggctgacatgctctctaagggtctactcggtggcgaggcgtggtcttcgtggcataaggaagactctattcatgtaggagtacgctgcatcgagatgctcattgagtcaaccggaatggttagcttacaccgccaaaatgctggcgtagtaggtcaagactctgagactatcgaactcgcacctgaatacgctgaggctatcgcaacccgtgcaggtgcgctggctggcatctctccgatgttccaaccttgcgtagttcctcctaagccgtggactggcattactggtggtggctattgggctgcggggcgcaaacccctgcagttagtacgtactcgcagtctggcggcgcttcgccgctatgaagaagtgtcgatgccggaggtcatcaaagcagtcaacattgcgcagaatacagcatggcgtgtgaacaagaaagttctcgacgtagcgaatgcaatcacccaatggcagcactgtccagtcgcggatgtgcctgcgatggatcgtggcgaaatgccagctcgtccgttggacatcgataccaacgagattgcacttaaagcgtggaagaaagaagcttccgcgttctaccgcaaagacaaagcacgcgttagccgtcgtctgtcaatggagtttatgttatctcaggcgaacaagtttgcgaattataaagcaatctggtttccgcaaaacatggattggcgtgggcgcgtgtacgctgtcccgatgttcaatcctcagggcaacgatatgacgaaaggcctgctgacctttgcgcagggtaaacccattggtgaagacggcttctattggctcaagattcatggcgcaaatacagctggagtggataaagtaccgtttccacaacgcatcaaatttgttgaggataaccatacgaatattatggaatgcgcgaaagcaccgctggaaaacacttggtgggcggaacaggactcgccgttctgttttctggcgttctgctttgagtatgctggcgtcatcaatcacggtctgtcgtacaactgtagcttgcctctggcatttgatggtagttgctccggcattcaacatttctcagcgatgttacgcgacgaaattggcggcaaagctgtgaatctcctcccatctgcggaagtgcaggatatttatcgtatcgtcagcgacaaagttaacgaggtactgaaacaagatctgattaacggtacctctaccaccttggaaacggtgactgataagaagacaggcgaaattaccgaacgcacgaaatacgggaccaaagttatggcacagtggtggttagaacacggtgtgaatcgtggcgtcacgaaacgctcggttatgactttggtgtatgggagcaaagagtttggattccgcgatcaagtgctgagtgacaccattcaaccggcgatcgataacggcaaaggtgacatgtttctgaatccgaatcaggctgctggttacatggcgaaactgatctggaacgcagtgtccgtcaccgtagtcgcagcagttgaggcgatgaactggctgaaaagtgcggcgaaattacttgctgctgaagtgaaggataagaagacggatacagttctgcgtggccgctgcgcagtacattgggtgactcccgacggcttccctgtgtggcaggaatacaagaagcctattcagacgcgcttgaacctgatgttcctcggtcagttccgcttacagcctaccattaacaccaacaaagatagcgagattgatgcacacaaacaggagtctggtatcgctcctaactttgtacacagccaagacggtaaccaccttcgtatgactgtagtgtgggcacacgagaagtacggaatcgaatcttttgcactgattcacgactccttcggtaccattccggctgacgctgcgaacctgttcaaagcagtgcgcgaaactatggtttcgacatatgagtcttgtgatgtactggctgatttctacgaccagttcgctgaccagttgcacgagtctcaattggacaaaatgccagcacttccggctaaaggtaacttgaacctccgtgacatcttaaaatcggacttcgcgttcgcg

SEQ ID NO: 286 - protein, 890 aa, synthetic construct
  REGION 1..890: note = Variant of RNA polymerase
MHHHHHHMNTINIAKNDFSDIELAAIPFNTLADHYGERLAREQLALEHESYEMGEARFRKMFERQLKAGEVADNAAAKPLITTLLPKMIARINDWFEEVKAKRGKRPTAFQFLQEIKPEAVAYITIKTTLACLTSADNTTVQAVASAIGRAIEDEARFGRIRDLEAKHFKKNVEEQLNKRVGHVYKKAFMPVVEADMLSKGLLGGEAWSSWHKEDSIHVGVRCIEMLIESTGMVSLHRQNAGVVGQDSETIELAPEYAEAIATRAGALAGISPMFQPCVVPPKPWTGITGGGYWAAGRKPLQLVRTRSLAALRRYEEVSMPEVIKAVNIAQNTAWRVNKKVLDVANAITQWQHCPVADVPAMDRGEMPARPLDIDTNEIALKAWKKEASAFYRKDKARVSRRLSMEFMLSQANKFANYKAIWFPQNMDWRGRVYAVPMFNPQGNDMTKGLLTFAQGKPIGEDGFYWLKIHGANTAGVDKVPFPQRIKFVEDNHTNIMECAKAPLENTWWAEQDSPFCFLAFCFEYAGVINHGLSYNCSLPLAFDGSCSGIQHFSAMLRDEIGGKAVNLLPSAEVQDIYRIVSDKVNEVLKQDLINGTSTTLETVTDKKTGEITERTKYGTKVMAQWWLEHGVNRGVTKRSVMTLVYGSKEFGFRDQVLSDTIQPAIDNGKGDMFLNPNQAAGYMAKLIWNAVSVTVVAAVEAMNWLKSAAKLLAAEVKDKKTDTVLRGRCAVHWVTPDGFPVWQEYKKPIQTRLNLMFLGQFRLQPTINTNKDSEIDAHKQESGIAPNFVHSQDGNHLRMTVVWAHEKYGIESFALIHDSFGTIPADAANLFKAVRETMVSTYESCDVLADFYDQFADQLHESQLDKMPALPAKGNLNLRDILKSDFAFA

SEQ ID NO: 287 - DNA, 2670 bp, synthetic construct
  misc_feature 1..2670: note = Variant of RNA polymerase
  source 1..2670: mol_type = other DNA
atgcaccatcaccatcaccatatgaacacgattaacatcgctaagaacgacttctctgacatcgaactggctgctatcccgttcaacactctggctgaccattacggtgagcgtttagctcgcgaacagttggcccttgagcatgagtcttacgagatgggtgaagcacgcttccgcaagatgtttgagcgtcaacttaaagctggtgaggttgcggataacgctgccgccaagcctctcatcactaccctactccctaagatgattgcacgcatcaacgactggtttgaggaagtgaaagctaagcgcggcaagcgcccgacagccttccagttcctgcaagaaatcaagccggaagccgtagcgtacatcaccattaagaccactctggcttgcctaaccagtgcggacaatacaaccgttcaggctgtagcaagcgcaatcggtcgggccattgaggacgaggctcgcttcggtcgtatccgtgaccttgaagctaagcacttcaagaaaaacgttgaggaacaactcaacaagcgcgtagggcacgtctacaagaaagcatttatgcaagttgtcgaggctgacatggtttctaagggtctactcggtggcgaggcgtggtcttcgtggcataaggaagactctattcatgtaggagtacgctgcatcgagatgctcattgagtcaaccggaatggttagcttacaccgccaaaatgctggcgtagtaggtcaagactctgagactatcgaactcgcacctgaatacgctgaggctatcgcaacccgtgcaggtgcgctggctggcatctctccgatgttccaaccttgcgtagttcctcctaagccgtggactggcattactggtggtggctattgggctgcggggcgcaaacccctgcagttagtacgtactcgcagtctggcggcgcttcgccgctatgaagaagtgtcgatgccggaggtcatcaaagcagtcaacattgcgcagaatacagcatggcgtgtgaacaagaaagttctcgacgtagcgaatgcaatcacccaatggcagcactgtccagtcgcggatgtgcctgcgatggatcgtggcgaaatgccagctcgtccgttggacatcgataccaacgagattgcacttaaagcgtggaagaaagaagcttccgcgttctaccgcaaagacaaagcacgcgttagccgtcgtctgtcaatggagtttatgttatctcaggcgaacaagtttgcgaattataaagcaatctggtttccgcaaaacatggattggcgtgggcgcgtgtacgctgtcccgatgttcaatcctcagggcaacgatatgacgaaaggcctgctgacctttgcgcagggtaaacccattggtgaagacggcttctattggctcaagattcatggcgcaaatacagctggagtggataaagtaccgtttccacaacgcatcaaatttgttgaggataaccatacgaatattatggaatgcgcgaaagcaccgctggaaaacacttggtgggcggaacaggactcgccgttctgttttctggcgttctgctttgagtatgctggcgtcatcaatcacggtctgtcgtacaactgtagcttgcctctggcatttgatggtagttgctccggcattcaacatttctcagcgatgttacgcgacgaaattggcggcaaagctgtgaatctcctcccatctgcggaagtgcaggatatttatcgtatcgtcagcgacaaagttaacgaggtactgaaacaagatctgattaacggtacctctaccaccttggaaacggtgactgataagaagacaggcgaaattaccgaacgcacgaaatacgggaccaaagttatggcacagtggtggttagaacacggtgtgaatcgtggcgtcacgaaacgctcggttatgactttggtgtatgggagcaaagagtttggattccgcgatcaagtgctgagtgacaccattcaaccggcgatcgataacggcaaaggtgacatgtttctgaatccgaatcaggctgctggttacatggcgaaactgatctggaacgcagtgtccgtcaccgtagtcgcagcagttgaggcgatgaactggctgaaaagtgcggcgaaattacttgctgctgaagtgaaggataagaagacggatacagttctgcgtggccgctgcgcagtacattgggtgactcccgacggcttccctgtgtggcaggaatacaagaagcctattcagacgcgcttgaacctgatgttcctcggtcagttccgcttacagcctaccattaacaccaacaaagatagcgagattgatgcacacaaacaggagtctggtatcgctcctaactttgtacacagccaagacggtaaccaccttcgtatgactgtagtgtgggcacacgagaagtacggaatcgaatcttttgcactgattcacgactccttcggtaccattccggctgacgctgcgaacctgttcaaagcagtgcgcgaaactatggtttcgacatatgagtcttgtgatgtactggctgatttctacgaccagttcgctgaccagttgcacgagtctcaattggacaaaatgccagcacttccggctaaaggtaacttgaacctccgtgacatcttaaaatcggacttcgcgttcgcg

SEQ ID NO: 288 - protein, 890 aa, synthetic construct
  REGION 1..890: note = Variant of RNA polymerase
MHHHHHHMNTINIAKNDFSDIELAAIPFNTLADHYGERLAREQLALEHESYEMGEARFRKMFERQLKAGEVADNAAAKPLITTLLPKMIARINDWFEEVKAKRGKRPTAFQFLQEIKPEAVAYITIKTTLACLTSADNTTVQAVASAIGRAIEDEARFGRIRDLEAKHFKKNVEEQLNKRVGHVYKKAFMQVVEADMVSKGLLGGEAWSSWHKEDSIHVGVRCIEMLIESTGMVSLHRQNAGVVGQDSETIELAPEYAEAIATRAGALAGISPMFQPCVVPPKPWTGITGGGYWAAGRKPLQLVRTRSLAALRRYEEVSMPEVIKAVNIAQNTAWRVNKKVLDVANAITQWQHCPVADVPAMDRGEMPARPLDIDTNEIALKAWKKEASAFYRKDKARVSRRLSMEFMLSQANKFANYKAIWFPQNMDWRGRVYAVPMFNPQGNDMTKGLLTFAQGKPIGEDGFYWLKIHGANTAGVDKVPFPQRIKFVEDNHTNIMECAKAPLENTWWAEQDSPFCFLAFCFEYAGVINHGLSYNCSLPLAFDGSCSGIQHFSAMLRDEIGGKAVNLLPSAEVQDIYRIVSDKVNEVLKQDLINGTSTTLETVTDKKTGEITERTKYGTKVMAQWWLEHGVNRGVTKRSVMTLVYGSKEFGFRDQVLSDTIQPAIDNGKGDMFLNPNQAAGYMAKLIWNAVSVTVVAAVEAMNWLKSAAKLLAAEVKDKKTDTVLRGRCAVHWVTPDGFPVWQEYKKPIQTRLNLMFLGQFRLQPTINTNKDSEIDAHKQESGIAPNFVHSQDGNHLRMTVVWAHEKYGIESFALIHDSFGTIPADAANLFKAVRETMVSTYESCDVLADFYDQFADQLHESQLDKMPALPAKGNLNLRDILKSDFAFA

SEQ ID NO: 289 - DNA, 2670 bp, synthetic construct
  misc_feature 1..2670: note = Variant of RNA polymerase
  source 1..2670: mol_type = other DNA
atgcaccatcaccatcaccatatgaacacgattaacatcgctaagaacgacttctctgacatcgaactggctgctatcccgttcaacactctggctgaccattacggtgagcgtttagctcgcgaacagttggcccttgagcatgagtcttacgagatgggtgaagcacgcttccgcaagatgtttgagcgtcaacttaaagctggtgaggttgcggataacgctgccgccaagcctctcatcactaccctactccctaagatgattgcacgcatcaacgactggtttgaggaagtgaaagctaagcgcggcaagcgcccgacagccttccagttcctgcaagaaatcaagccggaagccgtagcgtacatcaccattaagaccactctggcttgcctaaccagtgcggacaatacaaccgttcaggctgtagcaagcgcaatcggtcgggccattgaggacgaggctcgcttcggtcgtatccgtgaccttgaagctaagcacttcaagaaaaacgttgaggaacaactcaacaagcgcgtagggcacgtctacaagaaagcatttatgcaagttgtcgaggctgacatgctctctaagggtctactcggtggcgaggcgtggtcttcgtggcataaggaagactctattcatgtaggagtacgctgcatcgagatgctcattgagtcaaccggaatggttagcttacaccgccaaaatgctggcgtagtaggtcaagactctgagactatcgaactcgcacctgaatacgctgaggctatcgcaacccgtgcaggtgcgctggctggcatctctccgatgttccaaccttgcgtagttcctcctaagccgtggactggcattactggtggtggctattgggctgcggggcgcaaacccctgcagttagtacgtactcgcagtctggcggcgcttcgccgctatgaagaagtgtcgatgccggaggtcatcaaagcagtcaacattgcgcagaatacagcatggcgtgtgaacaagaaagttctcgacgtagcgaatgcaatcacccaatggcagcactgtccagtcgcggatgtgcctgcgatggatcgtggcgaaatgccagctcgtccgttggacatcgataccaacgagattgcacttaaagcgtggaagaaagaagcttccgcgttctaccgcaaagacaaagcacgcgttagccgtcgtctgtcaatggagtttatgttatctcaggcgaacaagtttgcgaattataaagcaatctggtttccgcaaaacatggattggcgtgggcgcgtgtacgctgtcccgatgttcaatcctcagggcaacgatatgacgaaaggcctgctgacctttgcgcagggtaaacccattggtgaagacggcttctattggctcaagattcatggcgcaaatacagctggagtggataaagtaccgtttccacaacgcatcaaatttgttgaggataaccatacgaatattatggaatgcgcgaaagcaccgctggaaaacacttggtgggcggaacaggactcgccgttctgttttctggcgttctgctttgagtatgctggcgtcatcaatcacggtctgtcgtacaactgtagcttgcctctggcatttgatggtagttgctccggcattcaacatttctcagcgatgttacgcgacgaaattggcggcaaagctgtgaatctcctcccatctgcggaagtgcaggatatttatcgtatcgtcagcgacaaagttaacgagcggctgaaacaagatctgattaacggtacctctaccaccttggaaacggtgactgataagaagacaggcgaaattaccgaacgcacgaaatacgggaccaaagttatggcacagtggtggttagaacacggtgtgaatcgtggcgtcacgaaacgctcggttatgactttggtgtatgggagcaaagagtttggattccgcgatcaagtgctgagtgacaccattcaaccggcgatcgataacggcaaaggtgacatgtttctgaatccgaatcaggctgctggttacatggcgaaactgatctggaacgcagtgtccgtcaccgtagtcgcagcagttgaggcgatgaactggctgaaaagtgcggcgaaattacttgctgctgaagtgaaggataagaagacggatacagttctgcgtggccgctgcgcagtacattgggtgactcccgacggcttccctgtgtggcaggaatacaagaagcctattcagacgcgcttgaacctgatgttcctcggtcagttccgcttacagcctaccattaacaccaacaaagatagcgagattgatgcacacaaacaggagtctggtatcgctcctaactttgtacacagccaagacggtaaccaccttcgtatgactgtagtgtgggcacacgagaagtacggaatcgaatcttttgcactgattcacgactccttcggtaccattccggctgacgctgcgaacctgttcaaagcagtgcgcgaaactatggtttcgacatatgagtcttgtgatgtactggctgatttctacgaccagttcgctgaccagttgcacgagtctcaattggacaaaatgccagcacttccggctaaaggtaacttgaacctccgtgacatcttaaaatcggacttcgcgttcgcg

SEQ ID NO: 290 - protein, 890 aa, synthetic construct
  REGION 1..890: note = Variant of RNA polymerase
MHHHHHHMNTINIAKNDFSDIELAAIPFNTLADHYGERLAREQLALEHESYEMGEARFRKMFERQLKAGEVADNAAAKPLITTLLPKMIARINDWFEEVKAKRGKRPTAFQFLQEIKPEAVAYITIKTTLACLTSADNTTVQAVASAIGRAIEDEARFGRIRDLEAKHFKKNVEEQLNKRVGHVYKKAFMQVVEADMLSKGLLGGEAWSSWHKEDSIHVGVRCIEMLIESTGMVSLHRQNAGVVGQDSETIELAPEYAEAIATRAGALAGISPMFQPCVVPPKPWTGITGGGYWAAGRKPLQLVRTRSLAALRRYEEVSMPEVIKAVNIAQNTAWRVNKKVLDVANAITQWQHCPVADVPAMDRGEMPARPLDIDTNEIALKAWKKEASAFYRKDKARVSRRLSMEFMLSQANKFANYKAIWFPQNMDWRGRVYAVPMFNPQGNDMTKGLLTFAQGKPIGEDGFYWLKIHGANTAGVDKVPFPQRIKFVEDNHTNIMECAKAPLENTWWAEQDSPFCFLAFCFEYAGVINHGLSYNCSLPLAFDGSCSGIQHFSAMLRDEIGGKAVNLLPSAEVQDIYRIVSDKVNERLKQDLINGTSTTLETVTDKKTGEITERTKYGTKVMAQWWLEHGVNRGVTKRSVMTLVYGSKEFGFRDQVLSDTIQPAIDNGKGDMFLNPNQAAGYMAKLIWNAVSVTVVAAVEAMNWLKSAAKLLAAEVKDKKTDTVLRGRCAVHWVTPDGFPVWQEYKKPIQTRLNLMFLGQFRLQPTINTNKDSEIDAHKQESGIAPNFVHSQDGNHLRMTVVWAHEKYGIESFALIHDSFGTIPADAANLFKAVRETMVSTYESCDVLADFYDQFADQLHESQLDKMPALPAKGNLNLRDILKSDFAFA

SEQ ID NO: 291 - DNA, 2670 bp, synthetic construct
  misc_feature 1..2670: note = Variant of RNA polymerase
  source 1..2670: mol_type = other DNA
atgcaccatcaccatcaccatatgaacacgattaacatcgctaagaacgacttctctgacatcgaactggctgctatcccgttcaacactctggctgaccattacggtgagcgtttagctcgcgaacagttggcccttgagcatgagtcttacgagatgggtgaagcacgcttccgcaagatgtttgagcgtcaacttaaagctggtgaggttgcggataacgctgccgccaagcctctcatcactaccctactccctaagatgattgcacgcatcaacgactggtttgaggaagtgaaagctaagcgcggcaagcgcccgacagccttccagttcctgcaagaaatcaagccggaagccgtagcgtacatcaccattaagaccactctggcttgcctaaccagtgcggacaatacaaccgttcaggctgtagcaagcgcaatcggtcgggccattgaggacgaggctcgcttcggtcgtatccgtgaccttgaagctaagcacttcaagaaaaacgttgaggaacaactcaacaagcgcgtagggcacgtctacaagaaagcatttatgcaagttgtcgaggctgacatgctctctaagggtctactcggtggcgaggcgtggtcttcgtggcataaggaagactctattcatgtaggagtacgctgcatcgagatgctcattgagtcaaccggaatggttagcttacaccgccaaaatgctggcgtagtaggtcaagactctgagactatcgaactcgcacctgaatacgctgaggctatcgcaacccgtgcaggtgcgctggctggcatctctccgatgttccaaccttgcgtagttcctcctaagccgtggactggcattactggtggtggctattgggctgcggggcgcaaacccctgcagttagtacgtactcgcagtctggcggcgcttcgccgctatgaagaagtgtcgatgccggaggtcatcaaagcagtcaacattgcgcagaatacagcatggcgtgtgaacaagaaagttctcgacgtagcgaatgcaatcacccaatggcagcactgtccagtcgcggatgtgcctgcgatggatcgtggcgaaatgccagctcgtccgttggacatcgataccaacgagattgcacttaaagcgtggaagaaagaagcttccgcgttctaccgcaaagacaaagcacgcgttagccgtcgtctgtcaatggagtttatgttatctcaggcgaacaagtttgcgaattataaagcaatctggtttccgcaaaacatggattggcgtgggcgcgtgtacgctgtcccgatgttcaatcctcagggcaacgatatgacgaaaggcctgctgacctttgcgcagggtaaacccattggtgaagacggcttctattggctcaagattcatggcgcaaatacagctggagtggataaagtaccgtttccacaacgcatcaaatttgttgaggataaccatacgaatattatggaatgcgcgaaagcaccgctggaaaacacttggtgggcggaacaggactcgccgttctgttttctggcgttctgctttgagtatgctggcgtcatcaatcacggtctgtcgtacaactgtagcttgcctctggcatttgatggtagttgctccggcattcaacatttctcagcgatgttacgcgacgaaattggcggcaaagctgtgaatctcctcccatctgcggaagtgcaggatatttatcgtatcgtcagcgacaaagttaacgaggtactgaaacaagatctgattaacggtacctctaccaccttggaaacggtgactgataagaagacaggcgaaattaccgaacgcacgaaatacgggaccaaaacgatggcacagtggtggttagaacacggtgtgaatcgtggcgtcacgaaacgctcggttatgactttggtgtatgggagcaaagagtttggattccgcgatcaagtgctgagtgacaccattcaaccggcgatcgataacggcaaaggtgacatgtttctgaatccgaatcaggctgctggttacatggcgaaactgatctggaacgcagtgtccgtcaccgtagtcgcagcagttgaggcgatgaactggctgaaaagtgcggcgaaattacttgctgctgaagtgaaggataagaagacggatacagttctgcgtggccgctgcgcagtacattgggtgactcccgacggcttccctgtgtggcaggaatacaagaagcctattcagacgcgcttgaacctgatgttcctcggtcagttccgcttacagcctaccattaacaccaacaaagatagcgagattgatgcacacaaacaggagtctggtatcgctcctaactttgtacacagccaagacggtaaccaccttcgtatgactgtagtgtgggcacacgagaagtacggaatcgaatcttttgcactgattcacgactccttcggtaccattccggctgacgctgcgaacctgttcaaagcagtgcgcgaaactatggtttcgacatatgagtcttgtgatgtactggctgatttctacgaccagttcgctgaccagttgcacgagtctcaattggacaaaatgccagcacttccggctaaaggtaacttgaacctccgtgacatcttaaaatcggacttcgcgttcgcg

SEQ ID NO: 292 - protein, 890 aa, synthetic construct
  REGION 1..890: note = Variant of RNA polymerase
MHHHHHHMNTINIAKNDFSDIELAAIPFNTLADHYGERLAREQLALEHESYEMGEARFRKMFERQLKAGEVADNAAAKPLITTLLPKMIARINDWFEEVKAKRGKRPTAFQFLQEIKPEAVAYITIKTTLACLTSADNTTVQAVASAIGRAIEDEARFGRIRDLEAKHFKKNVEEQLNKRVGHVYKKAFMQVVEADMLSKGLLGGEAWSSWHKEDSIHVGVRCIEMLIESTGMVSLHRQNAGVVGQDSETIELAPEYAEAIATRAGALAGISPMFQPCVVPPKPWTGITGGGYWAAGRKPLQLVRTRSLAALRRYEEVSMPEVIKAVNIAQNTAWRVNKKVLDVANAITQWQHCPVADVPAMDRGEMPARPLDIDTNEIALKAWKKEASAFYRKDKARVSRRLSMEFMLSQANKFANYKAIWFPQNMDWRGRVYAVPMFNPQGNDMTKGLLTFAQGKPIGEDGFYWLKIHGANTAGVDKVPFPQRIKFVEDNHTNIMECAKAPLENTWWAEQDSPFCFLAFCFEYAGVINHGLSYNCSLPLAFDGSCSGIQHFSAMLRDEIGGKAVNLLPSAEVQDIYRIVSDKVNEVLKQDLINGTSTTLETVTDKKTGEITERTKYGTKTMAQWWLEHGVNRGVTKRSVMTLVYGSKEFGFRDQVLSDTIQPAIDNGKGDMFLNPNQAAGYMAKLIWNAVSVTVVAAVEAMNWLKSAAKLLAAEVKDKKTDTVLRGRCAVHWVTPDGFPVWQEYKKPIQTRLNLMFLGQFRLQPTINTNKDSEIDAHKQESGIAPNFVHSQDGNHLRMTVVWAHEKYGIESFALIHDSFGTIPADAANLFKAVRETMVSTYESCDVLADFYDQFADQLHESQLDKMPALPAKGNLNLRDILKSDFAFA

SEQ ID NO: 293 - DNA, 2670 bp, synthetic construct
  misc_feature 1..2670: note = Variant of RNA polymerase
  source 1..2670: mol_type = other DNA
atgcaccatcaccatcaccatatgaacacgattaacatcgctaagaacgacttctctgacatcgaactggctgctatcccgttcaacactctggctgaccattacggtgagcgtttagctcgcgaacagttggcccttgagcatgagtcttacgagatgggtgaagcacgcttccgcaagatgtttgagcgtcaacttaaagctggtgaggttgcggataacgctgccgccaagcctctcatcactaccctactccctaagatgattgcacgcatcaacgactggtttgaggaagtgaaagctaagcgcggcaagcgcccgacagccttccagttcctgcaagaaatcaagccggaagccgtagcgtacatcaccattaagaccactctggcttgcctaaccagtgcggacaatacaaccgttcaggctgtagcaagcgcaatcggtcgggccattgaggacgaggctcgcttcggtcgtatccgtgaccttgaagctaagcacttcaagaaaaacgttgaggaacaactcaacaagcgcgtagggcacgtctacaagaaagggtttatgcaagttgtcgaggctgacatgctctctaagggtctactcggtggcgaggcgtggtcttcgtggcataaggaagactctattcatgtaggagtacgctgcatcgagatgctcattgagtcaaccggaatggttagcttacaccgccaaaatgctggcgtagtaggtcaagactctgagactatcgaactcgcacctgaatacgctgaggctatcgcaacccgtgcaggtgcgctggctggcatctctccgatgttccaaccttgcgtagttcctcctaagccgtggactggcattactggtggtggctattgggctgcggggcgcaaacccctgcagttagtacgtactcgcagtctggcggcgcttcgccgctatgaagaagtgtcgatgccggaggtcatcaaagcagtcaacattgcgcagaatacagcatggcgtgtgaacaagaaagttctcgacgtagcgaatgcaatcacccaatggcagcactgtccagtcgcggatgtgcctgcgatggatcgtggcgaaatgccagctcgtccgttggacatcgataccaacgagattgcacttaaagcgtggaagaaagaagcttccgcgttctaccgcaaagacaaagcacgcgttagccgtcgtctgtcaatggagtttatgttatctcaggcgaacaagtttgcgaattataaagcaatctggtttccgcaaaacatggattggcgtgggcgcgtgtacgctgtcccgatgttcaatcctcagggcaacgatatgacgaaaggcctgctgacctttgcgcagggtaaacccattggtgaagacggcttctattggctcaagattcatggcgcaaatacagctggagtggataaagtaccgtttccacaacgcatcaaatttgttgaggataaccatacgaatattatggaatgcgcgaaagcaccgctggaaaacacttggtgggcggaacaggactcgccgttctgttttctggcgttctgctttgagtatgctggcgtcatcaatcacggtctgtcgtacaactgtagcttgcctctggcatttgatggtagttgctccggcattcaacatttctcagcgatgttacgcgacgaaattggcggcaaagctgtgaatctcctcccatctgcggaagtgcaggatatttatcgtatcgtcagcgacaaagttaacgaggtactgaaacaagatctgattaacggtacctctaccaccttggaaacggtgactgataagaagacaggcgaaattaccgaacgcacgaaatacgggaccaaagttatggcacagtggtggttagaacacggtgtgaatcgtggcgtcacgaaacgctcggttatgactttggtgtatgggagcaaagagtttggattccgcgatcaagtgctgagtgacaccattcaaccggcgatcgataacggcaaaggtgacatgtttctgaatccgaatcaggctgctggttacatggcgaaactgatctggaacgcagtgtccgtcaccgtagtcgcagcagttgaggcgatgaactggctgaaaagtgcggcgaaattacttgctgctgaagtgaaggataagaagacggatacagttctgcgtggccgctgcgcagtacattgggtgactcccgacggcttccctgtgtggcaggaatacaagaagcctattcagacgcgcttgaacctgatgttcctcggtcagttccgcttacagcctaccattaacaccaacaaagatagcgagattgatgcacacaaacaggagtctggtatcgctcctaactttgtacacagccaagacggtaaccaccttcgtatgactgtagtgtgggcacacgagaagtacggaatcgaatcttttgcactgattcacgactccttcggtaccattccggctgacgctgcgaacctgttcaaagcagtgcgcgaaactatggtttcgacatatgagtcttgtgatgtactggctgatttctacgaccagttcgctgaccagttgcacgagtctcaattggacaaaatgccagcacttccggctaaaggtaacttgaacctccgtgacatcttaaaatcggacttcgcgttcgcg

SEQ ID NO: 294 - protein, 890 aa, synthetic construct
  REGION 1..890: note = Variant of RNA polymerase
MHHHHHHMNTINIAKNDFSDIELAAIPFNTLADHYGERLAREQLALEHESYEMGEARFRKMFERQLKAGEVADNAAAKPLITTLLPKMIARINDWFEEVKAKRGKRPTAFQFLQEIKPEAVAYITIKTTLACLTSADNTTVQAVASAIGRAIEDEARFGRIRDLEAKHFKKNVEEQLNKRVGHVYKKGFMQVVEADMLSKGLLGGEAWSSWHKEDSIHVGVRCIEMLIESTGMVSLHRQNAGVVGQDSETIELAPEYAEAIATRAGALAGISPMFQPCVVPPKPWTGITGGGYWAAGRKPLQLVRTRSLAALRRYEEVSMPEVIKAVNIAQNTAWRVNKKVLDVANAITQWQHCPVADVPAMDRGEMPARPLDIDTNEIALKAWKKEASAFYRKDKARVSRRLSMEFMLSQANKFANYKAIWFPQNMDWRGRVYAVPMFNPQGNDMTKGLLTFAQGKPIGEDGFYWLKIHGANTAGVDKVPFPQRIKFVEDNHTNIMECAKAPLENTWWAEQDSPFCFLAFCFEYAGVINHGLSYNCSLPLAFDGSCSGIQHFSAMLRDEIGGKAVNLLPSAEVQDIYRIVSDKVNEVLKQDLINGTSTTLETVTDKKTGEITERTKYGTKVMAQWWLEHGVNRGVTKRSVMTLVYGSKEFGFRDQVLSDTIQPAIDNGKGDMFLNPNQAAGYMAKLIWNAVSVTVVAAVEAMNWLKSAAKLLAAEVKDKKTDTVLRGRCAVHWVTPDGFPVWQEYKKPIQTRLNLMFLGQFRLQPTINTNKDSEIDAHKQESGIAPNFVHSQDGNHLRMTVVWAHEKYGIESFALIHDSFGTIPADAANLFKAVRETMVSTYESCDVLADFYDQFADQLHESQLDKMPALPAKGNLNLRDILKSDFAFA

SEQ ID NO: 295 - DNA, 2670 bp, synthetic construct
  misc_feature 1..2670: note = Variant of RNA polymerase
  source 1..2670: mol_type = other DNA
atgcaccatcaccatcaccatatgaacacgattaacatcgctaagaacgacttctctgacatcgaactggctgctatcccgttcaacactctggctgaccattacggtgagcgtttagctcgcgaacagttggcccttgagcatgagtcttacgagatgggtgaagcacgcttccgcaagatgtttgagcgtcaacttaaagctggtgaggttgcggataacgctgccgccaagcctctcatcactaccctactccctaagatgattgcacgcatcaacgactggtttgaggaagtgaaagctaagcgcggcaagcgcccgacagccttccagttcctgcaagaaatcaagccggaagccgtagcgtacatcaccattaagaccactctggcttgcctaaccagtgcggacaatacaaccgttcaggctgtagcaagcgcaatcggtcgggccattgaggacgaggctcgcttcggtcgtatccgtgaccttgaagctaagcacttcaagaaaaacgttgaggaacaactcaacaagcgcgtagggcacgtctacaagaaagcactgatgcaagttgtcgaggctgacatgctctctaagggtctactcggtggcgaggcgtggtcttcgtggcataaggaagactctattcatgtaggagtacgctgcatcgagatgctcattgagtcaaccggaatggttagcttacaccgccaaaatgctggcgtagtaggtcaagactctgagactatcgaactcgcacctgaatacgctgaggctatcgcaacccgtgcaggtgcgctggctggcatctctccgatgttccaaccttgcgtagttcctcctaagccgtggactggcattactggtggtggctattgggctgcggggcgcaaacccctgcagttagtacgtactcgcagtctggcggcgcttcgccgctatgaagaagtgtcgatgccggaggtcatcaaagcagtcaacattgcgcagaatacagcatggcgtgtgaacaagaaagttctcgacgtagcgaatgcaatcacccaatggcagcactgtccagtcgcggatgtgcctgcgatggatcgtggcgaaatgccagctcgtccgttggacatcgataccaacgagattgcacttaaagcgtggaagaaagaagcttccgcgttctaccgcaaagacaaagcacgcgttagccgtcgtctgtcaatggagtttatgttatctcaggcgaacaagtttgcgaattataaagcaatctggtttccgcaaaacatggattggcgtgggcgcgtgtacgctgtcccgatgttcaatcctcagggcaacgatatgacgaaaggcctgctgacctttgcgcagggtaaacccattggtgaagacggcttctattggctcaagattcatggcgcaaatacagctggagtggataaagtaccgtttccacaacgcatcaaatttgttgaggataaccatacgaatattatggaatgcgcgaaagcaccgctggaaaacacttggtgggcggaacaggactcgccgttctgttttctggcgttctgctttgagtatgctggcgtcatcaatcacggtctgtcgtacaactgtagcttgcctctggcatttgatggtagttgctccggcattcaacatttctcagcgatgttacgcgacgaaattggcggcaaagctgtgaatctcctcccatctgcggaagtgcaggatatttatcgtatcgtcagcgacaaagttaacgaggtactgaaacaagatctgattaacggtacctctaccaccttggaaacggtgactgataagaagacaggcgaaattaccgaacgcacgaaatacgggaccaaagttatggcacagtggtggttagaacacggtgtgaatcgtggcgtcacgaaacgctcggttatgactttggtgtatgggagcaaagagtttggattccgcgatcaagtgctgagtgacaccattcaaccggcgatcgataacggcaaaggtgacatgtttctgaatccgaatcaggctgctggttacatggcgaaactgatctggaacgcagtgtccgtcaccgtagtcgcagcagttgaggcgatgaactggctgaaaagtgcggcgaaattacttgctgctgaagtgaaggataagaagacggatacagttctgcgtggccgctgcgcagtacattgggtgactcccgacggcttccctgtgtggcaggaatacaagaagcctattcagacgcgcttgaacctgatgttcctcggtcagttccgcttacagcctaccattaacaccaacaaagatagcgagattgatgcacacaaacaggagtctggtatcgctcctaactttgtacacagccaagacggtaaccaccttcgtatgactgtagtgtgggcacacgagaagtacggaatcgaatcttttgcactgattcacgactccttcggtaccattccggctgacgctgcgaacctgttcaaagcagtgcgcgaaactatggtttcgacatatgagtcttgtgatgtactggctgatttctacgaccagttcgctgaccagttgcacgagtctcaattggacaaaatgccagcacttccggctaaaggtaacttgaacctccgtgacatcttaaaatcggacttcgcgttcgcg

SEQ ID NO: 296 - protein, 890 aa, synthetic construct
  REGION 1..890: note = Variant of RNA polymerase
MHHHHHHMNTINIAKNDFSDIELAAIPFNTLADHYGERLAREQLALEHESYEMGEARFRKMFERQLKAGEVADNAAAKPLITTLLPKMIARINDWFEEVKAKRGKRPTAFQFLQEIKPEAVAYITIKTTLACLTSADNTTVQAVASAIGRAIEDEARFGRIRDLEAKHFKKNVEEQLNKRVGHVYKKALMQVVEADMLSKGLLGGEAWSSWHKEDSIHVGVRCIEMLIESTGMVSLHRQNAGVVGQDSETIELAPEYAEAIATRAGALAGISPMFQPCVVPPKPWTGITGGGYWAAGRKPLQLVRTRSLAALRRYEEVSMPEVIKAVNIAQNTAWRVNKKVLDVANAITQWQHCPVADVPAMDRGEMPARPLDIDTNEIALKAWKKEASAFYRKDKARVSRRLSMEFMLSQANKFANYKAIWFPQNMDWRGRVYAVPMFNPQGNDMTKGLLTFAQGKPIGEDGFYWLKIHGANTAGVDKVPFPQRIKFVEDNHTNIMECAKAPLENTWWAEQDSPFCFLAFCFEYAGVINHGLSYNCSLPLAFDGSCSGIQHFSAMLRDEIGGKAVNLLPSAEVQDIYRIVSDKVNEVLKQDLINGTSTTLETVTDKKTGEITERTKYGTKVMAQWWLEHGVNRGVTKRSVMTLVYGSKEFGFRDQVLSDTIQPAIDNGKGDMFLNPNQAAGYMAKLIWNAVSVTVVAAVEAMNWLKSAAKLLAAEVKDKKTDTVLRGRCAVHWVTPDGFPVWQEYKKPIQTRLNLMFLGQFRLQPTINTNKDSEIDAHKQESGIAPNFVHSQDGNHLRMTVVWAHEKYGIESFALIHDSFGTIPADAANLFKAVRETMVSTYESCDVLADFYDQFADQLHESQLDKMPALPAKGNLNLRDILKSDFAFA

SEQ ID NO: 297 - DNA, 2670 bp, synthetic construct
  misc_feature 1..2670: note = Variant of RNA polymerase
  source 1..2670: mol_type = other DNA
atgcaccatcaccatcaccatatgaacacgattaacatcgctaagaacgacttctctgacatcgaactggctgctatcccgttcaacactctggctgaccattacggtgagcgtttagctcgcgaacagttggcccttgagcatgagtcttacgagatgggtgaagcacgcttccgcaagatgtttgagcgtcaacttaaagctggtgaggttgcggataacgctgccgccaagcctctcatcactaccctactccctaagatgattgcacgcatcaacgactggtttgaggaagtgaaagctaagcgcggcaagcgcccgacagccttccagttcctgcaagaaatcaagccggaagccgtagcgtacatcaccattaagaccactctggcttgcctaaccagtgcggacaatacaaccgttcaggctgtagcaagcgcaatcggtcgggccattgaggacgaggctcgcttcggtcgtatccgtgaccttgaagctaagcacttcaagaaaaacgttgaggaacaactcaacaagcgcgtagggcacgtctacaagaaagcatttatgcaagttgtcgaggctgacatgctctctaagggtctactcggtggcgaggcgtggtcttcgtggcataaggaagactctattcatgtaggagtacgctgcatcgagatgctcattgagtcaaccggaatggttagcttacaccgccaaaatgctggcgtagtaggtcaagactctgagactatcgaactcgcacctgaatacgctgaggctatcgcaacccgtgcaggtgcgctggctggcatctctccgatgttccaaccttgcgtagttcctcctaagccgtggactggcattactggtggtggctattgggctgcggggcgcaaacccctgcagttagtacgtactcgcagtctggcggcgcttcgccgctatgaagaagtgtcgatgccggaggtcatcaaagcagtcaacattgcgcagaatacagcatggcgtgtgaacaagaaagttctcgacgtagcgaatgcaatcacccaatggcagcactgtccagtcgcggatgtgcctgcgatggatcgtggcgaaatgccagctcgtccgttggacatcgataccaacgagattgcacttaaagcgtggaagaaagaagcttccgcgttctaccgcaaagacaaagcacgcgttagccgtcgtctgtcaatggagtttatgttatctcaggcgaacaagtttgcgaattatgaggcaatctggtttccgcaaaacatggattggcgtgggcgcgtgtacgctgtcccgatgttcaatcctcagggcaacgatatgacgaaaggcctgctgacctttgcgcagggtaaacccattggtgaagacggcttctattggctcaagattcatggcgcaaatacagctggagtggataaagtaccgtttccacaacgcatcaaatttgttgaggataaccatacgaatattatggaatgcgcgaaagcaccgctggaaaacacttggtgggcggaacaggactcgccgttctgttttctggcgttctgctttgagtatgctggcgtcatcaatcacggtctgtcgtacaactgtagcttgcctctggcatttgatggtagttgctccggcattcaacatttctcagcgatgttacgcgacgaaattggcggcaaagctgtgaatctcctcccatctgcggaagtgcaggatatttatcgtatcgtcagcgacaaagttaacgaggtactgaaacaagatctgattaacggtacctctaccaccttggaaacggtgactgataagaagacaggcgaaattaccgaacgcacgaaatacgggaccaaagttatggcacagtggtggttagaacacggtgtgaatcgtggcgtcacgaaacgctcggttatgactttggtgtatgggagcaaagagtttggattccgcgatcaagtgctgagtgacaccattcaaccggcgatcgataacggcaaaggtgacatgtttctgaatccgaatcaggctgctggttacatggcgaaactgatctggaacgcagtgtccgtcaccgtagtcgcagcagttgaggcgatgaactggctgaaaagtgcggcgaaattacttgctgctgaagtgaaggataagaagacggatacagttctgcgtggccgctgcgcagtacattgggtgactcccgacggcttccctgtgtggcaggaatacaagaagcctattcagacgcgcttgaacctgatgttcctcggtcagttccgcttacagcctaccattaacaccaacaaagatagcgagattgatgcacacaaacaggagtctggtatcgctcctaactttgtacacagccaagacggtaaccaccttcgtatgactgtagtgtgggcacacgagaagtacggaatcgaatcttttgcactgattcacgactccttcggtaccattccggctgacgctgcgaacctgttcaaagcagtgcgcgaaactatggtttcgacatatgagtcttgtgatgtactggctgatttctacgaccagttcgctgaccagttgcacgagtctcaattggacaaaatgccagcacttccggctaaaggtaacttgaacctccgtgacatcttaaaatcggacttcgcgttcgcg

SEQ ID NO: 298 - protein, 890 aa, synthetic construct
  REGION 1..890: note = Variant of RNA polymerase
MHHHHHHMNTINIAKNDFSDIELAAIPFNTLADHYGERLAREQLALEHESYEMGEARFRKMFERQLKAGEVADNAAAKPLITTLLPKMIARINDWFEEVKAKRGKRPTAFQFLQEIKPEAVAYITIKTTLACLTSADNTTVQAVASAIGRAIEDEARFGRIRDLEAKHFKKNVEEQLNKRVGHVYKKAFMQVVEADMLSKGLLGGEAWSSWHKEDSIHVGVRCIEMLIESTGMVSLHRQNAGVVGQDSETIELAPEYAEAIATRAGALAGISPMFQPCVVPPKPWTGITGGGYWAAGRKPLQLVRTRSLAALRRYEEVSMPEVIKAVNIAQNTAWRVNKKVLDVANAITQWQHCPVADVPAMDRGEMPARPLDIDTNEIALKAWKKEASAFYRKDKARVSRRLSMEFMLSQANKFANYEAIWFPQNMDWRGRVYAVPMFNPQGNDMTKGLLTFAQGKPIGEDGFYWLKIHGANTAGVDKVPFPQRIKFVEDNHTNIMECAKAPLENTWWAEQDSPFCFLAFCFEYAGVINHGLSYNCSLPLAFDGSCSGIQHFSAMLRDEIGGKAVNLLPSAEVQDIYRIVSDKVNEVLKQDLINGTSTTLETVTDKKTGEITERTKYGTKVMAQWWLEHGVNRGVTKRSVMTLVYGSKEFGFRDQVLSDTIQPAIDNGKGDMFLNPNQAAGYMAKLIWNAVSVTVVAAVEAMNWLKSAAKLLAAEVKDKKTDTVLRGRCAVHWVTPDGFPVWQEYKKPIQTRLNLMFLGQFRLQPTINTNKDSEIDAHKQESGIAPNFVHSQDGNHLRMTVVWAHEKYGIESFALIHDSFGTIPADAANLFKAVRETMVSTYESCDVLADFYDQFADQLHESQLDKMPALPAKGNLNLRDILKSDFAFA

SEQ ID NO: 299 - DNA, 2670 bp, synthetic construct
  misc_feature 1..2670: note = Variant of RNA polymerase
  source 1..2670: mol_type = other DNA
atgcaccatcaccatcaccatatgaacacgattaacatcgctaagaacgacttctctgacatcgaactggctgctatcccgttcaacactctggctgaccattacggtgagcgtttagctcgcgaacagttggcccttgagcatgagtcttacgagatgggtgaagcacgcttccgcaagatgtttgagcgtcaacttaaagctggtgaggttgcggataacgctgccgccaagcctctcatcactaccctactccctaagatgattgcacgcatcaacgactggtttgaggaagtgaaagctaagcgcggcaagcgcccgacagccttccagttcctgcaagaaatcaagccggaagccgtagcgtacatcaccattaagaccactctggcttgcctaaccagtgcggacaatacaaccgttcaggctgtagcaagcgcaatcggtcgggccattgaggacgaggctcgcttcggtcgtatccgtgacattgaagctaagcacttcaagaaaaacgttgaggaacaactcaacaagcgcgtagggcacgtctacaagaaagcatttatgcaagttgtcgaggctgacatgctctctaagggtctactcggtggcgaggcgtggtcttcgtggcataaggaagactctattcatgtaggagtacgctgcatcgagatgctcattgagtcaaccggaatggttagcttacaccgccaaaatgctggcgtagtaggtcaagactctgagactatcgaactcgcacctgaatacgctgaggctatcgcaacccgtgcaggtgcgctggctggcatctctccgatgttccaaccttgcgtagttcctcctaagccgtggactggcattactggtggtggctattgggctgcggggcgcaaacccctgcagttagtacgtactcgcagtctggcggcgcttcgccgctatgaagaagtgtcgatgccggaggtcatcaaagcagtcaacattgcgcagaatacagcatggcgtgtgaacaagaaagttctcgacgtagcgaatgcaatcacccaatggcagcactgtccagtcgcggatgtgcctgcgatggatcgtggcgaaatgccagctcgtccgttggacatcgataccaacgagattgcacttaaagcgtggaagaaagaagcttccgcgttctaccgcaaagacaaagcacgcgttagccgtcgtctgtcaatggagtttatgttatctcaggcgaacaagtttgcgaattataaagcaatctggtttccgcaaaacatggattggcgtgggcgcgtgtacgctgtcccgatgttcaatcctcagggcaacgatatgacgaaaggcctgctgacctttgcgcagggtaaacccattggtgaagacggcttctattggctcaagattcatggcgcaaatacagctggagtggataaagtaccgtttccacaacgcatcaaatttgttgaggataaccatacgaatattatggaatgcgcgaaagcaccgctggaaaacacttggtgggcggaacaggactcgccgttctgttttctggcgttctgctttgagtatgctggcgtcatcaatcacggtctgtcgtacaactgtagcttgcctctggcatttgatggtagttgctccggcattcaacatttctcagcgatgttacgcgacgaaattggcggcaaagctgtgaatctcctcccatctgcggaagtgcaggatatttatcgtatcgtcagcgacaaagttaacgaggtactgaaacaagatctgattaacggtacctctaccaccttggaaacggtgactgataagaagacaggcgaaattaccgaacgcacgaaatacgggaccaaagttatggcacagtggtggttagaacacggtgtgaatcgtggcgtcacgaaacgctcggttatgactttggtgtatgggagcaaagagtttggattccgcgatcaagtgctgagtgacaccattcaaccggcgatcgataacggcaaaggtgacatgtttctgaatccgaatcaggctgctggttacatggcgaaactgatctggaacgcagtgtccgtcaccgtagtcgcagcagttgaggcgatgaactggctgaaaagtgcggcgaaattacttgctgctgaagtgaaggataagaagacggatacagttctgcgtggccgctgcgcagtacattgggtgactcccgacggcttccctgtgtggcaggaatacaagaagcctattcagacgcgcttgaacctgatgttcctcggtcagttccgcttacagcctaccattaacaccaacaaagatagcgagattgatgcacacaaacaggagtctggtatcgctcctaactttgtacacagccaagacggtaaccaccttcgtatgactgtagtgtgggcacacgagaagtacggaatcgaatcttttgcactgattcacgactccttcggtaccattccggctgacgctgcgaacctgttcaaagcagtgcgcgaaactatggtttcgacatatgagtcttgtgatgtactggctgatttctacgaccagttcgctgaccagttgcacgagtctcaattggacaaaatgccagcacttccggctaaaggtaacttgaacctccgtgacatcttaaaatcggacttcgcgttcgcg

SEQ ID NO: 300 - protein, 890 aa, synthetic construct
  REGION 1..890: note = Variant of RNA polymerase
MHHHHHHMNTINIAKNDFSDIELAAIPFNTLADHYGERLAREQLALEHESYEMGEARFRKMFERQLKAGEVADNAAAKPLITTLLPKMIARINDWFEEVKAKRGKRPTAFQFLQEIKPEAVAYITIKTTLACLTSADNTTVQAVASAIGRAIEDEARFGRIRDIEAKHFKKNVEEQLNKRVGHVYKKAFMQVVEADMLSKGLLGGEAWSSWHKEDSIHVGVRCIEMLIESTGMVSLHRQNAGVVGQDSETIELAPEYAEAIATRAGALAGISPMFQPCVVPPKPWTGITGGGYWAAGRKPLQLVRTRSLAALRRYEEVSMPEVIKAVNIAQNTAWRVNKKVLDVANAITQWQHCPVADVPAMDRGEMPARPLDIDTNEIALKAWKKEASAFYRKDKARVSRRLSMEFMLSQANKFANYKAIWFPQNMDWRGRVYAVPMFNPQGNDMTKGLLTFAQGKPIGEDGFYWLKIHGANTAGVDKVPFPQRIKFVEDNHTNIMECAKAPLENTWWAEQDSPFCFLAFCFEYAGVINHGLSYNCSLPLAFDGSCSGIQHFSAMLRDEIGGKAVNLLPSAEVQDIYRIVSDKVNEVLKQDLINGTSTTLETVTDKKTGEITERTKYGTKVMAQWWLEHGVNRGVTKRSVMTLVYGSKEFGFRDQVLSDTIQPAIDNGKGDMFLNPNQAAGYMAKLIWNAVSVTVVAAVEAMNWLKSAAKLLAAEVKDKKTDTVLRGRCAVHWVTPDGFPVWQEYKKPIQTRLNLMFLGQFRLQPTINTNKDSEIDAHKQESGIAPNFVHSQDGNHLRMTVVWAHEKYGIESFALIHDSFGTIPADAANLFKAVRETMVSTYESCDVLADFYDQFADQLHESQLDKMPALPAKGNLNLRDILKSDFAFA

SEQ ID NO: 301 - DNA, 2670 bp, synthetic construct
  misc_feature 1..2670: note = Variant of RNA polymerase
  source 1..2670: mol_type = other DNA
atgcaccatcaccatcaccatatgaacacgattaacatcgctaagaacgacttctctgacatcgaactggctgctatcccgttcaacactctggctgaccattacggtgagcgtttagctcgcgaacagttggcccttgagcatgagtcttacgagatgggtgaagcacgcttccgcaagatgtttgagcgtcaacttaaagctggtgaggttgcggataacgctgccgccaagcctctcatcactaccctactccctaagatgattgcacgcatcaacgactggtttgaggaagtgaaagctaagcgcggcaagcgcccgacagccttccagttcctgcaagaaatcaagccggaagccgtagcgtacatcaccattaagaccactctggcttgcctaaccagtgcggacaatacaaccgttcaggctgtagcaagcgcaatcggtcgggccattgaggacgaggctcgcttcggtcgtatccgtgaccttgaagctaagcacgttaagaaaaacgttgaggaacaactcaacaagcgcgtagggcacgtctacaagaaagcatttatgcaagttgtcgaggctgacatgctctctaagggtctactcggtggcgaggcgtggtcttcgtggcataaggaagactctattcatgtaggagtacgctgcatcgagatgctcattgagtcaaccggaatggttagcttacaccgccaaaatgctggcgtagtaggtcaagactctgagactatcgaactcgcacctgaatacgctgaggctatcgcaacccgtgcaggtgcgctggctggcatctctccgatgttccaaccttgcgtagttcctcctaagccgtggactggcattactggtggtggctattgggctgcggggcgcaaacccctgcagttagtacgtactcgcagtctggcggcgcttcgccgctatgaagaagtgtcgatgccggaggtcatcaaagcagtcaacattgcgcagaatacagcatggcgtgtgaacaagaaagttctcgacgtagcgaatgcaatcacccaatggcagcactgtccagtcgcggatgtgcctgcgatggatcgtggcgaaatgccagctcgtccgttggacatcgataccaacgagattgcacttaaagcgtggaagaaagaagcttccgcgttctaccgcaaagacaaagcacgcgttagccgtcgtctgtcaatggagtttatgttatctcaggcgaacaagtttgcgaattataaagcaatctggtttccgcaaaacatggattggcgtgggcgcgtgtacgctgtcccgatgttcaatcctcagggcaacgatatgacgaaaggcctgctgacctttgcgcagggtaaacccattggtgaagacggcttctattggctcaagattcatggcgcaaatacagctggagtggataaagtaccgtttccacaacgcatcaaatttgttgaggataaccatacgaatattatggaatgcgcgaaagcaccgctggaaaacacttggtgggcggaacaggactcgccgttctgttttctggcgttctgctttgagtatgctggcgtcatcaatcacggtctgtcgtacaactgtagcttgcctctggcatttgatggtagttgctccggcattcaacatttctcagcgatgttacgcgacgaaattggcggcaaagctgtgaatctcctcccatctgcggaagtgcaggatatttatcgtatcgtcagcgacaaagttaacgaggtactgaaacaagatctgattaacggtacctctaccaccttggaaacggtgactgataagaagacaggcgaaattaccgaacgcacgaaatacgggaccaaagttatggcacagtggtggttagaacacggtgtgaatcgtggcgtcacgaaacgctcggttatgactttggtgtatgggagcaaagagtttggattccgcgatcaagtgctgagtgacaccattcaaccggcgatcgataacggcaaaggtgacatgtttctgaatccgaatcaggctgctggttacatggcgaaactgatctggaacgcagtgtccgtcaccgtagtcgcagcagttgaggcgatgaactggctgaaaagtgcggcgaaattacttgctgctgaagtgaaggataagaagacggatacagttctgcgtggccgctgcgcagtacattgggtgactcccgacggcttccctgtgtggcaggaatacaagaagcctattcagacgcgcttgaacctgatgttcctcggtcagttccgcttacagcctaccattaacaccaacaaagatagcgagattgatgcacacaaacaggagtctggtatcgctcctaactttgtacacagccaagacggtaaccaccttcgtatgactgtagtgtgggcacacgagaagtacggaatcgaatcttttgcactgattcacgactccttcggtaccattccggctgacgctgcgaacctgttcaaagcagtgcgcgaaactatggtttcgacatatgagtcttgtgatgtactggctgatttctacgaccagttcgctgaccagttgcacgagtctcaattggacaaaatgccagcacttccggctaaaggtaacttgaacctccgtgacatcttaaaatcggacttcgcgttcgcg

SEQ ID NO: 302 - protein, 890 aa, synthetic construct
  REGION 1..890: note = Variant of RNA polymerase
MHHHHHHMNTINIAKNDFSDIELAAIPFNTLADHYGERLAREQLALEHESYEMGEARFRKMFERQLKAGEVADNAAAKPLITTLLPKMIARINDWFEEVKAKRGKRPTAFQFLQEIKPEAVAYITIKTTLACLTSADNTTVQAVASAIGRAIEDEARFGRIRDLEAKHVKKNVEEQLNKRVGHVYKKAFMQVVEADMLSKGLLGGEAWSSWHKEDSIHVGVRCIEMLIESTGMVSLHRQNAGVVGQDSETIELAPEYAEAIATRAGALAGISPMFQPCVVPPKPWTGITGGGYWAAGRKPLQLVRTRSLAALRRYEEVSMPEVIKAVNIAQNTAWRVNKKVLDVANAITQWQHCPVADVPAMDRGEMPARPLDIDTNEIALKAWKKEASAFYRKDKARVSRRLSMEFMLSQANKFANYKAIWFPQNMDWRGRVYAVPMFNPQGNDMTKGLLTFAQGKPIGEDGFYWLKIHGANTAGVDKVPFPQRIKFVEDNHTNIMECAKAPLENTWWAEQDSPFCFLAFCFEYAGVINHGLSYNCSLPLAFDGSCSGIQHFSAMLRDEIGGKAVNLLPSAEVQDIYRIVSDKVNEVLKQDLINGTSTTLETVTDKKTGEITERTKYGTKVMAQWWLEHGVNRGVTKRSVMTLVYGSKEFGFRDQVLSDTIQPAIDNGKGDMFLNPNQAAGYMAKLIWNAVSVTVVAAVEAMNWLKSAAKLLAAEVKDKKTDTVLRGRCAVHWVTPDGFPVWQEYKKPIQTRLNLMFLGQFRLQPTINTNKDSEIDAHKQESGIAPNFVHSQDGNHLRMTVVWAHEKYGIESFALIHDSFGTIPADAANLFKAVRETMVSTYESCDVLADFYDQFADQLHESQLDKMPALPAKGNLNLRDILKSDFAFA

SEQ ID NO: 303 - DNA, 2670 bp, synthetic construct
  misc_feature 1..2670: note = Variant of RNA polymerase
  source 1..2670: mol_type = other DNA
atgcaccatcaccatcaccatatgaacacgattaacatcgctaagaacgacttctctgacatcgaactggctgctatcccgttcaacactctggctgaccattacggtgagcgtttagctcgcgaacagttggcccttgagcatgagtcttacgagatgggtgaagcacgcttccgcaagatgtttgagcgtcaacttaaagctggtgaggttgcggataacgctgccgccaagcctctcatcactaccctactccctaagatgattgcacgcatcaacgactggtttgaggaagtgaaagctaagcgcggcaagcgcccgacagccttccagttcctgcaagaaatcaagccggaagccgtagcgtacatcaccattaagaccactctggcttgcctaaccagtgcggacaatacaaccgttcaggctgtagcaagcgcaatcggtcgggccattgaggacgaggctcgcttcggtcgtatccgtgaccttgaagctaagcacttcaagaaaaacgttgaggaacaactcaacaagcgcgtagggcacgtctacaagaaagcagtgatgcaagttgtcgaggctgacatgctctctaagggtctactcggtggcgaggcgtggtcttcgtggcataaggaagactctattcatgtaggagtacgctgcatcgagatgctcattgagtcaaccggaatggttagcttacaccgccaaaatgctggcgtagtaggtcaagactctgagactatcgaactcgcacctgaatacgctgaggctatcgcaacccgtgcaggtgcgctggctggcatctctccgatgttccaaccttgcgtagttcctcctaagccgtggactggcattactggtggtggctattgggctgcggggcgcaaacccctgcagttagtacgtactcgcagtctggcggcgcttcgccgctatgaagaagtgtcgatgccggaggtcatcaaagcagtcaacattgcgcagaatacagcatggcgtgtgaacaagaaagttctcgacgtagcgaatgcaatcacccaatggcagcactgtccagtcgcggatgtgcctgcgatggatcgtggcgaaatgccagctcgtccgttggacatcgataccaacgagattgcacttaaagcgtggaagaaagaagcttccgcgttctaccgcaaagacaaagcacgcgttagccgtcgtctgtcaatggagtttatgttatctcaggcgaacaagtttgcgaattataaagcaatctggtttccgcaaaacatggattggcgtgggcgcgtgtacgctgtcccgatgttcaatcctcagggcaacgatatgacgaaaggcctgctgacctttgcgcagggtaaacccattggtgaagacggcttctattggctcaagattcatggcgcaaatacagctggagtggataaagtaccgtttccacaacgcatcaaatttgttgaggataaccatacgaatattatggaatgcgcgaaagcaccgctggaaaacacttggtgggcggaacaggactcgccgttctgttttctggcgttctgctttgagtatgctggcgtcatcaatcacggtctgtcgtacaactgtagcttgcctctggcatttgatggtagttgctccggcattcaacatttctcagcgatgttacgcgacgaaattggcggcaaagctgtgaatctcctcccatctgcggaagtgcaggatatttatcgtatcgtcagcgacaaagttaacgaggtactgaaacaagatctgattaacggtacctctaccaccttggaaacggtgactgataagaagacaggcgaaattaccgaacgcacgaaatacgggaccaaagttatggcacagtggtggttagaacacggtgtgaatcgtggcgtcacgaaacgctcggttatgactttggtgtatgggagcaaagagtttggattccgcgatcaagtgctgagtgacaccattcaaccggcgatcgataacggcaaaggtgacatgtttctgaatccgaatcaggctgctggttacatggcgaaactgatctggaacgcagtgtccgtcaccgtagtcgcagcagttgaggcgatgaactggctgaaaagtgcggcgaaattacttgctgctgaagtgaaggataagaagacggatacagttctgcgtggccgctgcgcagtacattgggtgactcccgacggcttccctgtgtggcaggaatacaagaagcctattcagacgcgcttgaacctgatgttcctcggtcagttccgcttacagcctaccattaacaccaacaaagatagcgagattgatgcacacaaacaggagtctggtatcgctcctaactttgtacacagccaagacggtaaccaccttcgtatgactgtagtgtgggcacacgagaagtacggaatcgaatcttttgcactgattcacgactccttcggtaccattccggctgacgctgcgaacctgttcaaagcagtgcgcgaaactatggtttcgacatatgagtcttgtgatgtactggctgatttctacgaccagttcgctgaccagttgcacgagtctcaattggacaaaatgccagcacttccggctaaaggtaacttgaacctccgtgacatcttaaaatcggacttcgcgttcgcg

SEQ ID NO: 304 - protein, 890 aa, synthetic construct
  REGION 1..890: note = Variant of RNA polymerase
MHHHHHHMNTINIAKNDFSDIELAAIPFNTLADHYGERLAREQLALEHESYEMGEARFRKMFERQLKAGEVADNAAAKPLITTLLPKMIARINDWFEEVKAKRGKRPTAFQFLQEIKPEAVAYITIKTTLACLTSADNTTVQAVASAIGRAIEDEARFGRIRDLEAKHFKKNVEEQLNKRVGHVYKKAVMQVVEADMLSKGLLGGEAWSSWHKEDSIHVGVRCIEMLIESTGMVSLHRQNAGVVGQDSETIELAPEYAEAIATRAGALAGISPMFQPCVVPPKPWTGITGGGYWAAGRKPLQLVRTRSLAALRRYEEVSMPEVIKAVNIAQNTAWRVNKKVLDVANAITQWQHCPVADVPAMDRGEMPARPLDIDTNEIALKAWKKEASAFYRKDKARVSRRLSMEFMLSQANKFANYKAIWFPQNMDWRGRVYAVPMFNPQGNDMTKGLLTFAQGKPIGEDGFYWLKIHGANTAGVDKVPFPQRIKFVEDNHTNIMECAKAPLENTWWAEQDSPFCFLAFCFEYAGVINHGLSYNCSLPLAFDGSCSGIQHFSAMLRDEIGGKAVNLLPSAEVQDIYRIVSDKVNEVLKQDLINGTSTTLETVTDKKTGEITERTKYGTKVMAQWWLEHGVNRGVTKRSVMTLVYGSKEFGFRDQVLSDTIQPAIDNGKGDMFLNPNQAAGYMAKLIWNAVSVTVVAAVEAMNWLKSAAKLLAAEVKDKKTDTVLRGRCAVHWVTPDGFPVWQEYKKPIQTRLNLMFLGQFRLQPTINTNKDSEIDAHKQESGIAPNFVHSQDGNHLRMTVVWAHEKYGIESFALIHDSFGTIPADAANLFKAVRETMVSTYESCDVLADFYDQFADQLHESQLDKMPALPAKGNLNLRDILKSDFAFA

SEQ ID NO: 305 - DNA, 2670 bp, synthetic construct
  misc_feature 1..2670: note = Variant of RNA polymerase
  source 1..2670: mol_type = other DNA
atgcaccatcaccatcaccatatgaacacgattaacatcgctaagaacgacttctctgacatcgaactggctgctatcccgttcaacactctggctgaccattacggtgagcgtttagctcgcgaacagttggcccttgagcatgagtcttacgagatgggtgaagcacgcttccgcaagatgtttgagcgtcaacttaaagctggtgaggttgcggataacgctgccgccaagcctctcatcactaccctactccctaagatgattgcacgcatcaacgactggtttgaggaagtgaaagctaagcgcggcaagcgcccgacagccttccagttcctgcaagaaatcaagccggaagccgtagcgtacatcaccattaagaccactctggcttgcctaaccagtgcggacaatacaaccgttcaggctgtagcaagcgcaatcggtcgggccattgaggacgaggctcgcttcggtcgtatccgtgaccttgaagctaagcacttcaagaaaaacgttgaggaacaactcaacaagcgcgtagggcacagttacaagaaagcatttatgcaagttgtcgaggctgacatgctctctaagggtctactcggtggcgaggcgtggtcttcgtggcataaggaagactctattcatgtaggagtacgctgcatcgagatgctcattgagtcaaccggaatggttagcttacaccgccaaaatgctggcgtagtaggtcaagactctgagactatcgaactcgcacctgaatacgctgaggctatcgcaacccgtgcaggtgcgctggctggcatctctccgatgttccaaccttgcgtagttcctcctaagccgtggactggcattactggtggtggctattgggctgcggggcgcaaacccctgcagttagtacgtactcgcagtctggcggcgcttcgccgctatgaagaagtgtcgatgccggaggtcatcaaagcagtcaacattgcgcagaatacagcatggcgtgtgaacaagaaagttctcgacgtagcgaatgcaatcacccaatggcagcactgtccagtcgcggatgtgcctgcgatggatcgtggcgaaatgccagctcgtccgttggacatcgataccaacgagattgcacttaaagcgtggaagaaagaagcttccgcgttctaccgcaaagacaaagcacgcgttagccgtcgtctgtcaatggagtttatgttatctcaggcgaacaagtttgcgaattataaagcaatctggtttccgcaaaacatggattggcgtgggcgcgtgtacgctgtcccgatgttcaatcctcagggcaacgatatgacgaaaggcctgctgacctttgcgcagggtaaacccattggtgaagacggcttctattggctcaagattcatggcgcaaatacagctggagtggataaagtaccgtttccacaacgcatcaaatttgttgaggataaccatacgaatattatggaatgcgcgaaagcaccgctggaaaacacttggtgggcggaacaggactcgccgttctgttttctggcgttctgctttgagtatgctggcgtcatcaatcacggtctgtcgtacaactgtagcttgcctctggcatttgatggtagttgctccggcattcaacatttctcagcgatgttacgcgacgaaattggcggcaaagctgtgaatctcctcccatctgcggaagtgcaggatatttatcgtatcgtcagcgacaaagttaacgaggtactgaaacaagatctgattaacggtacctctaccaccttggaaacggtgactgataagaagacaggcgaaattaccgaacgcacgaaatacgggaccaaagttatggcacagtggtggttagaacacggtgtgaatcgtggcgtcacgaaacgctcggttatgactttggtgtatgggagcaaagagtttggattccgcgatcaagtgctgagtgacaccattcaaccggcgatcgataacggcaaaggtgacatgtttctgaatccgaatcaggctgctggttacatggcgaaactgatctggaacgcagtgtccgtcaccgtagtcgcagcagttgaggcgatgaactggctgaaaagtgcggcgaaattacttgctgctgaagtgaaggataagaagacggatacagttctgcgtggccgctgcgcagtacattgggtgactcccgacggcttccctgtgtggcaggaatacaagaagcctattcagacgcgcttgaacctgatgttcctcggtcagttccgcttacagcctaccattaacaccaacaaagatagcgagattgatgcacacaaacaggagtctggtatcgctcctaactttgtacacagccaagacggtaaccaccttcgtatgactgtagtgtgggcacacgagaagtacggaatcgaatcttttgcactgattcacgactccttcggtaccattccggctgacgctgcgaacctgttcaaagcagtgcgcgaaactatggtttcgacatatgagtcttgtgatgtactggctgatttctacgaccagttcgctgaccagttgcacgagtctcaattggacaaaatgccagcacttccggctaaaggtaacttgaacctccgtgacatcttaaaatcggacttcgcgttcgcg

SEQ ID NO: 306 - protein, 890 aa, synthetic construct
  REGION 1..890: note = Variant of RNA polymerase
MHHHHHHMNTINIAKNDFSDIELAAIPFNTLADHYGERLAREQLALEHESYEMGEARFRKMFERQLKAGEVADNAAAKPLITTLLPKMIARINDWFEEVKAKRGKRPTAFQFLQEIKPEAVAYITIKTTLACLTSADNTTVQAVASAIGRAIEDEARFGRIRDLEAKHFKKNVEEQLNKRVGHSYKKAFMQVVEADMLSKGLLGGEAWSSWHKEDSIHVGVRCIEMLIESTGMVSLHRQNAGVVGQDSETIELAPEYAEAIATRAGALAGISPMFQPCVVPPKPWTGITGGGYWAAGRKPLQLVRTRSLAALRRYEEVSMPEVIKAVNIAQNTAWRVNKKVLDVANAITQWQHCPVADVPAMDRGEMPARPLDIDTNEIALKAWKKEASAFYRKDKARVSRRLSMEFMLSQANKFANYKAIWFPQNMDWRGRVYAVPMFNPQGNDMTKGLLTFAQGKPIGEDGFYWLKIHGANTAGVDKVPFPQRIKFVEDNHTNIMECAKAPLENTWWAEQDSPFCFLAFCFEYAGVINHGLSYNCSLPLAFDGSCSGIQHFSAMLRDEIGGKAVNLLPSAEVQDIYRIVSDKVNEVLKQDLINGTSTTLETVTDKKTGEITERTKYGTKVMAQWWLEHGVNRGVTKRSVMTLVYGSKEFGFRDQVLSDTIQPAIDNGKGDMFLNPNQAAGYMAKLIWNAVSVTVVAAVEAMNWLKSAAKLLAAEVKDKKTDTVLRGRCAVHWVTPDGFPVWQEYKKPIQTRLNLMFLGQFRLQPTINTNKDSEIDAHKQESGIAPNFVHSQDGNHLRMTVVWAHEKYGIESFALIHDSFGTIPADAANLFKAVRETMVSTYESCDVLADFYDQFADQLHESQLDKMPALPAKGNLNLRDILKSDFAFA

SEQ ID NO: 307 - DNA, 2670 bp, synthetic construct
  misc_feature 1..2670: note = Variant of RNA polymerase
  source 1..2670: mol_type = other DNA
atgcaccatcaccatcaccatatgaacacgattaacatcgctaagaacgacttctctgacatcgaactggctgctatcccgttcaacactctggctgaccattacggtgagcgtttagctcgcgaacagttggcccttgagcatgagtcttacgagatgggtgaagcacgcttccgcaagatgtttgagcgtcaacttaaagctggtgaggttgcggataacgctgccgccaagcctctcatcactaccctactccctaagatgattgcacgcatcaacgactggtttgaggaagtgaaagctaagcgcggcaagcgcccgacagccttccagttcctgcaagaaatcaagccggaagccgtagcgtacatcaccattaagaccactctggcttgcctaaccagtgcggacaatacaaccgttcaggctgtagcaagcgcaatcggtcgggccattgaggacgaggctcgcttcggtcgtatccgtgaccttgaagctaagcacttcaagggtaacgttgaggaacaactcaacaagcgcgtagggcacgtctacaagaaagcatttatgcaagttgtcgaggctgacatgctctctaagggtctactcggtggcgaggcgtggtcttcgtggcataaggaagactctattcatgtaggagtacgctgcatcgagatgctcattgagtcaaccggaatggttagcttacaccgccaaaatgctggcgtagtaggtcaagactctgagactatcgaactcgcacctgaatacgctgaggctatcgcaacccgtgcaggtgcgctggctggcatctctccgatgttccaaccttgcgtagttcctcctaagccgtggactggcattactggtggtggctattgggctgcggggcgcaaacccctgcagttagtacgtactcgcagtctggcggcgcttcgccgctatgaagaagtgtcgatgccggaggtcatcaaagcagtcaacattgcgcagaatacagcatggcgtgtgaacaagaaagttctcgacgtagcgaatgcaatcacccaatggcagcactgtccagtcgcggatgtgcctgcgatggatcgtggcgaaatgccagctcgtccgttggacatcgataccaacgagattgcacttaaagcgtggaagaaagaagcttccgcgttctaccgcaaagacaaagcacgcgttagccgtcgtctgtcaatggagtttatgttatctcaggcgaacaagtttgcgaattataaagcaatctggtttccgcaaaacatggattggcgtgggcgcgtgtacgctgtcccgatgttcaatcctcagggcaacgatatgacgaaaggcctgctgacctttgcgcagggtaaacccattggtgaagacggcttctattggctcaagattcatggcgcaaatacagctggagtggataaagtaccgtttccacaacgcatcaaatttgttgaggataaccatacgaatattatggaatgcgcgaaagcaccgctggaaaacacttggtgggcggaacaggactcgccgttctgttttctggcgttctgctttgagtatgctggcgtcatcaatcacggtctgtcgtacaactgtagcttgcctctggcatttgatggtagttgctccggcattcaacatttctcagcgatgttacgcgacgaaattggcggcaaagctgtgaatctcctcccatctgcggaagtgcaggatatttatcgtatcgtcagcgacaaagttaacgaggtactgaaacaagatctgattaacggtacctctaccaccttggaaacggtgactgataagaagacaggcgaaattaccgaacgcacgaaatacgggaccaaagttatggcacagtggtggttagaacacggtgtgaatcgtggcgtcacgaaacgctcggttatgactttggtgtatgggagcaaagagtttggattccgcgatcaagtgctgagtgacaccattcaaccggcgatcgataacggcaaaggtgacatgtttctgaatccgaatcaggctgctggttacatggcgaaactgatctggaacgcagtgtccgtcaccgtagtcgcagcagttgaggcgatgaactggctgaaaagtgcggcgaaattacttgctgctgaagtgaaggataagaagacggatacagttctgcgtggccgctgcgcagtacattgggtgactcccgacggcttccctgtgtggcaggaatacaagaagcctattcagacgcgcttgaacctgatgttcctcggtcagttccgcttacagcctaccattaacaccaacaaagatagcgagattgatgcacacaaacaggagtctggtatcgctcctaactttgtacacagccaagacggtaaccaccttcgtatgactgtagtgtgggcacacgagaagtacggaatcgaatcttttgcactgattcacgactccttcggtaccattccggctgacgctgcgaacctgttcaaagcagtgcgcgaaactatggtttcgacatatgagtcttgtgatgtactggctgatttctacgaccagttcgctgaccagttgcacgagtctcaattggacaaaatgccagcacttccggctaaaggtaacttgaacctccgtgacatcttaaaatcggacttcgcgttcgcg

SEQ ID NO: 308 - protein, 890 aa, synthetic construct
  REGION 1..890: note = Variant of RNA polymerase
MHHHHHHMNTINIAKNDFSDIELAAIPFNTLADHYGERLAREQLALEHESYEMGEARFRKMFERQLKAGEVADNAAAKPLITTLLPKMIARINDWFEEVKAKRGKRPTAFQFLQEIKPEAVAYITIKTTLACLTSADNTTVQAVASAIGRAIEDEARFGRIRDLEAKHFKGNVEEQLNKRVGHVYKKAFMQVVEADMLSKGLLGGEAWSSWHKEDSIHVGVRCIEMLIESTGMVSLHRQNAGVVGQDSETIELAPEYAEAIATRAGALAGISPMFQPCVVPPKPWTGITGGGYWAAGRKPLQLVRTRSLAALRRYEEVSMPEVIKAVNIAQNTAWRVNKKVLDVANAITQWQHCPVADVPAMDRGEMPARPLDIDTNEIALKAWKKEASAFYRKDKARVSRRLSMEFMLSQANKFANYKAIWFPQNMDWRGRVYAVPMFNPQGNDMTKGLLTFAQGKPIGEDGFYWLKIHGANTAGVDKVPFPQRIKFVEDNHTNIMECAKAPLENTWWAEQDSPFCFLAFCFEYAGVINHGLSYNCSLPLAFDGSCSGIQHFSAMLRDEIGGKAVNLLPSAEVQDIYRIVSDKVNEVLKQDLINGTSTTLETVTDKKTGEITERTKYGTKVMAQWWLEHGVNRGVTKRSVMTLVYGSKEFGFRDQVLSDTIQPAIDNGKGDMFLNPNQAAGYMAKLIWNAVSVTVVAAVEAMNWLKSAAKLLAAEVKDKKTDTVLRGRCAVHWVTPDGFPVWQEYKKPIQTRLNLMFLGQFRLQPTINTNKDSEIDAHKQESGIAPNFVHSQDGNHLRMTVVWAHEKYGIESFALIHDSFGTIPADAANLFKAVRETMVSTYESCDVLADFYDQFADQLHESQLDKMPALPAKGNLNLRDILKSDFAFA

SEQ ID NO: 309 - DNA, 2670 bp, synthetic construct
  misc_feature 1..2670: note = Variant of RNA polymerase
  source 1..2670: mol_type = other DNA
atgcaccatcaccatcaccatatgaacacgattaacatcgctaagaacgacttctctgacgaggaactggctgctatcccgttcaacactctggctgaccattacggtgagcgtttagctcgcgaacagttggcccttgagcatgagtcttacgagatgggtgaagcacgcttccgcaagatgtttgagcgtcaacttaaagctggtgaggttgcggataacgctgccgccaagcctctcatcactaccctactccctaagatgattgcacgcatcaacgactggtttgaggaagtgaaagctaagcgcggcaagcgcccgacagccttccagttcctgcaagaaatcaagccggaagccgtagcgtacatcaccattaagaccactctggcttgcctaaccagtgcggacaatacaaccgttcaggctgtagcaagcgcaatcggtcgggccattgaggacgaggctcgcttcggtcgtatccgtgaccttgaagctaagcacttcaagaaaaacgttgaggaacaactcaacaagcgcgtagggcacgtctacaagaaagcatttatgcaagttgtcgaggctgacatgctctctaagggtctactcggtggcgaggcgtggtcttcgtggcataaggaagactctattcatgtaggagtacgctgcatcgagatgctcattgagtcaaccggaatggttagcttacaccgccaaaatgctggcgtagtaggtcaagactctgagactatcgaactcgcacctgaatacgctgaggctatcgcaacccgtgcaggtgcgctggctggcatctctccgatgttccaaccttgcgtagttcctcctaagccgtggactggcattactggtggtggctattgggctgcggggcgcaaacccctgcagttagtacgtactcgcagtctggcggcgcttcgccgctatgaagaagtgtcgatgccggaggtcatcaaagcagtcaacattgcgcagaatacagcatggcgtgtgaacaagaaagttctcgacgtagcgaatgcaatcacccaatggcagcactgtccagtcgcggatgtgcctgcgatggatcgtggcgaaatgccagctcgtccgttggacatcgataccaacgagattgcacttaaagcgtggaagaaagaagcttccgcgttctaccgcaaagacaaagcacgcgttagccgtcgtctgtcaatggagtttatgttatctcaggcgaacaagtttgcgaattataaagcaatctggtttccgcaaaacatggattggcgtgggcgcgtgtacgctgtcccgatgttcaatcctcagggcaacgatatgacgaaaggcctgctgacctttgcgcagggtaaacccattggtgaagacggcttctattggctcaagattcatggcgcaaatacagctggagtggataaagtaccgtttccacaacgcatcaaatttgttgaggataaccatacgaatattatggaatgcgcgaaagcaccgctggaaaacacttggtgggcggaacaggactcgccgttctgttttctggcgttctgctttgagtatgctggcgtcatcaatcacggtctgtcgtacaactgtagcttgcctctggcatttgatggtagttgctccggcattcaacatttctcagcgatgttacgcgacgaaattggcggcaaagctgtgaatctcctcccatctgcggaagtgcaggatatttatcgtatcgtcagcgacaaagttaacgaggtactgaaacaagatctgattaacggtacctctaccaccttggaaacggtgactgataagaagacaggcgaaattaccgaacgcacgaaatacgggaccaaagttatggcacagtggtggttagaacacggtgtgaatcgtggcgtcacgaaacgctcggttatgactttggtgtatgggagcaaagagtttggattccgcgatcaagtgctgagtgacaccattcaaccggcgatcgataacggcaaaggtgacatgtttctgaatccgaatcaggctgctggttacatggcgaaactgatctggaacgcagtgtccgtcaccgtagtcgcagcagttgaggcgatgaactggctgaaaagtgcggcgaaattacttgctgctgaagtgaaggataagaagacggatacagttctgcgtggccgctgcgcagtacattgggtgactcccgacggcttccctgtgtggcaggaatacaagaagcctattcagacgcgcttgaacctgatgttcctcggtcagttccgcttacagcctaccattaacaccaacaaagatagcgagattgatgcacacaaacaggagtctggtatcgctcctaactttgtacacagccaagacggtaaccaccttcgtatgactgtagtgtgggcacacgagaagtacggaatcgaatcttttgcactgattcacgactccttcggtaccattccggctgacgctgcgaacctgttcaaagcagtgcgcgaaactatggtttcgacatatgagtcttgtgatgtactggctgatttctacgaccagttcgctgaccagttgcacgagtctcaattggacaaaatgccagcacttccggctaaaggtaacttgaacctccgtgacatcttaaaatcggacttcgcgttcgcg

SEQ ID NO: 310 - protein, 890 aa, synthetic construct
  REGION 1..890: note = Variant of RNA polymerase
MHHHHHHMNTINIAKNDFSDEELAAIPFNTLADHYGERLAREQLALEHESYEMGEARFRKMFERQLKAGEVADNAAAKPLITTLLPKMIARINDWFEEVKAKRGKRPTAFQFLQEIKPEAVAYITIKTTLACLTSADNTTVQAVASAIGRAIEDEARFGRIRDLEAKHFKKNVEEQLNKRVGHVYKKAFMQVVEADMLSKGLLGGEAWSSWHKEDSIHVGVRCIEMLIESTGMVSLHRQNAGVVGQDSETIELAPEYAEAIATRAGALAGISPMFQPCVVPPKPWTGITGGGYWAAGRKPLQLVRTRSLAALRRYEEVSMPEVIKAVNIAQNTAWRVNKKVLDVANAITQWQHCPVADVPAMDRGEMPARPLDIDTNEIALKAWKKEASAFYRKDKARVSRRLSMEFMLSQANKFANYKAIWFPQNMDWRGRVYAVPMFNPQGNDMTKGLLTFAQGKPIGEDGFYWLKIHGANTAGVDKVPFPQRIKFVEDNHTNIMECAKAPLENTWWAEQDSPFCFLAFCFEYAGVINHGLSYNCSLPLAFDGSCSGIQHFSAMLRDEIGGKAVNLLPSAEVQDIYRIVSDKVNEVLKQDLINGTSTTLETVTDKKTGEITERTKYGTKVMAQWWLEHGVNRGVTKRSVMTLVYGSKEFGFRDQVLSDTIQPAIDNGKGDMFLNPNQAAGYMAKLIWNAVSVTVVAAVEAMNWLKSAAKLLAAEVKDKKTDTVLRGRCAVHWVTPDGFPVWQEYKKPIQTRLNLMFLGQFRLQPTINTNKDSEIDAHKQESGIAPNFVHSQDGNHLRMTVVWAHEKYGIESFALIHDSFGTIPADAANLFKAVRETMVSTYESCDVLADFYDQFADQLHESQLDKMPALPAKGNLNLRDILKSDFAFA

SEQ ID NO: 311 - DNA, 2670 bp, synthetic construct
  misc_feature 1..2670: note = Variant of RNA polymerase
  source 1..2670: mol_type = other DNA
atgcaccatcaccatcaccatatgaacacgattaacatcgctaagaacgacttctctgacatcgaactggctgctatcccgttcaacactctggctgaccattacggtgagcgtttagctcgcgaacagttggcccttgagcatgagtcttacgagatgggtgaagcacgcttccgcaagatgtttgagcgtcaacttaaagctggtgaggttgcggataacgctgccgccaagcctctcatcactaccctactccctaagatgattgcacgcatcaacgactggtttgaggaagtgaaagctaagcgcggcaagcgcccgacagccttccagttcctgcaagaaatcaagccggaagccgtagcgtacatcaccattaagaccactctggcttgcctaaccagtgcggacaatacaaccgttcaggctgtagcaagcgcaatcggtcgggccattgaggacgaggctcgcttcggtcgtatccgtgaccttgaagctaagcacttcaagaaaaacgttgaggaacaactcaacaagcgcgtagggcacgtctaccagaaagcatttatgcaagttgtcgaggctgacatgctctctaagggtctactcggtggcgaggcgtggtcttcgtggcataaggaagactctattcatgtaggagtacgctgcatcgagatgctcattgagtcaaccggaatggttagcttacaccgccaaaatgctggcgtagtaggtcaagactctgagactatcgaactcgcacctgaatacgctgaggctatcgcaacccgtgcaggtgcgctggctggcatctctccgatgttccaaccttgcgtagttcctcctaagccgtggactggcattactggtggtggctattgggctgcggggcgcaaacccctgcagttagtacgtactcgcagtctggcggcgcttcgccgctatgaagaagtgtcgatgccggaggtcatcaaagcagtcaacattgcgcagaatacagcatggcgtgtgaacaagaaagttctcgacgtagcgaatgcaatcacccaatggcagcactgtccagtcgcggatgtgcctgcgatggatcgtggcgaaatgccagctcgtccgttggacatcgataccaacgagattgcacttaaagcgtggaagaaagaagcttccgcgttctaccgcaaagacaaagcacgcgttagccgtcgtctgtcaatggagtttatgttatctcaggcgaacaagtttgcgaattataaagcaatctggtttccgcaaaacatggattggcgtgggcgcgtgtacgctgtcccgatgttcaatcctcagggcaacgatatgacgaaaggcctgctgacctttgcgcagggtaaacccattggtgaagacggcttctattggctcaagattcatggcgcaaatacagctggagtggataaagtaccgtttccacaacgcatcaaatttgttgaggataaccatacgaatattatggaatgcgcgaaagcaccgctggaaaacacttggtgggcggaacaggactcgccgttctgttttctggcgttctgctttgagtatgctggcgtcatcaatcacggtctgtcgtacaactgtagcttgcctctggcatttgatggtagttgctccggcattcaacatttctcagcgatgttacgcgacgaaattggcggcaaagctgtgaatctcctcccatctgcggaagtgcaggatatttatcgtatcgtcagcgacaaagttaacgaggtactgaaacaagatctgattaacggtacctctaccaccttggaaacggtgactgataagaagacaggcgaaattaccgaacgcacgaaatacgggaccaaagttatggcacagtggtggttagaacacggtgtgaatcgtggcgtcacgaaacgctcggttatgactttggtgtatgggagcaaagagtttggattccgcgatcaagtgctgagtgacaccattcaaccggcgatcgataacggcaaaggtgacatgtttctgaatccgaatcaggctgctggttacatggcgaaactgatctggaacgcagtgtccgtcaccgtagtcgcagcagttgaggcgatgaactggctgaaaagtgcggcgaaattacttgctgctgaagtgaaggataagaagacggatacagttctgcgtggccgctgcgcagtacattgggtgactcccgacggcttccctgtgtggcaggaatacaagaagcctattcagacgcgcttgaacctgatgttcctcggtcagttccgcttacagcctaccattaacaccaacaaagatagcgagattgatgcacacaaacaggagtctggtatcgctcctaactttgtacacagccaagacggtaaccaccttcgtatgactgtagtgtgggcacacgagaagtacggaatcgaatcttttgcactgattcacgactccttcggtaccattccggctgacgctgcgaacctgttcaaagcagtgcgcgaaactatggtttcgacatatgagtcttgtgatgtactggctgatttctacgaccagttcgctgaccagttgcacgagtctcaattggacaaaatgccagcacttccggctaaaggtaacttgaacctccgtgacatcttaaaatcggacttcgcgttcgcg

SEQ ID NO: 312 - protein, 890 aa, synthetic construct
  REGION 1..890: note = Variant of RNA polymerase
MHHHHHHMNTINIAKNDFSDIELAAIPFNTLADHYGERLAREQLALEHESYEMGEARFRKMFERQLKAGEVADNAAAKPLITTLLPKMIARINDWFEEVKAKRGKRPTAFQFLQEIKPEAVAYITIKTTLACLTSADNTTVQAVASAIGRAIEDEARFGRIRDLEAKHFKKNVEEQLNKRVGHVYQKAFMQVVEADMLSKGLLGGEAWSSWHKEDSIHVGVRCIEMLIESTGMVSLHRQNAGVVGQDSETIELAPEYAEAIATRAGALAGISPMFQPCVVPPKPWTGITGGGYWAAGRKPLQLVRTRSLAALRRYEEVSMPEVIKAVNIAQNTAWRVNKKVLDVANAITQWQHCPVADVPAMDRGEMPARPLDIDTNEIALKAWKKEASAFYRKDKARVSRRLSMEFMLSQANKFANYKAIWFPQNMDWRGRVYAVPMFNPQGNDMTKGLLTFAQGKPIGEDGFYWLKIHGANTAGVDKVPFPQRIKFVEDNHTNIMECAKAPLENTWWAEQDSPFCFLAFCFEYAGVINHGLSYNCSLPLAFDGSCSGIQHFSAMLRDEIGGKAVNLLPSAEVQDIYRIVSDKVNEVLKQDLINGTSTTLETVTDKKTGEITERTKYGTKVMAQWWLEHGVNRGVTKRSVMTLVYGSKEFGFRDQVLSDTIQPAIDNGKGDMFLNPNQAAGYMAKLIWNAVSVTVVAAVEAMNWLKSAAKLLAAEVKDKKTDTVLRGRCAVHWVTPDGFPVWQEYKKPIQTRLNLMFLGQFRLQPTINTNKDSEIDAHKQESGIAPNFVHSQDGNHLRMTVVWAHEKYGIESFALIHDSFGTIPADAANLFKAVRETMVSTYESCDVLADFYDQFADQLHESQLDKMPALPAKGNLNLRDILKSDFAFA

SEQ ID NO: 313 - DNA, 2670 bp, synthetic construct
  misc_feature 1..2670: note = Variant of RNA polymerase
  source 1..2670: mol_type = other DNA
atgcaccatcaccatcaccatatgaacacgattaacatcgctaagaacgacttctctgacatcgaactggctgctatcccgttcaacactctggctgaccattacggtgagcgtttagctcgcgaacagttggcccttgagcatgagtcttacgagatgggtgaagcacgcttccgcaagatgtttgagcgtcaacttaaagctggtgaggttgcggataacgctgccgccaagcctctcatcactaccctactccctaagatgattgcacgcatcaacgactggtttgaggaagtgaaagctaagcgcggcaagcgcccgacagccttccagttcctgcaagaaatcaagccggaagccgtagcgtacatcaccattaagaccactctggcttgcctaaccagtgcggacaatacaaccgttcaggctgtagcaagcgcaatcggtcgggccattgaggacgaggctcgcttcggtcgtatccgtgaccttgaagctaagcacttcaagaaaaacgttgaggaacaactcaacaagcgcgtagggcacgtctacaagaaagcatttatgcaagttgtcgaggctgacatgctctctaagggtctactcggtggcgaggcgtggtcttcgtggcataaggaagactctattcatgtaggagtacgctgcatcgagatgctcattgagtcaaccggaatggttagcttacaccgccaaaatgctggcgtagtaggtcaagactctgagactatcgaactcgcacctgaatacgctgaggctatcgcaacccgtgcaggtgcgctggctggcatctctccgatgttccaaccttgcgtagttcctcctaagccgtggactggcattactggtggtggctattgggctgcggggcgcaaacccctgcagttagtacgtactcgcagtctggcggcgcttcgccgctatgaagaagtgtcgatgccggaggtcatcaaagcagtcaacattgcgcagaatacagcatggcgtgtgaacaagaaagttctcgacgtagcgaatgcaatcacccaatggcagcactgtccagtcgcggatgtgcctgcgatggatcgtggcgaaatgccagctcgtccgttggacatcgataccaacgagattgcacttaaagcgtggaagaaagaagcttccgcgttctaccgcaaagacaaagcacgcgttagccgtcgtctgtcaatggagtttatgttatctcaggcgaacaagtttgcgaattataaagcaatctggtttccgcaaaacatggattggcgtgggcgcgtgtacgctgtcccgatgttcaatcctcagggcaacgatatgacgaaaggcctgctgacctttgcgcagggtaaacccattggtgaagacggcttctattggctcaagattcatggcgcaaatacagctggagtggataaagtaccgtttccacaacgcatcaaatttgttgaggataaccatacgaatattatggaatgcgcgaaagcaccgctggaaaacacttggtgggcggaacaggactcgccgttctgttttctggcgttctgctttgagtatgctgaggtcatcaatcacggtctgtcgtacaactgtagcttgcctctggcatttgatggtagttgctccggcattcaacatttctcagcgatgttacgcgacgaaattggcggcaaagctgtgaatctcctcccatctgcggaagtgcaggatatttatcgtatcgtcagcgacaaagttaacgaggtactgaaacaagatctgattaacggtacctctaccaccttggaaacggtgactgataagaagacaggcgaaattaccgaacgcacgaaatacgggaccaaagttatggcacagtggtggttagaacacggtgtgaatcgtggcgtcacgaaacgctcggttatgactttggtgtatgggagcaaagagtttggattccgcgatcaagtgctgagtgacaccattcaaccggcgatcgataacggcaaaggtgacatgtttctgaatccgaatcaggctgctggttacatggcgaaactgatctggaacgcagtgtccgtcaccgtagtcgcagcagttgaggcgatgaactggctgaaaagtgcggcgaaattacttgctgctgaagtgaaggataagaagacggatacagttctgcgtggccgctgcgcagtacattgggtgactcccgacggcttccctgtgtggcaggaatacaagaagcctattcagacgcgcttgaacctgatgttcctcggtcagttccgcttacagcctaccattaacaccaacaaagatagcgagattgatgcacacaaacaggagtctggtatcgctcctaactttgtacacagccaagacggtaaccaccttcgtatgactgtagtgtgggcacacgagaagtacggaatcgaatcttttgcactgattcacgactccttcggtaccattccggctgacgctgcgaacctgttcaaagcagtgcgcgaaactatggtttcgacatatgagtcttgtgatgtactggctgatttctacgaccagttcgctgaccagttgcacgagtctcaattggacaaaatgccagcacttccggctaaaggtaacttgaacctccgtgacatcttaaaatcggacttcgcgttcgcg

SEQ ID NO: 314 - protein, 890 aa, synthetic construct
  REGION 1..890: note = Variant of RNA polymerase
MHHHHHHMNTINIAKNDFSDIELAAIPFNTLADHYGERLAREQLALEHESYEMGEARFRKMFERQLKAGEVADNAAAKPLITTLLPKMIARINDWFEEVKAKRGKRPTAFQFLQEIKPEAVAYITIKTTLACLTSADNTTVQAVASAIGRAIEDEARFGRIRDLEAKHFKKNVEEQLNKRVGHVYKKAFMQVVEADMLSKGLLGGEAWSSWHKEDSIHVGVRCIEMLIESTGMVSLHRQNAGVVGQDSETIELAPEYAEAIATRAGALAGISPMFQPCVVPPKPWTGITGGGYWAAGRKPLQLVRTRSLAALRRYEEVSMPEVIKAVNIAQNTAWRVNKKVLDVANAITQWQHCPVADVPAMDRGEMPARPLDIDTNEIALKAWKKEASAFYRKDKARVSRRLSMEFMLSQANKFANYKAIWFPQNMDWRGRVYAVPMFNPQGNDMTKGLLTFAQGKPIGEDGFYWLKIHGANTAGVDKVPFPQRIKFVEDNHTNIMECAKAPLENTWWAEQDSPFCFLAFCFEYAEVINHGLSYNCSLPLAFDGSCSGIQHFSAMLRDEIGGKAVNLLPSAEVQDIYRIVSDKVNEVLKQDLINGTSTTLETVTDKKTGEITERTKYGTKVMAQWWLEHGVNRGVTKRSVMTLVYGSKEFGFRDQVLSDTIQPAIDNGKGDMFLNPNQAAGYMAKLIWNAVSVTVVAAVEAMNWLKSAAKLLAAEVKDKKTDTVLRGRCAVHWVTPDGFPVWQEYKKPIQTRLNLMFLGQFRLQPTINTNKDSEIDAHKQESGIAPNFVHSQDGNHLRMTVVWAHEKYGIESFALIHDSFGTIPADAANLFKAVRETMVSTYESCDVLADFYDQFADQLHESQLDKMPALPAKGNLNLRDILKSDFAFA

SEQ ID NO: 315 - DNA, 2670 bp, synthetic construct
  misc_feature 1..2670: note = Variant of RNA polymerase
  source 1..2670: mol_type = other DNA
atgcaccatcaccatcaccatatgaacacgattaacatcgctaagaacgacttctctgacatcgaactggctgctatcccgttcaacactctggctgaccattacggtgagcgtttagctcgcgaacagttggcccttgagcatgagtcttacgagatgggtgaagcacgcttccgcaagatgtttgagcgtcaacttaaagctggtgaggttgcggataacgctgccgccaagcctctcatcactaccctactccctaagatgattgcacgcatcaacgactggtttgaggaagtgaaagctaagcgcggcaagcgcccgacagccttccagttcctgcaagaaatcaagccggaagccgtagcgtacatcaccattaagaccactctggcttgcctaaccagtgcggacaatacaaccgttcaggctgtagcaagcgcaatcggtcgggccattgaggacgaggctcgcttcggtcgtatccgtgaccttgaagctaagcacttcaagaaaaacgttgaggaacaactcaacaagcgcgtagggcacccttacaagaaagcatttatgcaagttgtcgaggctgacatgctctctaagggtctactcggtggcgaggcgtggtcttcgtggcataaggaagactctattcatgtaggagtacgctgcatcgagatgctcattgagtcaaccggaatggttagcttacaccgccaaaatgctggcgtagtaggtcaagactctgagactatcgaactcgcacctgaatacgctgaggctatcgcaacccgtgcaggtgcgctggctggcatctctccgatgttccaaccttgcgtagttcctcctaagccgtggactggcattactggtggtggctattgggctgcggggcgcaaacccctgcagttagtacgtactcgcagtctggcggcgcttcgccgctatgaagaagtgtcgatgccggaggtcatcaaagcagtcaacattgcgcagaatacagcatggcgtgtgaacaagaaagttctcgacgtagcgaatgcaatcacccaatggcagcactgtccagtcgcggatgtgcctgcgatggatcgtggcgaaatgccagctcgtccgttggacatcgataccaacgagattgcacttaaagcgtggaagaaagaagcttccgcgttctaccgcaaagacaaagcacgcgttagccgtcgtctgtcaatggagtttatgttatctcaggcgaacaagtttgcgaattataaagcaatctggtttccgcaaaacatggattggcgtgggcgcgtgtacgctgtcccgatgttcaatcctcagggcaacgatatgacgaaaggcctgctgacctttgcgcagggtaaacccattggtgaagacggcttctattggctcaagattcatggcgcaaatacagctggagtggataaagtaccgtttccacaacgcatcaaatttgttgaggataaccatacgaatattatggaatgcgcgaaagcaccgctggaaaacacttggtgggcggaacaggactcgccgttctgttttctggcgttctgctttgagtatgctggcgtcatcaatcacggtctgtcgtacaactgtagcttgcctctggcatttgatggtagttgctccggcattcaacatttctcagcgatgttacgcgacgaaattggcggcaaagctgtgaatctcctcccatctgcggaagtgcaggatatttatcgtatcgtcagcgacaaagttaacgaggtactgaaacaagatctgattaacggtacctctaccaccttggaaacggtgactgataagaagacaggcgaaattaccgaacgcacgaaatacgggaccaaagttatggcacagtggtggttagaacacggtgtgaatcgtggcgtcacgaaacgctcggttatgactttggtgtatgggagcaaagagtttggattccgcgatcaagtgctgagtgacaccattcaaccggcgatcgataacggcaaaggtgacatgtttctgaatccgaatcaggctgctggttacatggcgaaactgatctggaacgcagtgtccgtcaccgtagtcgcagcagttgaggcgatgaactggctgaaaagtgcggcgaaattacttgctgctgaagtgaaggataagaagacggatacagttctgcgtggccgctgcgcagtacattgggtgactcccgacggcttccctgtgtggcaggaatacaagaagcctattcagacgcgcttgaacctgatgttcctcggtcagttccgcttacagcctaccattaacaccaacaaagatagcgagattgatgcacacaaacaggagtctggtatcgctcctaactttgtacacagccaagacggtaaccaccttcgtatgactgtagtgtgggcacacgagaagtacggaatcgaatcttttgcactgattcacgactccttcggtaccattccggctgacgctgcgaacctgttcaaagcagtgcgcgaaactatggtttcgacatatgagtcttgtgatgtactggctgatttctacgaccagttcgctgaccagttgcacgagtctcaattggacaaaatgccagcacttccggctaaaggtaacttgaacctccgtgacatcttaaaatcggacttcgcgttcgcg

SEQ ID NO: 316 - protein, 890 aa, synthetic construct
  REGION 1..890: note = Variant of RNA polymerase
MHHHHHHMNTINIAKNDFSDIELAAIPFNTLADHYGERLAREQLALEHESYEMGEARFRKMFERQLKAGEVADNAAAKPLITTLLPKMIARINDWFEEVKAKRGKRPTAFQFLQEIKPEAVAYITIKTTLACLTSADNTTVQAVASAIGRAIEDEARFGRIRDLEAKHFKKNVEEQLNKRVGHPYKKAFMQVVEADMLSKGLLGGEAWSSWHKEDSIHVGVRCIEMLIESTGMVSLHRQNAGVVGQDSETIELAPEYAEAIATRAGALAGISPMFQPCVVPPKPWTGITGGGYWAAGRKPLQLVRTRSLAALRRYEEVSMPEVIKAVNIAQNTAWRVNKKVLDVANAITQWQHCPVADVPAMDRGEMPARPLDIDTNEIALKAWKKEASAFYRKDKARVSRRLSMEFMLSQANKFANYKAIWFPQNMDWRGRVYAVPMFNPQGNDMTKGLLTFAQGKPIGEDGFYWLKIHGANTAGVDKVPFPQRIKFVEDNHTNIMECAKAPLENTWWAEQDSPFCFLAFCFEYAGVINHGLSYNCSLPLAFDGSCSGIQHFSAMLRDEIGGKAVNLLPSAEVQDIYRIVSDKVNEVLKQDLINGTSTTLETVTDKKTGEITERTKYGTKVMAQWWLEHGVNRGVTKRSVMTLVYGSKEFGFRDQVLSDTIQPAIDNGKGDMFLNPNQAAGYMAKLIWNAVSVTVVAAVEAMNWLKSAAKLLAAEVKDKKTDTVLRGRCAVHWVTPDGFPVWQEYKKPIQTRLNLMFLGQFRLQPTINTNKDSEIDAHKQESGIAPNFVHSQDGNHLRMTVVWAHEKYGIESFALIHDSFGTIPADAANLFKAVRETMVSTYESCDVLADFYDQFADQLHESQLDKMPALPAKGNLNLRDILKSDFAFA

SEQ ID NO: 317 - DNA, 2670 bp, synthetic construct
  misc_feature 1..2670: note = Variant of RNA polymerase
  source 1..2670: mol_type = other DNA
atgcaccatcaccatcaccatatgaacacgattaacatcgctaagaacgacttctctgacatcgaactggctgctatcccgttcaacactctggctgaccattacggtgagcgtttagctcgcgaacagttggcccttgagcatgagtcttacgagatgggtgaagcaggtttccgcaagatgtttgagcgtcaacttaaagctggtgaggttgcggataacgctgccgccaagcctctcatcactaccctactccctaagatgattgcacgcatcaacgactggtttgaggaagtgaaagctaagcgcggcaagcgcccgacagccttccagttcctgcaagaaatcaagccggaagccgtagcgtacatcaccattaagaccactctggcttgcctaaccagtgcggacaatacaaccgttcaggctgtagcaagcgcaatcggtcgggccattgaggacgaggctcgcttcggtcgtatccgtgaccttgaagctaagcacttcaagaaaaacgttgaggaacaactcaacaagcgcgtagggcacgtctacaagaaagcatttatgcaagttgtcgaggctgacatgctctctaagggtctactcggtggcgaggcgtggtcttcgtggcataaggaagactctattcatgtaggagtacgctgcatcgagatgctcattgagtcaaccggaatggttagcttacaccgccaaaatgctggcgtagtaggtcaagactctgagactatcgaactcgcacctgaatacgctgaggctatcgcaacccgtgcaggtgcgctggctggcatctctccgatgttccaaccttgcgtagttcctcctaagccgtggactggcattactggtggtggctattgggctgcggggcgcaaacccctgcagttagtacgtactcgcagtctggcggcgcttcgccgctatgaagaagtgtcgatgccggaggtcatcaaagcagtcaacattgcgcagaatacagcatggcgtgtgaacaagaaagttctcgacgtagcgaatgcaatcacccaatggcagcactgtccagtcgcggatgtgcctgcgatggatcgtggcgaaatgccagctcgtccgttggacatcgataccaacgagattgcacttaaagcgtggaagaaagaagcttccgcgttctaccgcaaagacaaagcacgcgttagccgtcgtctgtcaatggagtttatgttatctcaggcgaacaagtttgcgaattataaagcaatctggtttccgcaaaacatggattggcgtgggcgcgtgtacgctgtcccgatgttcaatcctcagggcaacgatatgacgaaaggcctgctgacctttgcgcagggtaaacccattggtgaagacggcttctattggctcaagattcatggcgcaaatacagctggagtggataaagtaccgtttccacaacgcatcaaatttgttgaggataaccatacgaatattatggaatgcgcgaaagcaccgctggaaaacacttggtgggcggaacaggactcgccgttctgttttctggcgttctgctttgagtatgctggcgtcatcaatcacggtctgtcgtacaactgtagcttgcctctggcatttgatggtagttgctccggcattcaacatttctcagcgatgttacgcgacgaaattggcggcaaagctgtgaatctcctcccatctgcggaagtgcaggatatttatcgtatcgtcagcgacaaagttaacgaggtactgaaacaagatctgattaacggtacctctaccaccttggaaacggtgactgataagaagacaggcgaaattaccgaacgcacgaaatacgggaccaaagttatggcacagtggtggttagaacacggtgtgaatcgtggcgtcacgaaacgctcggttatgactttggtgtatgggagcaaagagtttggattccgcgatcaagtgctgagtgacaccattcaaccggcgatcgataacggcaaaggtgacatgtttctgaatccgaatcaggctgctggttacatggcgaaactgatctggaacgcagtgtccgtcaccgtagtcgcagcagttgaggcgatgaactggctgaaaagtgcggcgaaattacttgctgctgaagtgaaggataagaagacggatacagttctgcgtggccgctgcgcagtacattgggtgactcccgacggcttccctgtgtggcaggaatacaagaagcctattcagacgcgcttgaacctgatgttcctcggtcagttccgcttacagcctaccattaacaccaacaaagatagcgagattgatgcacacaaacaggagtctggtatcgctcctaactttgtacacagccaagacggtaaccaccttcgtatgactgtagtgtgggcacacgagaagtacggaatcgaatcttttgcactgattcacgactccttcggtaccattccggctgacgctgcgaacctgttcaaagcagtgcgcgaaactatggtttcgacatatgagtcttgtgatgtactggctgatttctacgaccagttcgctgaccagttgcacgagtctcaattggacaaaatgccagcacttccggctaaaggtaacttgaacctccgtgacatcttaaaatcggacttcgcgttcgcg

SEQ ID NO: 318 - protein, 890 aa, synthetic construct
  REGION 1..890: note = Variant of RNA polymerase
MHHHHHHMNTINIAKNDFSDIELAAIPFNTLADHYGERLAREQLALEHESYEMGEAGFRKMFERQLKAGEVADNAAAKPLITTLLPKMIARINDWFEEVKAKRGKRPTAFQFLQEIKPEAVAYITIKTTLACLTSADNTTVQAVASAIGRAIEDEARFGRIRDLEAKHFKKNVEEQLNKRVGHVYKKAFMQVVEADMLSKGLLGGEAWSSWHKEDSIHVGVRCIEMLIESTGMVSLHRQNAGVVGQDSETIELAPEYAEAIATRAGALAGISPMFQPCVVPPKPWTGITGGGYWAAGRKPLQLVRTRSLAALRRYEEVSMPEVIKAVNIAQNTAWRVNKKVLDVANAITQWQHCPVADVPAMDRGEMPARPLDIDTNEIALKAWKKEASAFYRKDKARVSRRLSMEFMLSQANKFANYKAIWFPQNMDWRGRVYAVPMFNPQGNDMTKGLLTFAQGKPIGEDGFYWLKIHGANTAGVDKVPFPQRIKFVEDNHTNIMECAKAPLENTWWAEQDSPFCFLAFCFEYAGVINHGLSYNCSLPLAFDGSCSGIQHFSAMLRDEIGGKAVNLLPSAEVQDIYRIVSDKVNEVLKQDLINGTSTTLETVTDKKTGEITERTKYGTKVMAQWWLEHGVNRGVTKRSVMTLVYGSKEFGFRDQVLSDTIQPAIDNGKGDMFLNPNQAAGYMAKLIWNAVSVTVVAAVEAMNWLKSAAKLLAAEVKDKKTDTVLRGRCAVHWVTPDGFPVWQEYKKPIQTRLNLMFLGQFRLQPTINTNKDSEIDAHKQESGIAPNFVHSQDGNHLRMTVVWAHEKYGIESFALIHDSFGTIPADAANLFKAVRETMVSTYESCDVLADFYDQFADQLHESQLDKMPALPAKGNLNLRDILKSDFAFA

SEQ ID NO: 319 - DNA, 2670 bp, synthetic construct
  misc_feature 1..2670: note = Variant of RNA polymerase
  source 1..2670: mol_type = other DNA
atgcaccatcaccatcaccatatgaacacgattaacatcgctaagaacgacttctctgacatcgaactggctgctatcccgttcaacactctggctgaccattacggtgagcgtttagctcgcgaacagttggcccttgagcatgagtcttacgagatgggtgaagcacgcttccgcaagatgtttgagcgtcaacttaaagctggtgaggttgcggataacgctgccgccaagcctctcatcactaccctactccctaagatgattgcacgcatcaacgactggtttgaggaagtgaaagctaagcgcggcaagcgcccgacagccttccagttcctgcaagaaatcaagccggaagccgtagcgtacatcaccattaagaccactctggcttgcctaaccagtgcggacaatacaaccgttcaggctgtagcaagcgcaatcggtcgggccattgaggacgaggctcgcttcggtcgtatccgtgaccttgaagctaagcacttcaagaaaaacgttgaggaacaagtgaacaagcgcgtagggcacgtctacaagaaagcatttatgcaagttgtcgaggctgacatgctctctaagggtctactcggtggcgaggcgtggtcttcgtggcataaggaagactctattcatgtaggagtacgctgcatcgagatgctcattgagtcaaccggaatggttagcttacaccgccaaaatgctggcgtagtaggtcaagactctgagactatcgaactcgcacctgaatacgctgaggctatcgcaacccgtgcaggtgcgctggctggcatctctccgatgttccaaccttgcgtagttcctcctaagccgtggactggcattactggtggtggctattgggctgcggggcgcaaacccctgcagttagtacgtactcgcagtctggcggcgcttcgccgctatgaagaagtgtcgatgccggaggtcatcaaagcagtcaacattgcgcagaatacagcatggcgtgtgaacaagaaagttctcgacgtagcgaatgcaatcacccaatggcagcactgtccagtcgcggatgtgcctgcgatggatcgtggcgaaatgccagctcgtccgttggacatcgataccaacgagattgcacttaaagcgtggaagaaagaagcttccgcgttctaccgcaaagacaaagcacgcgttagccgtcgtctgtcaatggagtttatgttatctcaggcgaacaagtttgcgaattataaagcaatctggtttccgcaaaacatggattggcgtgggcgcgtgtacgctgtcccgatgttcaatcctcagggcaacgatatgacgaaaggcctgctgacctttgcgcagggtaaacccattggtgaagacggcttctattggctcaagattcatggcgcaaatacagctggagtggataaagtaccgtttccacaacgcatcaaatttgttgaggataaccatacgaatattatggaatgcgcgaaagcaccgctggaaaacacttggtgggcggaacaggactcgccgttctgttttctggcgttctgctttgagtatgctggcgtcatcaatcacggtctgtcgtacaactgtagcttgcctctggcatttgatggtagttgctccggcattcaacatttctcagcgatgttacgcgacgaaattggcggcaaagctgtgaatctcctcccatctgcggaagtgcaggatatttatcgtatcgtcagcgacaaagttaacgaggtactgaaacaagatctgattaacggtacctctaccaccttggaaacggtgactgataagaagacaggcgaaattaccgaacgcacgaaatacgggaccaaagttatggcacagtggtggttagaacacggtgtgaatcgtggcgtcacgaaacgctcggttatgactttggtgtatgggagcaaagagtttggattccgcgatcaagtgctgagtgacaccattcaaccggcgatcgataacggcaaaggtgacatgtttctgaatccgaatcaggctgctggttacatggcgaaactgatctggaacgcagtgtccgtcaccgtagtcgcagcagttgaggcgatgaactggctgaaaagtgcggcgaaattacttgctgctgaagtgaaggataagaagacggatacagttctgcgtggccgctgcgcagtacattgggtgactcccgacggcttccctgtgtggcaggaatacaagaagcctattcagacgcgcttgaacctgatgttcctcggtcagttccgcttacagcctaccattaacaccaacaaagatagcgagattgatgcacacaaacaggagtctggtatcgctcctaactttgtacacagccaagacggtaaccaccttcgtatgactgtagtgtgggcacacgagaagtacggaatcgaatcttttgcactgattcacgactccttcggtaccattccggctgacgctgcgaacctgttcaaagcagtgcgcgaaactatggtttcgacatatgagtcttgtgatgtactggctgatttctacgaccagttcgctgaccagttgcacgagtctcaattggacaaaatgccagcacttccggctaaaggtaacttgaacctccgtgacatcttaaaatcggacttcgcgttcgcg

SEQ ID NO: 320 - protein, 890 aa, synthetic construct
  REGION 1..890: note = Variant of RNA polymerase
MHHHHHHMNTINIAKNDFSDIELAAIPFNTLADHYGERLAREQLALEHESYEMGEARFRKMFERQLKAGEVADNAAAKPLITTLLPKMIARINDWFEEVKAKRGKRPTAFQFLQEIKPEAVAYITIKTTLACLTSADNTTVQAVASAIGRAIEDEARFGRIRDLEAKHFKKNVEEQVNKRVGHVYKKAFMQVVEADMLSKGLLGGEAWSSWHKEDSIHVGVRCIEMLIESTGMVSLHRQNAGVVGQDSETIELAPEYAEAIATRAGALAGISPMFQPCVVPPKPWTGITGGGYWAAGRKPLQLVRTRSLAALRRYEEVSMPEVIKAVNIAQNTAWRVNKKVLDVANAITQWQHCPVADVPAMDRGEMPARPLDIDTNEIALKAWKKEASAFYRKDKARVSRRLSMEFMLSQANKFANYKAIWFPQNMDWRGRVYAVPMFNPQGNDMTKGLLTFAQGKPIGEDGFYWLKIHGANTAGVDKVPFPQRIKFVEDNHTNIMECAKAPLENTWWAEQDSPFCFLAFCFEYAGVINHGLSYNCSLPLAFDGSCSGIQHFSAMLRDEIGGKAVNLLPSAEVQDIYRIVSDKVNEVLKQDLINGTSTTLETVTDKKTGEITERTKYGTKVMAQWWLEHGVNRGVTKRSVMTLVYGSKEFGFRDQVLSDTIQPAIDNGKGDMFLNPNQAAGYMAKLIWNAVSVTVVAAVEAMNWLKSAAKLLAAEVKDKKTDTVLRGRCAVHWVTPDGFPVWQEYKKPIQTRLNLMFLGQFRLQPTINTNKDSEIDAHKQESGIAPNFVHSQDGNHLRMTVVWAHEKYGIESFALIHDSFGTIPADAANLFKAVRETMVSTYESCDVLADFYDQFADQLHESQLDKMPALPAKGNLNLRDILKSDFAFA

SEQ ID NO: 321 - DNA, 2670 bp, synthetic construct
  misc_feature 1..2670: note = Variant of RNA polymerase
  source 1..2670: mol_type = other DNA
atgcaccatcaccatcaccatatgaacacgattaacatcgctaagaacgacttctctgacatcgaactggctgctatcccgttcaacactctggctgaccattacggtgagcgtttagctcgcgaacagttggcccttgagcatgagtcttacgagatgggtgaagcacgcttccgcaagatgtttgagcgtcaagataaagctggtgaggttgcggataacgctgccgccaagcctctcatcactaccctactccctaagatgattgcacgcatcaacgactggtttgaggaagtgaaagctaagcgcggcaagcgcccgacagccttccagttcctgcaagaaatcaagccggaagccgtagcgtacatcaccattaagaccactctggcttgcctaaccagtgcggacaatacaaccgttcaggctgtagcaagcgcaatcggtcgggccattgaggacgaggctcgcttcggtcgtatccgtgaccttgaagctaagcacttcaagaaaaacgttgaggaacaactcaacaagcgcgtagggcacgtctacaagaaagcatttatgcaagttgtcgaggctgacatgctctctaagggtctactcggtggcgaggcgtggtcttcgtggcataaggaagactctattcatgtaggagtacgctgcatcgagatgctcattgagtcaaccggaatggttagcttacaccgccaaaatgctggcgtagtaggtcaagactctgagactatcgaactcgcacctgaatacgctgaggctatcgcaacccgtgcaggtgcgctggctggcatctctccgatgttccaaccttgcgtagttcctcctaagccgtggactggcattactggtggtggctattgggctgcggggcgcaaacccctgcagttagtacgtactcgcagtctggcggcgcttcgccgctatgaagaagtgtcgatgccggaggtcatcaaagcagtcaacattgcgcagaatacagcatggcgtgtgaacaagaaagttctcgacgtagcgaatgcaatcacccaatggcagcactgtccagtcgcggatgtgcctgcgatggatcgtggcgaaatgccagctcgtccgttggacatcgataccaacgagattgcacttaaagcgtggaagaaagaagcttccgcgttctaccgcaaagacaaagcacgcgttagccgtcgtctgtcaatggagtttatgttatctcaggcgaacaagtttgcgaattataaagcaatctggtttccgcaaaacatggattggcgtgggcgcgtgtacgctgtcccgatgttcaatcctcagggcaacgatatgacgaaaggcctgctgacctttgcgcagggtaaacccattggtgaagacggcttctattggctcaagattcatggcgcaaatacagctggagtggataaagtaccgtttccacaacgcatcaaatttgttgaggataaccatacgaatattatggaatgcgcgaaagcaccgctggaaaacacttggtgggcggaacaggactcgccgttctgttttctggcgttctgctttgagtatgctggcgtcatcaatcacggtctgtcgtacaactgtagcttgcctctggcatttgatggtagttgctccggcattcaacatttctcagcgatgttacgcgacgaaattggcggcaaagctgtgaatctcctcccatctgcggaagtgcaggatatttatcgtatcgtcagcgacaaagttaacgaggtactgaaacaagatctgattaacggtacctctaccaccttggaaacggtgactgataagaagacaggcgaaattaccgaacgcacgaaatacgggaccaaagttatggcacagtggtggttagaacacggtgtgaatcgtggcgtcacgaaacgctcggttatgactttggtgtatgggagcaaagagtttggattccgcgatcaagtgctgagtgacaccattcaaccggcgatcgataacggcaaaggtgacatgtttctgaatccgaatcaggctgctggttacatggcgaaactgatctggaacgcagtgtccgtcaccgtagtcgcagcagttgaggcgatgaactggctgaaaagtgcggcgaaattacttgctgctgaagtgaaggataagaagacggatacagttctgcgtggccgctgcgcagtacattgggtgactcccgacggcttccctgtgtggcaggaatacaagaagcctattcagacgcgcttgaacctgatgttcctcggtcagttccgcttacagcctaccattaacaccaacaaagatagcgagattgatgcacacaaacaggagtctggtatcgctcctaactttgtacacagccaagacggtaaccaccttcgtatgactgtagtgtgggcacacgagaagtacggaatcgaatcttttgcactgattcacgactccttcggtaccattccggctgacgctgcgaacctgttcaaagcagtgcgcgaaactatggtttcgacatatgagtcttgtgatgtactggctgatttctacgaccagttcgctgaccagttgcacgagtctcaattggacaaaatgccagcacttccggctaaaggtaacttgaacctccgtgacatcttaaaatcggacttcgcgttcgcg

SEQ ID NO: 322 - protein, 890 aa, synthetic construct
  REGION 1..890: note = Variant of RNA polymerase
MHHHHHHMNTINIAKNDFSDIELAAIPFNTLADHYGERLAREQLALEHESYEMGEARFRKMFERQDKAGEVADNAAAKPLITTLLPKMIARINDWFEEVKAKRGKRPTAFQFLQEIKPEAVAYITIKTTLACLTSADNTTVQAVASAIGRAIEDEARFGRIRDLEAKHFKKNVEEQLNKRVGHVYKKAFMQVVEADMLSKGLLGGEAWSSWHKEDSIHVGVRCIEMLIESTGMVSLHRQNAGVVGQDSETIELAPEYAEAIATRAGALAGISPMFQPCVVPPKPWTGITGGGYWAAGRKPLQLVRTRSLAALRRYEEVSMPEVIKAVNIAQNTAWRVNKKVLDVANAITQWQHCPVADVPAMDRGEMPARPLDIDTNEIALKAWKKEASAFYRKDKARVSRRLSMEFMLSQANKFANYKAIWFPQNMDWRGRVYAVPMFNPQGNDMTKGLLTFAQGKPIGEDGFYWLKIHGANTAGVDKVPFPQRIKFVEDNHTNIMECAKAPLENTWWAEQDSPFCFLAFCFEYAGVINHGLSYNCSLPLAFDGSCSGIQHFSAMLRDEIGGKAVNLLPSAEVQDIYRIVSDKVNEVLKQDLINGTSTTLETVTDKKTGEITERTKYGTKVMAQWWLEHGVNRGVTKRSVMTLVYGSKEFGFRDQVLSDTIQPAIDNGKGDMFLNPNQAAGYMAKLIWNAVSVTVVAAVEAMNWLKSAAKLLAAEVKDKKTDTVLRGRCAVHWVTPDGFPVWQEYKKPIQTRLNLMFLGQFRLQPTINTNKDSEIDAHKQESGIAPNFVHSQDGNHLRMTVVWAHEKYGIESFALIHDSFGTIPADAANLFKAVRETMVSTYESCDVLADFYDQFADQLHESQLDKMPALPAKGNLNLRDILKSDFAFA

SEQ ID NO: 323 - DNA, 2670 bp, synthetic construct
  misc_feature 1..2670: note = Variant of RNA polymerase
  source 1..2670: mol_type = other DNA
atgcaccatcaccatcaccatatgaacacgattaacatcgctaagaacgacttctctgacatcgaactggctgctatcccgttcaacactctggctgaccattacggtgagcgtttagctcgcgaacagttggcccttgagcatgagtcttacgagatgggtgaagcacgcttccgcaagatgtttgagcgtcaacttaaagctggtgaggttgcggataacgctgccgccattcctctcatcactaccctactccctaagatgattgcacgcatcaacgactggtttgaggaagtgaaagctaagcgcggcaagcgcccgacagccttccagttcctgcaagaaatcaagccggaagccgtagcgtacatcaccattaagaccactctggcttgcctaaccagtgcggacaatacaaccgttcaggctgtagcaagcgcaatcggtcgggccattgaggacgaggctcgcttcggtcgtatccgtgaccttgaagctaagcacttcaagaaaaacgttgaggaacaactcaacaagcgcgtagggcacgtctacaagaaagcatttatgcaagttgtcgaggctgacatgctctctaagggtctactcggtggcgaggcgtggtcttcgtggcataaggaagactctattcatgtaggagtacgctgcatcgagatgctcattgagtcaaccggaatggttagcttacaccgccaaaatgctggcgtagtaggtcaagactctgagactatcgaactcgcacctgaatacgctgaggctatcgcaacccgtgcaggtgcgctggctggcatctctccgatgttccaaccttgcgtagttcctcctaagccgtggactggcattactggtggtggctattgggctgcggggcgcaaacccctgcagttagtacgtactcgcagtctggcggcgcttcgccgctatgaagaagtgtcgatgccggaggtcatcaaagcagtcaacattgcgcagaatacagcatggcgtgtgaacaagaaagttctcgacgtagcgaatgcaatcacccaatggcagcactgtccagtcgcggatgtgcctgcgatggatcgtggcgaaatgccagctcgtccgttggacatcgataccaacgagattgcacttaaagcgtggaagaaagaagcttccgcgttctaccgcaaagacaaagcacgcgttagccgtcgtctgtcaatggagtttatgttatctcaggcgaacaagtttgcgaattataaagcaatctggtttccgcaaaacatggattggcgtgggcgcgtgtacgctgtcccgatgttcaatcctcagggcaacgatatgacgaaaggcctgctgacctttgcgcagggtaaacccattggtgaagacggcttctattggctcaagattcatggcgcaaatacagctggagtggataaagtaccgtttccacaacgcatcaaatttgttgaggataaccatacgaatattatggaatgcgcgaaagcaccgctggaaaacacttggtgggcggaacaggactcgccgttctgttttctggcgttctgctttgagtatgctggcgtcatcaatcacggtctgtcgtacaactgtagcttgcctctggcatttgatggtagttgctccggcattcaacatttctcagcgatgttacgcgacgaaattggcggcaaagttgtgaatctcctcccatctgcggaagtgcaggatatttatcgtatcgtcagcgacaaagttaacgaggtactgaaacaagatctgattaacggtacctctaccaccttggaaacggtgactgataagaagacaggcgaaattaccgaacgcacgaaatacgggaccaaagttatggcacagtggtggttagaacacggtgtgaatcgtggcgtcacgaaacgctcggttatgactttggtgtatgggagcaaagagtttggattccgcgatcaagtgctgagtgacaccattcaaccggcgatcgataacggcaaaggtgacatgtttctgaatccgaatcaggctgctggttacatggcgaaactgatctggaacgcagtgtccgtcaccgtagtcgcagcagttgaggcgatgaactggctgaaaagtgcggcgaaattacttgctgctgaagtgaaggataagaagacggatacagttctgcgtggccgctgcgcagtacattgggtgactcccgacggcttccctgtgtggcaggaatacaagaagcctattcagacgcgcttgaacctgatgttcctcggtcagttccgcttacagcctaccattaacaccaacaaagatagcgagattgatgcacacaaacaggagtctggtatcgctcctaactttgtacacagccaagacggtaaccaccttcgtatgactgtagtgtgggcacacgagaagtacggaatcgaatcttttgcactgattcacgactccttcggtaccattccggctgacgctgcgaacctgttcaaagcagtgcgcgaaactatggtttcgacatatgagtcttgtgatgtactggctgatttctacgaccagttcgctgaccagttgcacgagtctcaattggacaaaatgccagcacttccggctaaaggtaacttgaacctccgtgacatcttaaaatcggacttcgcgttcgcg

SEQ ID NO: 324 - protein, 890 aa, synthetic construct
  REGION 1..890: note = Variant of RNA polymerase
MHHHHHHMNTINIAKNDFSDIELAAIPFNTLADHYGERLAREQLALEHESYEMGEARFRKMFERQLKAGEVADNAAAIPLITTLLPKMIARINDWFEEVKAKRGKRPTAFQFLQEIKPEAVAYITIKTTLACLTSADNTTVQAVASAIGRAIEDEARFGRIRDLEAKHFKKNVEEQLNKRVGHVYKKAFMQVVEADMLSKGLLGGEAWSSWHKEDSIHVGVRCIEMLIESTGMVSLHRQNAGVVGQDSETIELAPEYAEAIATRAGALAGISPMFQPCVVPPKPWTGITGGGYWAAGRKPLQLVRTRSLAALRRYEEVSMPEVIKAVNIAQNTAWRVNKKVLDVANAITQWQHCPVADVPAMDRGEMPARPLDIDTNEIALKAWKKEASAFYRKDKARVSRRLSMEFMLSQANKFANYKAIWFPQNMDWRGRVYAVPMFNPQGNDMTKGLLTFAQGKPIGEDGFYWLKIHGANTAGVDKVPFPQRIKFVEDNHTNIMECAKAPLENTWWAEQDSPFCFLAFCFEYAGVINHGLSYNCSLPLAFDGSCSGIQHFSAMLRDEIGGKVVNLLPSAEVQDIYRIVSDKVNEVLKQDLINGTSTTLETVTDKKTGEITERTKYGTKVMAQWWLEHGVNRGVTKRSVMTLVYGSKEFGFRDQVLSDTIQPAIDNGKGDMFLNPNQAAGYMAKLIWNAVSVTVVAAVEAMNWLKSAAKLLAAEVKDKKTDTVLRGRCAVHWVTPDGFPVWQEYKKPIQTRLNLMFLGQFRLQPTINTNKDSEIDAHKQESGIAPNFVHSQDGNHLRMTVVWAHEKYGIESFALIHDSFGTIPADAANLFKAVRETMVSTYESCDVLADFYDQFADQLHESQLDKMPALPAKGNLNLRDILKSDFAFA

SEQ ID NO: 325 - DNA, 2670 bp, synthetic construct
  misc_feature 1..2670: note = Variant of RNA polymerase
  source 1..2670: mol_type = other DNA
atgcaccatcaccatcaccatatgaacacgattaacatcgctaagaacgacttctctgacatcgaactggctgctatcccgttcaacactctggctgaccattacggtgagcgtttagctcgcgaacagttggcccttgagcatgagtcttacgagatgggtgaagcacgcttccgcaagatgtttgagcgtcaacttaaagctggtgaggttgcggataacgctgccgccaagcctctcatcactaccctactccctaagatgattgcacgcatcaacgactggtttgaggaagtgaaagctaagcgcggcaagcgcccgacagccttccagttcctgcaagaaatcaagccggaagccgtagcgtacatcaccattaagaccactctggcttgcctaaccagtgcggacaatacaaccgttcaggctgtagcaagcgcaatcggtcgggccattgaggacgaggctcgcttcggtcgtatccgtgaccttgaagctaagcacttcaagaaaaacgttgaggaacaactcaacaagcgcgtagggcacgtctacaagaaagcatttatgcaagttgtcgaggctgacatgctctctaagggtctactcggtggcgaggcgtggtcttcgtggcataaggaagactctattcatgtaggagtacgctgcatcgagatgctcattgagtcaaccggaatggttagcttacaccgccaaaatgctggcgtagtaggtcaagactctgagactatcgaactcgcacctgaatacgctgaggctatcgcaacccgtgcaggtgcgctggctggcatctctccgatgttccaaccttgcgtagttcctcctaagccgtggactggcattactggtggtggctattgggctgcggggcgcaaacccctgcagttagtacgtactcgcagtctggcggcgcttcgccgctatgaagaagtgtcgatgccggaggtcatcaaagcagtcaacattgcgcagaatacagcatggcgtgtgaacaagaaagttctcgacgtagcgaatgcaatcacccaatggcagcactgtccagtcgcggatgtgcctgcgatggatcgtggcgaaatgccagctcgtccgttggacatcgataccaacgagattgcacttaaagcgtggaagaaagaagcttccgcgttctaccgcaaagacaaagcacgcgttagccgtcgtctgtcaatggagtttatgttatctcaggcgaacaagtttgcgaattatatggcaatctggtttccgcaaaacatggattggcgtgggcgcgtgtacgctgtcccgatgttcaatcctcagggcaacgatatgacgaaaggcctgctgacctttgcgcagggtaaacccattggtgaagacggcttctattggctcaagattcatggcgcaaatacagctggagtggataaagtaccgtttccacaacgcatcaaatttgttgaggataaccatacgaatattatggaatgcgcgaaagcaccgctggaaaacacttggtgggcggaacaggactcgccgttctgttttctggcgttctgctttgagtatgctggcgtcatcaatcacggtctgtcgtacaactgtagcttgcctctggcatttgatggtagttgctccggcattcaacatttctcagcgatgttacgcgacgaaattggcggcaaagctgtgaatctcctcccatctgcggaagtgcaggatatttatcgtatcgtcagcgacaaagttaacgaggtactgaaacaagatctgattaacggtacctctaccaccttggaaacggtgactgataagaagacaggcgaaattaccgaacgcacgaaatacgggaccaaagttatggcacagtggtggttagaacacggtgtgaatcgtggcgtcacgaaacgctcggttatgactttggtgtatgggagcaaagagtttggattccgcgatcaagtgctgagtgacaccattcaaccggcgatcgataacggcaaaggtgacatgtttctgaatccgaatcaggctgctggttacatggcgaaactgatctggaacgcagtgtccgtcaccgtagtcgcagcagttgaggcgatgaactggctgaaaagtgcggcgaaattacttgctgctgaagtgaaggataagaagacggatacagttctgcgtggccgctgcgcagtacattgggtgactcccgacggcttccctgtgtggcaggaatacaagaagcctattcagacgcgcttgaacctgatgttcctcggtcagttccgcttacagcctaccattaacaccaacaaagatagcgagattgatgcacacaaacaggagtctggtatcgctcctaactttgtacacagccaagacggtaaccaccttcgtatgactgtagtgtgggcacacgagaagtacggaatcgaatcttttgcactgattcacgactccttcggtaccattccggctgacgctgcgaacctgttcaaagcagtgcgcgaaactatggtttcgacatatgagtcttgtgatgtactggctgatttctacgaccagttcgctgaccagttgcacgagtctcaattggacaaaatgccagcacttccggctaaaggtaacttgaacctccgtgacatcttaaaatcggacttcgcgttcgcg

SEQ ID NO: 326 - protein, 890 aa, synthetic construct
  REGION 1..890: note = Variant of RNA polymerase
MHHHHHHMNTINIAKNDFSDIELAAIPFNTLADHYGERLAREQLALEHESYEMGEARFRKMFERQLKAGEVADNAAAKPLITTLLPKMIARINDWFEEVKAKRGKRPTAFQFLQEIKPEAVAYITIKTTLACLTSADNTTVQAVASAIGRAIEDEARFGRIRDLEAKHFKKNVEEQLNKRVGHVYKKAFMQVVEADMLSKGLLGGEAWSSWHKEDSIHVGVRCIEMLIESTGMVSLHRQNAGVVGQDSETIELAPEYAEAIATRAGALAGISPMFQPCVVPPKPWTGITGGGYWAAGRKPLQLVRTRSLAALRRYEEVSMPEVIKAVNIAQNTAWRVNKKVLDVANAITQWQHCPVADVPAMDRGEMPARPLDIDTNEIALKAWKKEASAFYRKDKARVSRRLSMEFMLSQANKFANYMAIWFPQNMDWRGRVYAVPMFNPQGNDMTKGLLTFAQGKPIGEDGFYWLKIHGANTAGVDKVPFPQRIKFVEDNHTNIMECAKAPLENTWWAEQDSPFCFLAFCFEYAGVINHGLSYNCSLPLAFDGSCSGIQHFSAMLRDEIGGKAVNLLPSAEVQDIYRIVSDKVNEVLKQDLINGTSTTLETVTDKKTGEITERTKYGTKVMAQWWLEHGVNRGVTKRSVMTLVYGSKEFGFRDQVLSDTIQPAIDNGKGDMFLNPNQAAGYMAKLIWNAVSVTVVAAVEAMNWLKSAAKLLAAEVKDKKTDTVLRGRCAVHWVTPDGFPVWQEYKKPIQTRLNLMFLGQFRLQPTINTNKDSEIDAHKQESGIAPNFVHSQDGNHLRMTVVWAHEKYGIESFALIHDSFGTIPADAANLFKAVRETMVSTYESCDVLADFYDQFADQLHESQLDKMPALPAKGNLNLRDILKSDFAFA

SEQ ID NO: 327 - DNA, 2670 bp, synthetic construct
  misc_feature 1..2670: note = Variant of RNA polymerase
  source 1..2670: mol_type = other DNA
atgcaccatcaccatcaccatatgaacacgattaacatcgctaagaacgacttctctgacatcgaactggctgctatcccgttcaacactctggctgaccattacggtgagcgtttagctcgcgaacagttggcccttgagcatgagtcttacgagatgggtgaagcacgcttccgcaagatgtttgagcgtcaacttaaagctggtgaggttgcggataacgctgccgccaagcctctcatcactaccctactccctaagatgattgcacgcatcaacgactggtttgaggaagtgaaagctaagcgcggcaagcgcccgacagccttccagttcctgcaagaaatcaagccggaagccgtagcgtacatcaccattaagaccactctggcttgcctaaccagtgcggacaatacaaccgttcaggctgtagcaagcgcaatcggtcgggccattgaggacgaggctcgcttcggtcgtatccgtgaccttgaagctaagcacttcaagaaaaacgttgaggaacaactcaacaagcgcgtagggcacgtctacaagaaagcatttgctcaagttgtcgaggctgacatgctctctaagggtctactcggtggcgaggcgtggtcttcgtggcataaggaagactctattcatgtaggagtacgctgcatcgagatgctcattgagtcaaccggaatggttagcttacaccgccaaaatgctggcgtagtaggtcaagactctgagactatcgaactcgcacctgaatacgctgaggctatcgcaacccgtgcaggtgcgctggctggcatctctccgatgttccaaccttgcgtagttcctcctaagccgtggactggcattactggtggtggctattgggctgcggggcgcaaacccctgcagttagtacgtactcgcagtctggcggcgcttcgccgctatgaagaagtgtcgatgccggaggtcatcaaagcagtcaacattgcgcagaatacagcatggcgtgtgaacaagaaagttctcgacgtagcgaatgcaatcacccaatggcagcactgtccagtcgcggatgtgcctgcgatggatcgtggcgaaatgccagctcgtccgttggacatcgataccaacgagattgcacttaaagcgtggaagaaagaagcttccgcgttctaccgcaaagacaaagcacgcgttagccgtcgtctgtcaatggagtttatgttatctcaggcgaacaagtttgcgaattataaagcaatctggtttccgcaaaacatggattggcgtgggcgcgtgtacgctgtcccgatgttcaatcctcagggcaacgatatgacgaaaggcctgctgacctttgcgcagggtaaacccattggtgaagacggcttctattggctcaagattcatggcgcaaatacagctggagtggataaagtaccgtttccacaacgcatcaaatttgttgaggataaccatacgaatattatggaatgcgcgaaagcaccgctggaaaacacttggtgggcggaacaggactcgccgttctgttttctggcgttctgctttgagtatgctggcgtcatcaatcacggtctgtcgtacaactgtagcttgcctctggcatttgatggtagttgctccggcattcaacatttctcagcgatgttacgcgacgaaattggcggcaaagctgtgaatctcctcccatctgcggaagtgcaggatatttatcgtatcgtcagcgacaaagttaacgaggtactgaaacaagatctgattaacggtacctctaccaccttggaaacggtgactgataagaagacaggcgaaattaccgaacgcacgaaatacgggaccaaagttatggcacagtggtggttagaacacggtgtgaatcgtggcgtcacgaaacgctcggttatgactttggtgtatgggagcaaagagtttggattccgcgatcaagtgctgagtgacaccattcaaccggcgatcgataacggcaaaggtgacatgtttctgaatccgaatcaggctgctggttacatggcgaaactgatctggaacgcagtgtccgtcaccgtagtcgcagcagttgaggcgatgaactggctgaaaagtgcggcgaaattacttgctgctgaagtgaaggataagaagacggatacagttctgcgtggccgctgcgcagtacattgggtgactcccgacggcttccctgtgtggcaggaatacaagaagcctattcagacgcgcttgaacctgatgttcctcggtcagttccgcttacagcctaccattaacaccaacaaagatagcgagattgatgcacacaaacaggagtctggtatcgctcctaactttgtacacagccaagacggtaaccaccttcgtatgactgtagtgtgggcacacgagaagtacggaatcgaatcttttgcactgattcacgactccttcggtaccattccggctgacgctgcgaacctgttcaaagcagtgcgcgaaactatggtttcgacatatgagtcttgtgatgtactggctgatttctacgaccagttcgctgaccagttgcacgagtctcaattggacaaaatgccagcacttccggctaaaggtaacttgaacctccgtgacatcttaaaatcggacttcgcgttcgcg

SEQ ID NO: 328 - protein, 890 aa, synthetic construct
  REGION 1..890: note = Variant of RNA polymerase
MHHHHHHMNTINIAKNDFSDIELAAIPFNTLADHYGERLAREQLALEHESYEMGEARFRKMFERQLKAGEVADNAAAKPLITTLLPKMIARINDWFEEVKAKRGKRPTAFQFLQEIKPEAVAYITIKTTLACLTSADNTTVQAVASAIGRAIEDEARFGRIRDLEAKHFKKNVEEQLNKRVGHVYKKAFAQVVEADMLSKGLLGGEAWSSWHKEDSIHVGVRCIEMLIESTGMVSLHRQNAGVVGQDSETIELAPEYAEAIATRAGALAGISPMFQPCVVPPKPWTGITGGGYWAAGRKPLQLVRTRSLAALRRYEEVSMPEVIKAVNIAQNTAWRVNKKVLDVANAITQWQHCPVADVPAMDRGEMPARPLDIDTNEIALKAWKKEASAFYRKDKARVSRRLSMEFMLSQANKFANYKAIWFPQNMDWRGRVYAVPMFNPQGNDMTKGLLTFAQGKPIGEDGFYWLKIHGANTAGVDKVPFPQRIKFVEDNHTNIMECAKAPLENTWWAEQDSPFCFLAFCFEYAGVINHGLSYNCSLPLAFDGSCSGIQHFSAMLRDEIGGKAVNLLPSAEVQDIYRIVSDKVNEVLKQDLINGTSTTLETVTDKKTGEITERTKYGTKVMAQWWLEHGVNRGVTKRSVMTLVYGSKEFGFRDQVLSDTIQPAIDNGKGDMFLNPNQAAGYMAKLIWNAVSVTVVAAVEAMNWLKSAAKLLAAEVKDKKTDTVLRGRCAVHWVTPDGFPVWQEYKKPIQTRLNLMFLGQFRLQPTINTNKDSEIDAHKQESGIAPNFVHSQDGNHLRMTVVWAHEKYGIESFALIHDSFGTIPADAANLFKAVRETMVSTYESCDVLADFYDQFADQLHESQLDKMPALPAKGNLNLRDILKSDFAFA

SEQ ID NO: 329 - DNA, 2670 bp, synthetic construct
  misc_feature 1..2670: note = Variant of RNA polymerase
  source 1..2670: mol_type = other DNA
atgcaccatcaccatcaccatatgaacacgattaacatcgctaagaacgacttctctgacatcgaactggctgctatcccgttcaacactctggctgaccattacggtgagcgtttagctcgcgaacagttggcccttgagcatgagtcttacgagatgggtgaagcacgcttccgcaagatgtttgagcgtcaacttaaagctggtgaggttgcggataacgctgccgccaagcctctcatcactaccctactccctaagatgattgcacgcatcaacgactggtttgaggaagtgaaagctaagcgcggcaagcgcccgacagccttccagttcctgcaagaaatcaagccggaagccgtagcgtacatcaccattaagaccactctggcttgcctaaccagtgcggacaatacaaccgttcaggctgtagcaagcgcaatcggtcgggccattgaggacgaggctcgcttcggtcgtatccgtgaccttgaagctaagcacttcaagaaaattgttgaggaacaactcaacaagcgcgtagggcacgtctacaagaaagcatttatgcaagttgtcgaggctgacatgctctctaagggtctactcggtggcgaggcgtggtcttcgtggcataaggaagactctattcatgtaggagtacgctgcatcgagatgctcattgagtcaaccggaatggttagcttacaccgccaaaatgctggcgtagtaggtcaagactctgagactatcgaactcgcacctgaatacgctgaggctatcgcaacccgtgcaggtgcgctggctggcatctctccgatgttccaaccttgcgtagttcctcctaagccgtggactggcattactggtggtggctattgggctgcggggcgcaaacccctgcagttagtacgtactcgcagtctggcggcgcttcgccgctatgaagaagtgtcgatgccggaggtcatcaaagcagtcaacattgcgcagaatacagcatggcgtgtgaacaagaaagttctcgacgtagcgaatgcaatcacccaatggcagcactgtccagtcgcggatgtgcctgcgatggatcgtggcgaaatgccagctcgtccgttggacatcgataccaacgagattgcacttaaagcgtggaagaaagaagcttccgcgttctaccgcaaagacaaagcacgcgttagccgtcgtctgtcaatggagtttatgttatctcaggcgaacaagtttgcgaattataaagcaatctggtttccgcaaaacatggattggcgtgggcgcgtgtacgctgtcccgatgttcaatcctcagggcaacgatatgacgaaaggcctgctgacctttgcgcagggtaaacccattggtgaagacggcttctattggctcaagattcatggcgcaaatacagctggagtggataaagtaccgtttccacaacgcatcaaatttgttgaggataaccatacgaatattatggaatgcgcgaaagcaccgctggaaaacacttggtgggcggaacaggactcgccgttctgttttctggcgttctgctttgagtatgctggcgtcatcaatcacggtctgtcgtacaactgtagcttgcctctggcatttgatggtagttgctccggcattcaacatttctcagcgatgttacgcgacgaaattggcggcaaagctgtgaatctcctcccatctgcggaagtgcaggatatttatcgtatcgtcagcgacaaagttaacgaggtactgaaacaagatctgattaacggtacctctaccaccttggaaacggtgactgataagaagacaggcgaaattaccgaacgcacgaaatacgggaccaaagttatggcacagtggtggttagaacacggtgtgaatcgtggcgtcacgaaacgctcggttatgactttggtgtatgggagcaaagagtttggattccgcgatcaagtgctgagtgacaccattcaaccggcgatcgataacggcaaaggtgacatgtttctgaatccgaatcaggctgctggttacatggcgaaactgatctggaacgcagtgtccgtcaccgtagtcgcagcagttgaggcgatgaactggctgaaaagtgcggcgaaattacttgctgctgaagtgaaggataagaagacggatacagttctgcgtggccgctgcgcagtacattgggtgactcccgacggcttccctgtgtggcaggaatacaagaagcctattcagacgcgcttgaacctgatgttcctcggtcagttccgcttacagcctaccattaacaccaacaaagatagcgagattgatgcacacaaacaggagtctggtatcgctcctaactttgtacacagccaagacggtaaccaccttcgtatgactgtagtgtgggcacacgagaagtacggaatcgaatcttttgcactgattcacgactccttcggtaccattccggctgacgctgcgaacctgttcaaagcagtgcgcgaaactatggtttcgacatatgagtcttgtgatgtactggctgatttctacgaccagttcgctgaccagttgcacgagtctcaattggacaaaatgccagcacttccggctaaaggtaacttgaacctccgtgacatcttaaaatcggacttcgcgttcgcg

SEQ ID NO: 330 - protein, 890 aa, synthetic construct
  REGION 1..890: note = Variant of RNA polymerase
MHHHHHHMNTINIAKNDFSDIELAAIPFNTLADHYGERLAREQLALEHESYEMGEARFRKMFERQLKAGEVADNAAAKPLITTLLPKMIARINDWFEEVKAKRGKRPTAFQFLQEIKPEAVAYITIKTTLACLTSADNTTVQAVASAIGRAIEDEARFGRIRDLEAKHFKKIVEEQLNKRVGHVYKKAFMQVVEADMLSKGLLGGEAWSSWHKEDSIHVGVRCIEMLIESTGMVSLHRQNAGVVGQDSETIELAPEYAEAIATRAGALAGISPMFQPCVVPPKPWTGITGGGYWAAGRKPLQLVRTRSLAALRRYEEVSMPEVIKAVNIAQNTAWRVNKKVLDVANAITQWQHCPVADVPAMDRGEMPARPLDIDTNEIALKAWKKEASAFYRKDKARVSRRLSMEFMLSQANKFANYKAIWFPQNMDWRGRVYAVPMFNPQGNDMTKGLLTFAQGKPIGEDGFYWLKIHGANTAGVDKVPFPQRIKFVEDNHTNIMECAKAPLENTWWAEQDSPFCFLAFCFEYAGVINHGLSYNCSLPLAFDGSCSGIQHFSAMLRDEIGGKAVNLLPSAEVQDIYRIVSDKVNEVLKQDLINGTSTTLETVTDKKTGEITERTKYGTKVMAQWWLEHGVNRGVTKRSVMTLVYGSKEFGFRDQVLSDTIQPAIDNGKGDMFLNPNQAAGYMAKLIWNAVSVTVVAAVEAMNWLKSAAKLLAAEVKDKKTDTVLRGRCAVHWVTPDGFPVWQEYKKPIQTRLNLMFLGQFRLQPTINTNKDSEIDAHKQESGIAPNFVHSQDGNHLRMTVVWAHEKYGIESFALIHDSFGTIPADAANLFKAVRETMVSTYESCDVLADFYDQFADQLHESQLDKMPALPAKGNLNLRDILKSDFAFA

SEQ ID NO: 331 - DNA, 2670 bp, synthetic construct
  misc_feature 1..2670: note = Variant of RNA polymerase
  source 1..2670: mol_type = other DNA
atgcaccatcaccatcaccatatgaacacgattaacatcgctaagaacgacttctctgacatcgaactggctgctatcccgttcaacactctggctgaccattacggtgagcgtttagctcgcgaacagttggcccttgagcatgagtcttacgagatgggtgaagcacgcttccgcaagatgtttgagcgtcaacttaaagctggtgaggttgcggataacgctgccgccaagcctctcatcactaccctactccctaagatgattgcacgcatcaacgactggtttgaggaagtgaaagctaagcgcggcaagcgcccgacagccttccagttcctgcaagaaatcaagccggaagccgtagcgtacatcaccattaagaccactctggcttgcctaaccagtgcggacaatacaaccgttcaggctgtagcaagcgcaatcggtcgggccattgaggacgaggctcgcttcggtcgtatccgtgaccttgaagctaagcacttcaagaaaaacgttgaggaacaactcaacaagcgcgtagggcacgtctacaagaaagcatttatgcaagttgtcgaggctgactggctctctaagggtctactcggtggcgaggcgtggtcttcgtggcataaggaagactctattcatgtaggagtacgctgcatcgagatgctcattgagtcaaccggaatggttagcttacaccgccaaaatgctggcgtagtaggtcaagactctgagactatcgaactcgcacctgaatacgctgaggctatcgcaacccgtgcaggtgcgctggctggcatctctccgatgttccaaccttgcgtagttcctcctaagccgtggactggcattactggtggtggctattgggctgcggggcgcaaacccctgcagttagtacgtactcgcagtctggcggcgcttcgccgctatgaagaagtgtcgatgccggaggtcatcaaagcagtcaacattgcgcagaatacagcatggcgtgtgaacaagaaagttctcgacgtagcgaatgcaatcacccaatggcagcactgtccagtcgcggatgtgcctgcgatggatcgtggcgaaatgccagctcgtccgttggacatcgataccaacgagattgcacttaaagcgtggaagaaagaagcttccgcgttctaccgcaaagacaaagcacgcgttagccgtcgtctgtcaatggagtttatgttatctcaggcgaacaagtttgcgaattataaagcaatctggtttccgcaaaacatggattggcgtgggcgcgtgtacgctgtcccgatgttcaatcctcagggcaacgatatgacgaaaggcctgctgacctttgcgcagggtaaacccattggtgaagacggcttctattggctcaagattcatggcgcaaatacagctggagtggataaagtaccgtttccacaacgcatcaaatttgttgaggataaccatacgaatattatggaatgcgcgaaagcaccgctggaaaacacttggtgggcggaacaggactcgccgttctgttttctggcgttctgctttgagtatgctggcgtcatcaatcacggtctgtcgtacaactgtagcttgcctctggcatttgatggtagttgctccggcattcaacatttctcagcgatgttacgcgacgaaattggcggcaaagctgtgaatctcctcccatctgcggaagtgcaggatatttatcgtatcgtcagcgacaaagttaacgaggtactgaaacaagatctgattaacggtacctctaccaccttggaaacggtgactgataagaagacaggcgaaattaccgaacgcacgaaatacgggaccaaagttatggcacagtggtggttagaacacggtgtgaatcgtggcgtcacgaaacgctcggttatgactttggtgtatgggagcaaagagtttggattccgcgatcaagtgctgagtgacaccattcaaccggcgatcgataacggcaaaggtgacatgtttctgaatccgaatcaggctgctggttacatggcgaaactgatctggaacgcagtgtccgtcaccgtagtcgcagcagttgaggcgatgaactggctgaaaagtgcggcgaaattacttgctgctgaagtgaaggataagaagacggatacagttctgcgtggccgctgcgcagtacattgggtgactcccgacggcttccctgtgtggcaggaatacaagaagcctattcagacgcgcttgaacctgatgttcctcggtcagttccgcttacagcctaccattaacaccaacaaagatagcgagattgatgcacacaaacaggagtctggtatcgctcctaactttgtacacagccaagacggtaaccaccttcgtatgactgtagtgtgggcacacgagaagtacggaatcgaatcttttgcactgattcacgactccttcggtaccattccggctgacgctgcgaacctgttcaaagcagtgcgcgaaactatggtttcgacatatgagtcttgtgatgtactggctgatttctacgaccagttcgctgaccagttgcacgagtctcaattggacaaaatgccagcacttccggctaaaggtaacttgaacctccgtgacatcttaaaatcggacttcgcgttcgcg

SEQ ID NO: 332 - protein, 890 aa, synthetic construct
  REGION 1..890: note = Variant of RNA polymerase
MHHHHHHMNTINIAKNDFSDIELAAIPFNTLADHYGERLAREQLALEHESYEMGEARFRKMFERQLKAGEVADNAAAKPLITTLLPKMIARINDWFEEVKAKRGKRPTAFQFLQEIKPEAVAYITIKTTLACLTSADNTTVQAVASAIGRAIEDEARFGRIRDLEAKHFKKNVEEQLNKRVGHVYKKAFMQVVEADWLSKGLLGGEAWSSWHKEDSIHVGVRCIEMLIESTGMVSLHRQNAGVVGQDSETIELAPEYAEAIATRAGALAGISPMFQPCVVPPKPWTGITGGGYWAAGRKPLQLVRTRSLAALRRYEEVSMPEVIKAVNIAQNTAWRVNKKVLDVANAITQWQHCPVADVPAMDRGEMPARPLDIDTNEIALKAWKKEASAFYRKDKARVSRRLSMEFMLSQANKFANYKAIWFPQNMDWRGRVYAVPMFNPQGNDMTKGLLTFAQGKPIGEDGFYWLKIHGANTAGVDKVPFPQRIKFVEDNHTNIMECAKAPLENTWWAEQDSPFCFLAFCFEYAGVINHGLSYNCSLPLAFDGSCSGIQHFSAMLRDEIGGKAVNLLPSAEVQDIYRIVSDKVNEVLKQDLINGTSTTLETVTDKKTGEITERTKYGTKVMAQWWLEHGVNRGVTKRSVMTLVYGSKEFGFRDQVLSDTIQPAIDNGKGDMFLNPNQAAGYMAKLIWNAVSVTVVAAVEAMNWLKSAAKLLAAEVKDKKTDTVLRGRCAVHWVTPDGFPVWQEYKKPIQTRLNLMFLGQFRLQPTINTNKDSEIDAHKQESGIAPNFVHSQDGNHLRMTVVWAHEKYGIESFALIHDSFGTIPADAANLFKAVRETMVSTYESCDVLADFYDQFADQLHESQLDKMPALPAKGNLNLRDILKSDFAFA

SEQ ID NO: 333 - DNA, 2670 bp, synthetic construct
  misc_feature 1..2670: note = Variant of RNA polymerase
  source 1..2670: mol_type = other DNA
atgcaccatcaccatcaccatatgaacacgattaacatcgctaagaacgacttctctgacatcgaactggctgctatcccgttcaacactctggctgaccattacggtgagcgtttagctcgcgaacagttggcccttgagcatgagtcttacgagatgggtgaagcacgcttccgcaagatgtttgagcgtcaacttaaagctggtgaggttgcggataacgctgccgccaagcctctcatcactaccctactccctaagatgattgcacgcatcaacgactggtttgaggaagtgaaagctaagcgcggcaagcgcccgacagccttccagttcctgcaagaaatcaagccggaagccgtagcgtacatcaccattaagaccactctggcttgcctaaccagtgcggacaatacaaccgttcaggctgtagcaagcgcaatcggtcgggccattgaggacgaggctcgcttcggtcgtgtgcgtgaccttgaagctaagcacttcaagaaaaacgttgaggaacaactcaacaagcgcgtagggcacgtctacaagaaagcatttatgcaagttgtcgaggctgacatgctctctaagggtctactcggtggcgaggcgtggtcttcgtggcataaggaagactctattcatgtaggagtacgctgcatcgagatgctcattgagtcaaccggaatggttagcttacaccgccaaaatgctggcgtagtaggtcaagactctgagactatcgaactcgcacctgaatacgctgaggctatcgcaacccgtgcaggtgcgctggctggcatctctccgatgttccaaccttgcgtagttcctcctaagccgtggactggcattactggtggtggctattgggctgcggggcgcaaacccctgcagttagtacgtactcgcagtctggcggcgcttcgccgctatgaagaagtgtcgatgccggaggtcatcaaagcagtcaacattgcgcagaatacagcatggcgtgtgaacaagaaagttctcgacgtagcgaatgcaatcacccaatggcagcactgtccagtcgcggatgtgcctgcgatggatcgtggcgaaatgccagctcgtccgttggacatcgataccaacgagattgcacttaaagcgtggaagaaagaagcttccgcgttctaccgcaaagacaaagcacgcgttagccgtcgtctgtcaatggagtttatgttatctcaggcgaacaagtttgcgaattataaagcaatctggtttccgcaaaacatggattggcgtgggcgcgtgtacgctgtcccgatgttcaatcctcagggcaacgatatgacgaaaggcctgctgacctttgcgcagggtaaacccattggtgaagacggcttctattggctcaagattcatggcgcaaatacagctggagtggataaagtaccgtttccacaacgcatcaaatttgttgaggataaccatacgaatattatggaatgcgcgaaagcaccgctggaaaacacttggtgggcggaacaggactcgccgttctgttttctggcgttctgctttgagtatgctggcgtcatcaatcacggtctgtcgtacaactgtagcttgcctctggcatttgatggtagttgctccggcattcaacatttctcagcgatgttacgcgacgaaattggcggcaaagctgtgaatctcctcccatctgcggaagtgcaggatatttatcgtatcgtcagcgacaaagttaacgaggtactgaaacaagatctgattaacggtacctctaccaccttggaaacggtgactgataagaagacaggcgaaattaccgaacgcacgaaatacgggaccaaagttatggcacagtggtggttagaacacggtgtgaatcgtggcgtcacgaaacgctcggttatgactttggtgtatgggagcaaagagtttggattccgcgatcaagtgctgagtgacaccattcaaccggcgatcgataacggcaaaggtgacatgtttctgaatccgaatcaggctgctggttacatggcgaaactgatctggaacgcagtgtccgtcaccgtagtcgcagcagttgaggcgatgaactggctgaaaagtgcggcgaaattacttgctgctgaagtgaaggataagaagacggatacagttctgcgtggccgctgcgcagtacattgggtgactcccgacggcttccctgtgtggcaggaatacaagaagcctattcagacgcgcttgaacctgatgttcctcggtcagttccgcttacagcctaccattaacaccaacaaagatagcgagattgatgcacacaaacaggagtctggtatcgctcctaactttgtacacagccaagacggtaaccaccttcgtatgactgtagtgtgggcacacgagaagtacggaatcgaatcttttgcactgattcacgactccttcggtaccattccggctgacgctgcgaacctgttcaaagcagtgcgcgaaactatggtttcgacatatgagtcttgtgatgtactggctgatttctacgaccagttcgctgaccagttgcacgagtctcaattggacaaaatgccagcacttccggctaaaggtaacttgaacctccgtgacatcttaaaatcggacttcgcgttcgcg

SEQ ID NO: 334 - protein, 890 aa, synthetic construct
  REGION 1..890: note = Variant of RNA polymerase
MHHHHHHMNTINIAKNDFSDIELAAIPFNTLADHYGERLAREQLALEHESYEMGEARFRKMFERQLKAGEVADNAAAKPLITTLLPKMIARINDWFEEVKAKRGKRPTAFQFLQEIKPEAVAYITIKTTLACLTSADNTTVQAVASAIGRAIEDEARFGRVRDLEAKHFKKNVEEQLNKRVGHVYKKAFMQVVEADMLSKGLLGGEAWSSWHKEDSIHVGVRCIEMLIESTGMVSLHRQNAGVVGQDSETIELAPEYAEAIATRAGALAGISPMFQPCVVPPKPWTGITGGGYWAAGRKPLQLVRTRSLAALRRYEEVSMPEVIKAVNIAQNTAWRVNKKVLDVANAITQWQHCPVADVPAMDRGEMPARPLDIDTNEIALKAWKKEASAFYRKDKARVSRRLSMEFMLSQANKFANYKAIWFPQNMDWRGRVYAVPMFNPQGNDMTKGLLTFAQGKPIGEDGFYWLKIHGANTAGVDKVPFPQRIKFVEDNHTNIMECAKAPLENTWWAEQDSPFCFLAFCFEYAGVINHGLSYNCSLPLAFDGSCSGIQHFSAMLRDEIGGKAVNLLPSAEVQDIYRIVSDKVNEVLKQDLINGTSTTLETVTDKKTGEITERTKYGTKVMAQWWLEHGVNRGVTKRSVMTLVYGSKEFGFRDQVLSDTIQPAIDNGKGDMFLNPNQAAGYMAKLIWNAVSVTVVAAVEAMNWLKSAAKLLAAEVKDKKTDTVLRGRCAVHWVTPDGFPVWQEYKKPIQTRLNLMFLGQFRLQPTINTNKDSEIDAHKQESGIAPNFVHSQDGNHLRMTVVWAHEKYGIESFALIHDSFGTIPADAANLFKAVRETMVSTYESCDVLADFYDQFADQLHESQLDKMPALPAKGNLNLRDILKSDFAFA

SEQ ID NO: 335 - DNA, 2670 bp, synthetic construct
  misc_feature 1..2670: note = Variant of RNA polymerase
  source 1..2670: mol_type = other DNA
atgcaccatcaccatcaccatatgaacacgattaacatcgctaagaacgacttctctgacatcgaactggctgctatcccgttcaacactctggctgaccattacggtgagcgtttagctcgcgaacagttggcccttgagcatgagtcttacgagatgggtgaagcacgcttccgcaagatgtttgagcgtcaacttaaagctggtgaggttgcggataacgctgccgccaagcctctcatcactaccctactccctaagatgattgcacgcatcaacgactggtttgaggaagtgaaagctaagcgcggcaagcgcccgacagccttccagttcctgcaagaaatcaagccggaagccgtagcgtacatcaccattaagaccactctggcttgcctaaccagtgcggacaatacaaccgttcaggctgtagcaagcgcaatcggtcgggccattgaggacgaggctcgcttcggtcgtatccgtgaccttgaagctaagcacttcaagaaaaacgttgaggaacaactcaacaagcgcgtagggcacgtctacaagaaagcatttatgcaagttcttgaggctgacatgctctctaagggtctactcggtggcgaggcgtggtcttcgtggcataaggaagactctattcatgtaggagtacgctgcatcgagatgctcattgagtcaaccggaatggttagcttacaccgccaaaatgctggcgtagtaggtcaagactctgagactatcgaactcgcacctgaatacgctgaggctatcgcaacccgtgcaggtgcgctggctggcatctctccgatgttccaaccttgcgtagttcctcctaagccgtggactggcattactggtggtggctattgggctgcggggcgcaaacccctgcagttagtacgtactcgcagtctggcggcgcttcgccgctatgaagaagtgtcgatgccggaggtcatcaaagcagtcaacattgcgcagaatacagcatggcgtgtgaacaagaaagttctcgacgtagcgaatgcaatcacccaatggcagcactgtccagtcgcggatgtgcctgcgatggatcgtggcgaaatgccagctcgtccgttggacatcgataccaacgagattgcacttaaagcgtggaagaaagaagcttccgcgttctaccgcaaagacaaagcacgcgttagccgtcgtctgtcaatggagtttatgttatctcaggcgaacaagtttgcgaattataaagcaatctggtttccgcaaaacatggattggcgtgggcgcgtgtacgctgtcccgatgttcaatcctcagggcaacgatatgacgaaaggcctgctgacctttgcgcagggtaaacccattggtgaagacggcttctattggctcaagattcatggcgcaaatacagctggagtggataaagtaccgtttccacaacgcatcaaatttgttgaggataaccatacgaatattatggaatgcgcgaaagcaccgctggaaaacacttggtgggcggaacaggactcgccgttctgttttctggcgttctgctttgagtatgctggcgtcatcaatcacggtctgtcgtacaactgtagcttgcctctggcatttgatggtagttgctccggcattcaacatttctcagcgatgttacgcgacgaaattggcggcaaagctgtgaatctcctcccatctgcggaagtgcaggatatttatcgtatcgtcagcgacaaagttaacgaggtactgaaacaagatctgattaacggtacctctaccaccttggaaacggtgactgataagaagacaggcgaaattaccgaacgcacgaaatacgggaccaaagttatggcacagtggtggttagaacacggtgtgaatcgtggcgtcacgaaacgctcggttatgactttggtgtatgggagcaaagagtttggattccgcgatcaagtgctgagtgacaccattcaaccggcgatcgataacggcaaaggtgacatgtttctgaatccgaatcaggctgctggttacatggcgaaactgatctggaacgcagtgtccgtcaccgtagtcgcagcagttgaggcgatgaactggctgaaaagtgcggcgaaattacttgctgctgaagtgaaggataagaagacggatacagttctgcgtggccgctgcgcagtacattgggtgactcccgacggcttccctgtgtggcaggaatacaagaagcctattcagacgcgcttgaacctgatgttcctcggtcagttccgcttacagcctaccattaacaccaacaaagatagcgagattgatgcacacaaacaggagtctggtatcgctcctaactttgtacacagccaagacggtaaccaccttcgtatgactgtagtgtgggcacacgagaagtacggaatcgaatcttttgcactgattcacgactccttcggtaccattccggctgacgctgcgaacctgttcaaagcagtgcgcgaaactatggtttcgacatatgagtcttgtgatgtactggctgatttctacgaccagttcgctgaccagttgcacgagtctcaattggacaaaatgccagcacttccggctaaaggtaacttgaacctccgtgacatcttaaaatcggacttcgcgttcgcg

SEQ ID NO: 336 - protein, 890 aa, synthetic construct
  REGION 1..890: note = Variant of RNA polymerase
MHHHHHHMNTINIAKNDFSDIELAAIPFNTLADHYGERLAREQLALEHESYEMGEARFRKMFERQLKAGEVADNAAAKPLITTLLPKMIARINDWFEEVKAKRGKRPTAFQFLQEIKPEAVAYITIKTTLACLTSADNTTVQAVASAIGRAIEDEARFGRIRDLEAKHFKKNVEEQLNKRVGHVYKKAFMQVLEADMLSKGLLGGEAWSSWHKEDSIHVGVRCIEMLIESTGMVSLHRQNAGVVGQDSETIELAPEYAEAIATRAGALAGISPMFQPCVVPPKPWTGITGGGYWAAGRKPLQLVRTRSLAALRRYEEVSMPEVIKAVNIAQNTAWRVNKKVLDVANAITQWQHCPVADVPAMDRGEMPARPLDIDTNEIALKAWKKEASAFYRKDKARVSRRLSMEFMLSQANKFANYKAIWFPQNMDWRGRVYAVPMFNPQGNDMTKGLLTFAQGKPIGEDGFYWLKIHGANTAGVDKVPFPQRIKFVEDNHTNIMECAKAPLENTWWAEQDSPFCFLAFCFEYAGVINHGLSYNCSLPLAFDGSCSGIQHFSAMLRDEIGGKAVNLLPSAEVQDIYRIVSDKVNEVLKQDLINGTSTTLETVTDKKTGEITERTKYGTKVMAQWWLEHGVNRGVTKRSVMTLVYGSKEFGFRDQVLSDTIQPAIDNGKGDMFLNPNQAAGYMAKLIWNAVSVTVVAAVEAMNWLKSAAKLLAAEVKDKKTDTVLRGRCAVHWVTPDGFPVWQEYKKPIQTRLNLMFLGQFRLQPTINTNKDSEIDAHKQESGIAPNFVHSQDGNHLRMTVVWAHEKYGIESFALIHDSFGTIPADAANLFKAVRETMVSTYESCDVLADFYDQFADQLHESQLDKMPALPAKGNLNLRDILKSDFAFA

SEQ ID NO: 337 - DNA, 2670 bp, synthetic construct
  misc_feature 1..2670: note = Variant of RNA polymerase
  source 1..2670: mol_type = other DNA
atgcaccatcaccatcaccatatgaacacgattaacatcgctaagaacgacttctctgacatcgaactggctgctatcccgttcaacactctggctgaccattacggtgagcgtttagctcgcgaacagttggcccttgagcatgagtcttacgagatgggtgaagcacgcttccgcaagatgtttgagcgtcaacttaaagctggtgaggttgcggataacgctgccgccaagcctctcatcactaccctactccctaagatgattgcacgcatcaacgactggtttgaggaagtgaaagctaagcgcggcaagcgcccgacagccttccagttcctgcaagaaatcaagccggaagccgtagcgtacatcaccattaagaccactctggcttgcctaaccagtgcggacaatacaaccgttcaggctgtagcaagcgcaatcggtcgggccattgaggacgaggctcgcttcggtcgtatccgtgaccttgaagctaagcacttcaagaaaaacgttgaggaacaactcaacaagcgcgtagggcacgtctacaagaaagcatttatgcaagttgtcgaggctgacatgctctctaagggtctactcggtggcgaggcgtggtcttcgtggcataaggaagactctattcatgtaggagtacgctgcatcgagatgctcattgagtcaaccggaatggttagcttacaccgccaaaatgctggcgtagtaggtcaagactctgagactatcgaactcgcacctgaatacgctgaggctatcgcaacccgtgcaggtgcgctggctggcatctctccgatgttccaaccttgcgtagttcctcctaagccgtggactggcattactggtggtggctattgggctgcggggcgcaaacccctgcagttagtacgtactcgcagtctggcggcgcttcgccgctatgaagaagtgtcgatgccggaggtcatcaaagcagtcaacattgcgcagaatacagcatggcgtgtgaacaagaaagttctcgacgtagcgaatgcaatcacccaatggcagcactgtccagtcgcggatgtgcctgcgatggatcgtggcgaaatgccagctcgtccgttggacatcgataccaacgagattgcacttaaagcgtggaagaaagaagcttccgcgttctaccgcaaagacaaagcacgcgttagccgtcgtctgtcaatggagtttatgttatctcaggcgaacaagtttgcgaattataaagcaatctggtttccgcaaaacatggattggcgtgggcgcgtgtacgctgtcccgatgttcaatcctcagggcaacgatatgacgaaaggcctgctgacctttgcgcagggtaaacccattggtgaagacggcttctattggctcaagattcatggcgcaaatacagctggagtggataaagtaccgtttccacaacgcatcaaatttgttgaggataaccatacgaatattatggaatgcgcgaaagcaccgctggaaaacacttggtgggcggaacaggactcgccgttctgttttctggcgttctgctttgagtatgctggcgtcatcaatcacggtctgtcgtacaactgtagcttgcctctggcatttgatggtagttgctccggcattcaacatttctcagcgatgttacgcgacgaaattggcggcaaagctgtgaatctcctcccatctgcggaagtgcaggatatttatcgtatcgtcagcgacaaagttaacgagaatctgaaacaagatctgattaacggtacctctaccaccttggaaacggtgactgataagaagacaggcgaaattaccgaacgcacgaaatacgggaccaaagttatggcacagtggtggttagaacacggtgtgaatcgtggcgtcacgaaacgctcggttatgactttggtgtatgggagcaaagagtttggattccgcgatcaagtgctgagtgacaccattcaaccggcgatcgataacggcaaaggtgacatgtttctgaatccgaatcaggctgctggttacatggcgaaactgatctggaacgcagtgtccgtcaccgtagtcgcagcagttgaggcgatgaactggctgaaaagtgcggcgaaattacttgctgctgaagtgaaggataagaagacggatacagttctgcgtggccgctgcgcagtacattgggtgactcccgacggcttccctgtgtggcaggaatacaagaagcctattcagacgcgcttgaacctgatgttcctcggtcagttccgcttacagcctaccattaacaccaacaaagatagcgagattgatgcacacaaacaggagtctggtatcgctcctaactttgtacacagccaagacggtaaccaccttcgtatgactgtagtgtgggcacacgagaagtacggaatcgaatcttttgcactgattcacgactccttcggtaccattccggctgacgctgcgaacctgttcaaagcagtgcgcgaaactatggtttcgacatatgagtcttgtgatgtactggctgatttctacgaccagttcgctgaccagttgcacgagtctcaattggacaaaatgccagcacttccggctaaaggtaacttgaacctccgtgacatcttaaaatcggacttcgcgttcgcg

SEQ ID NO: 338 - protein, 890 aa, synthetic construct
  REGION 1..890: note = Variant of RNA polymerase
MHHHHHHMNTINIAKNDFSDIELAAIPFNTLADHYGERLAREQLALEHESYEMGEARFRKMFERQLKAGEVADNAAAKPLITTLLPKMIARINDWFEEVKAKRGKRPTAFQFLQEIKPEAVAYITIKTTLACLTSADNTTVQAVASAIGRAIEDEARFGRIRDLEAKHFKKNVEEQLNKRVGHVYKKAFMQVVEADMLSKGLLGGEAWSSWHKEDSIHVGVRCIEMLIESTGMVSLHRQNAGVVGQDSETIELAPEYAEAIATRAGALAGISPMFQPCVVPPKPWTGITGGGYWAAGRKPLQLVRTRSLAALRRYEEVSMPEVIKAVNIAQNTAWRVNKKVLDVANAITQWQHCPVADVPAMDRGEMPARPLDIDTNEIALKAWKKEASAFYRKDKARVSRRLSMEFMLSQANKFANYKAIWFPQNMDWRGRVYAVPMFNPQGNDMTKGLLTFAQGKPIGEDGFYWLKIHGANTAGVDKVPFPQRIKFVEDNHTNIMECAKAPLENTWWAEQDSPFCFLAFCFEYAGVINHGLSYNCSLPLAFDGSCSGIQHFSAMLRDEIGGKAVNLLPSAEVQDIYRIVSDKVNENLKQDLINGTSTTLETVTDKKTGEITERTKYGTKVMAQWWLEHGVNRGVTKRSVMTLVYGSKEFGFRDQVLSDTIQPAIDNGKGDMFLNPNQAAGYMAKLIWNAVSVTVVAAVEAMNWLKSAAKLLAAEVKDKKTDTVLRGRCAVHWVTPDGFPVWQEYKKPIQTRLNLMFLGQFRLQPTINTNKDSEIDAHKQESGIAPNFVHSQDGNHLRMTVVWAHEKYGIESFALIHDSFGTIPADAANLFKAVRETMVSTYESCDVLADFYDQFADQLHESQLDKMPALPAKGNLNLRDILKSDFAFA

SEQ ID NO: 339 - DNA, 2670 bp, synthetic construct
  misc_feature 1..2670: note = Variant of RNA polymerase
  source 1..2670: mol_type = other DNA
atgcaccatcaccatcaccatatgaacacgattaacatcgctaagaacgacttctctgacatcgaactggctgctatcccgttcaacactctggctgaccattacggtgagcgtttagctcgcgaacagttggcccttgagcatgagtcttacgagatgggtgaagcacgcttccgcaagatgtttgagcgtcaacttaaagctggtgaggttgcggataacgctgccgccaagcctctcatcactaccctactccctaagatgattgcacgcatcaacgactggtttgaggaagtgaaagctaagcgcggcaagcgcccgacagccttccagttcctgcaagaaatcaagccggaagccgtagcgtacatcaccattaagaccactctggcttgcctaaccagtgcggacaatacaaccgttcaggctgtagcaagcgcaatcggtcgggccattgaggacgaggctcgcttcggtcgtatccgtgaccttgaagctaagcacttcaagaaaaacgttgaggaacaactcaacaagcgcgtagggcacgtctacaagaaagcatttatgcaagttgtcgaggctgacatgctctctaagggtctactcggtggcgaggcgtggtcttcgtggcataaggaagactctattcatgtaggagtacgctgcatcgagatgctcattgagtcaaccggaatggttagcttacaccgccaaaatgctggcgtagtaggtcaagactctgagactatcgaactcgcacctgaatacgctgaggctatcgcaacccgtgcaggtgcgctggctggcatctctccgatgttccaaccttgcgtagttcctcctaagccgtggactggcattactggtggtggctattgggctgcggggcgcaaacccctgcagttagtacgtactcgcagtctggcggcgcttcgccgctatgaagaagtgtcgatgccggaggtcatcaaagcagtcaacattgcgcagaatacagcatggcgtgtgaacaagaaagttctcgacgtagcgaatgcaatcacccaatggcagcactgtccagtcgcggatgtgcctgcgatggatcgtggcgaaatgccagctcgtccgttggacatcgataccaacgagattgcacttaaagcgtggaagaaagaagcttccgcgttctaccgcaaagacaaagcacgcgttagccgtcgtctgtcaatggagtttatgttatctcaggcgaacaagtttgcgaattataaagcaatctggtttccgcaaaacatggattggcgtgggcgcgtgtacgctgtcccgatgttcaatcctcagggcaacgatatgacgaaaggcctgctgacctttgcgcagggtaaacccattggtgaagacggcttctattggctcaagattcatggcgcaaatacagctggagtggataaagtaccgtttccacaacgcatcaaatttgttgaggataaccatacgaatattatggaatgcgcgaaagcaccgctggaaaacacttggtgggcggaacaggactcgccgttctgttttctggcgttctgctttgagtatgctggcgtcatcaatcacggtctgtcgtacaactgtagcttgcctctggcatttgatggtagttgctccggcattcaacatttctcagcgatgttacgcgacgaaattggcggcaaagctgtgaatctcctcccatctgcggaagtgcaggatatttatcgtatcgtcagcgacaaagttaacgaggtactgaaacaagatgctattaacggtacctctaccaccttggaaacggtgactgataagaagacaggcgaaattaccgaacgcacgaaatacgggaccaaagttatggcacagtggtggttagaacacggtgtgaatcgtggcgtcacgaaacgctcggttatgactttggtgtatgggagcaaagagtttggattccgcgatcaagtgctgagtgacaccattcaaccggcgatcgataacggcaaaggtgacatgtttctgaatccgaatcaggctgctggttacatggcgaaactgatctggaacgcagtgtccgtcaccgtagtcgcagcagttgaggcgatgaactggctgaaaagtgcggcgaaattacttgctgctgaagtgaaggataagaagacggatacagttctgcgtggccgctgcgcagtacattgggtgactcccgacggcttccctgtgtggcaggaatacaagaagcctattcagacgcgcttgaacctgatgttcctcggtcagttccgcttacagcctaccattaacaccaacaaagatagcgagattgatgcacacaaacaggagtctggtatcgctcctaactttgtacacagccaagacggtaaccaccttcgtatgactgtagtgtgggcacacgagaagtacggaatcgaatcttttgcactgattcacgactccttcggtaccattccggctgacgctgcgaacctgttcaaagcagtgcgcgaaactatggtttcgacatatgagtcttgtgatgtactggctgatttctacgaccagttcgctgaccagttgcacgagtctcaattggacaaaatgccagcacttccggctaaaggtaacttgaacctccgtgacatcttaaaatcggacttcgcgttcgcg

SEQ ID NO: 340 - protein, 890 aa, synthetic construct
  REGION 1..890: note = Variant of RNA polymerase
MHHHHHHMNTINIAKNDFSDIELAAIPFNTLADHYGERLAREQLALEHESYEMGEARFRKMFERQLKAGEVADNAAAKPLITTLLPKMIARINDWFEEVKAKRGKRPTAFQFLQEIKPEAVAYITIKTTLACLTSADNTTVQAVASAIGRAIEDEARFGRIRDLEAKHFKKNVEEQLNKRVGHVYKKAFMQVVEADMLSKGLLGGEAWSSWHKEDSIHVGVRCIEMLIESTGMVSLHRQNAGVVGQDSETIELAPEYAEAIATRAGALAGISPMFQPCVVPPKPWTGITGGGYWAAGRKPLQLVRTRSLAALRRYEEVSMPEVIKAVNIAQNTAWRVNKKVLDVANAITQWQHCPVADVPAMDRGEMPARPLDIDTNEIALKAWKKEASAFYRKDKARVSRRLSMEFMLSQANKFANYKAIWFPQNMDWRGRVYAVPMFNPQGNDMTKGLLTFAQGKPIGEDGFYWLKIHGANTAGVDKVPFPQRIKFVEDNHTNIMECAKAPLENTWWAEQDSPFCFLAFCFEYAGVINHGLSYNCSLPLAFDGSCSGIQHFSAMLRDEIGGKAVNLLPSAEVQDIYRIVSDKVNEVLKQDAINGTSTTLETVTDKKTGEITERTKYGTKVMAQWWLEHGVNRGVTKRSVMTLVYGSKEFGFRDQVLSDTIQPAIDNGKGDMFLNPNQAAGYMAKLIWNAVSVTVVAAVEAMNWLKSAAKLLAAEVKDKKTDTVLRGRCAVHWVTPDGFPVWQEYKKPIQTRLNLMFLGQFRLQPTINTNKDSEIDAHKQESGIAPNFVHSQDGNHLRMTVVWAHEKYGIESFALIHDSFGTIPADAANLFKAVRETMVSTYESCDVLADFYDQFADQLHESQLDKMPALPAKGNLNLRDILKSDFAFA

SEQ ID NO: 341 - DNA, 2670 bp, synthetic construct
  misc_feature 1..2670: note = Variant of RNA polymerase
  source 1..2670: mol_type = other DNA
atgcaccatcaccatcaccatatgaacacgattaacatcgctaagaacgacttctctgacatcgaactggctgctatcccgttcaacactctggctgaccattacggtgagcgtttagctcgcgaacagttggcccttgagcatgagtcttacgagatgggtgaagcacgcttccgcaagatgtttgagcgtcaacttaaagctggtgaggttgcggataacgctgccgccaagcctctcatcactaccctactccctaagatgattgcacgcatcaacgactggtttgaggaagtgaaagctaagcgcggcaagcgcccgacagccttccagttcctgcaagaaatcaagccggaagccgtagcgtacatcaccattaagaccactctggcttgcctaaccagtgcggacaatacaaccgttcaggctgtagcaagcgcaatcggtcgggccattgaggacgaggctcgcttcggtcgtatccgtgaccttgaagctaagcacttcaagaaaaacgttgaggaacaactcaacaagcgcgtagggcacgtctacaagaaagcatttatgcaagttgtcgaggctgacatgctctctaagggtctactcggtggcgaggcgtggtcttcgtggcataaggaagactctattcatgtaggagtacgctgcatcgagatgctcattgagtcaaccggaatggttagcttacaccgccaaaatgctggcgtagtaggtcaagactctgagactatcgaactcgcacctgaatacgctgaggctatcgcaacccgtgcaggtgcgctggctggcatctctccgatgttccaaccttgcgtagttcctcctaagccgtggactggcattactggtggtggctattgggctgcggggcgcaaacccctgcagttagtacgtactcgcagtctggcggcgcttcgccgctatgaagaagtgtcgatgccggaggtcatcaaagcagtcaacattgcgcagaatacagcatggcgtgtgaacaagaaagttctcgacgtagcgaatgcaatcacccaatggcagcactgtccagtcgcggatgtgcctgcgatggatcgtggcgaaatgccagctcgtccgttggacatcgataccaacgagattgcacttaaagcgtggaagaaagaagcttccgcgttctaccgcaaagacaaagcacgcgttagccgtcgtctgtcaatggagtttatgttatctcaggcgaacaagtttgcgaattataaagcaatctggtttccgcaaaacatggattggcgtgggcgcgtgtacgctgtcccgatgttcaatcctcagggcaacgatatgacgaaaggcctgctgacctttgcgcagggtaaacccattggtgaagacggcttctattggctcaagattcatggcgcaaatacagctggagtggataaagtaccgtttccacaacgcatcaaatttgttgaggataaccatacgaatattatggaatgcgcgaaagcaccgctggaaaacacttggtgggcggaacaggactcgccgttctgttttctggcgttctgctttgagtatgctggcgtcatcaatcacggtctgtcgtacaactgtagcttgcctctggcatttgatggtagttgctccggcattcaacatttctcagcgatgttacgcgacgaaattggcggcaaagctgtgaatctcctcccatctgcggaagtgcaggatatttatcgtatcgtcagcgacaaagttaacgaggtactgaaacaagatctgattaacggtacctctaccaccttggaaacggtgactgataagaagacaggcgaaattaccgaacgcacgaaatacgggaccaaagttatggcacagtggtggttagaacacggtgtgaatcgtggcgtcacgaaacgctcggttatgactttggtgtatgggagcaaagagtttggattccgcgatcaagtgctgagtgacaccattcaaccggcgatcgatgcgggcaaaggtgacatgtttctgaatccgaatcaggctgctggttacatggcgaaactgatctggaacgcagtgtccgtcaccgtagtcgcagcagttgaggcgatgaactggctgaaaagtgcggcgaaattacttgctgctgaagtgaaggataagaagacggatacagttctgcgtggccgctgcgcagtacattgggtgactcccgacggcttccctgtgtggcaggaatacaagaagcctattcagacgcgcttgaacctgatgttcctcggtcagttccgcttacagcctaccattaacaccaacaaagatagcgagattgatgcacacaaacaggagtctggtatcgctcctaactttgtacacagccaagacggtaaccaccttcgtatgactgtagtgtgggcacacgagaagtacggaatcgaatcttttgcactgattcacgactccttcggtaccattccggctgacgctgcgaacctgttcaaagcagtgcgcgaaactatggtttcgacatatgagtcttgtgatgtactggctgatttctacgaccagttcgctgaccagttgcacgagtctcaattggacaaaatgccagcacttccggctaaaggtaacttgaacctccgtgacatcttaaaatcggacttcgcgttcgcg

SEQ ID NO: 342 - protein, 890 aa, synthetic construct
  REGION 1..890: note = Variant of RNA polymerase
MHHHHHHMNTINIAKNDFSDIELAAIPFNTLADHYGERLAREQLALEHESYEMGEARFRKMFERQLKAGEVADNAAAKPLITTLLPKMIARINDWFEEVKAKRGKRPTAFQFLQEIKPEAVAYITIKTTLACLTSADNTTVQAVASAIGRAIEDEARFGRIRDLEAKHFKKNVEEQLNKRVGHVYKKAFMQVVEADMLSKGLLGGEAWSSWHKEDSIHVGVRCIEMLIESTGMVSLHRQNAGVVGQDSETIELAPEYAEAIATRAGALAGISPMFQPCVVPPKPWTGITGGGYWAAGRKPLQLVRTRSLAALRRYEEVSMPEVIKAVNIAQNTAWRVNKKVLDVANAITQWQHCPVADVPAMDRGEMPARPLDIDTNEIALKAWKKEASAFYRKDKARVSRRLSMEFMLSQANKFANYKAIWFPQNMDWRGRVYAVPMFNPQGNDMTKGLLTFAQGKPIGEDGFYWLKIHGANTAGVDKVPFPQRIKFVEDNHTNIMECAKAPLENTWWAEQDSPFCFLAFCFEYAGVINHGLSYNCSLPLAFDGSCSGIQHFSAMLRDEIGGKAVNLLPSAEVQDIYRIVSDKVNEVLKQDLINGTSTTLETVTDKKTGEITERTKYGTKVMAQWWLEHGVNRGVTKRSVMTLVYGSKEFGFRDQVLSDTIQPAIDAGKGDMFLNPNQAAGYMAKLIWNAVSVTVVAAVEAMNWLKSAAKLLAAEVKDKKTDTVLRGRCAVHWVTPDGFPVWQEYKKPIQTRLNLMFLGQFRLQPTINTNKDSEIDAHKQESGIAPNFVHSQDGNHLRMTVVWAHEKYGIESFALIHDSFGTIPADAANLFKAVRETMVSTYESCDVLADFYDQFADQLHESQLDKMPALPAKGNLNLRDILKSDFAFA

SEQ ID NO: 343 - DNA, 2670 bp, synthetic construct
  misc_feature 1..2670: note = Variant of RNA polymerase
  source 1..2670: mol_type = other DNA
atgcaccatcaccatcaccatatgaacacgattaacatcgctaagaacgacttctctgacatcgaactggctgctatcccgttcaacactctggctgaccattacggtgagcgtttagctcgcgaacagttggcccttgagcatgagtcttacgagatgggtgaagcacgcttccgcaagatgtttgagcgtcaacttaaagctggtgaggttgcggataacgctgccgccaagcctctcatcactaccctactccctaagatgattgcacgcatcaacgactggtttgaggaagtgaaagctaagcgcggcaagcgcccgacagccttccagttcctgcaagaaatcaagccggaagccgtagcgtacatcaccattaagaccactctggcttgcctaaccagtgcggacaatacaaccgttcaggctgtagcaagcgcaatcggtcgggccattgaggacgaggctcgcttcggtcgtatccgtgaccttgaagctaagcacttcaagaaaaacgttgaggaacaactcaacaagcgcgtagggcacgtctacaagaaagcatttatgcaagttgtcgagcatgacatgctctctaagggtctactcggtggcgaggcgtggtcttcgtggcataaggaagactctattcatgtaggagtacgctgcatcgagatgctcattgagtcaaccggaatggttagcttacaccgccaaaatgctggcgtagtaggtcaagactctgagactatcgaactcgcacctgaatacgctgaggctatcgcaacccgtgcaggtgcgctggctggcatctctccgatgttccaaccttgcgtagttcctcctaagccgtggactggcattactggtggtggctattgggctgcggggcgcaaacccctgcagttagtacgtactcgcagtctggcggcgcttcgccgctatgaagaagtgtcgatgccggaggtcatcaaagcagtcaacattgcgcagaatacagcatggcgtgtgaacaagaaagttctcgacgtagcgaatgcaatcacccaatggcagcactgtccagtcgcggatgtgcctgcgatggatcgtggcgaaatgccagctcgtccgttggacatcgataccaacgagattgcacttaaagcgtggaagaaagaagcttccgcgttctaccgcaaagacaaagcacgcgttagccgtcgtctgtcaatggagtttatgttatctcaggcgaacaagtttgcgaattataaagcaatctggtttccgcaaaacatggattggcgtgggcgcgtgtacgctgtcccgatgttcaatcctcagggcaacgatatgacgaaaggcctgctgacctttgcgcagggtaaacccattggtgaagacggcttctattggctcaagattcatggcgcaaatacagctggagtggataaagtaccgtttccacaacgcatcaaatttgttgaggataaccatacgaatattatggaatgcgcgaaagcaccgctggaaaacacttggtgggcggaacaggactcgccgttctgttttctggcgttctgctttgagtatgctggcgtcatcaatcacggtctgtcgtacaactgtagcttgcctctggcatttgatggtagttgctccggcattcaacatttctcagcgatgttacgcgacgaaattggcggcaaagctgtgaatctcctcccatctgcggaagtgcaggatatttatcgtatcgtcagcgacaaagttaacgaggtactgaaacaagatctgattaacggtacctctaccaccttggaaacggtgactgataagaagacaggcgaaattaccgaacgcacgaaatacgggaccaaagttatggcacagtggtggttagaacacggtgtgaatcgtggcgtcacgaaacgctcggttatgactttggtgtatgggagcaaagagtttggattccgcgatcaagtgctgagtgacaccattcaaccggcgatcgataacggcaaaggtgacatgtttctgaatccgaatcaggctgctggttacatggcgaaactgatctggaacgcagtgtccgtcaccgtagtcgcagcagttgaggcgatgaactggctgaaaagtgcggcgaaattacttgctgctgaagtgaaggataagaagacggatacagttctgcgtggccgctgcgcagtacattgggtgactcccgacggcttccctgtgtggcaggaatacaagaagcctattcagacgcgcttgaacctgatgttcctcggtcagttccgcttacagcctaccattaacaccaacaaagatagcgagattgatgcacacaaacaggagtctggtatcgctcctaactttgtacacagccaagacggtaaccaccttcgtatgactgtagtgtgggcacacgagaagtacggaatcgaatcttttgcactgattcacgactccttcggtaccattccggctgacgctgcgaacctgttcaaagcagtgcgcgaaactatggtttcgacatatgagtcttgtgatgtactggctgatttctacgaccagttcgctgaccagttgcacgagtctcaattggacaaaatgccagcacttccggctaaaggtaacttgaacctccgtgacatcttaaaatcggacttcgcgttcgcg

SEQ ID NO: 344 - protein, 890 aa, synthetic construct
  REGION 1..890: note = Variant of RNA polymerase
MHHHHHHMNTINIAKNDFSDIELAAIPFNTLADHYGERLAREQLALEHESYEMGEARFRKMFERQLKAGEVADNAAAKPLITTLLPKMIARINDWFEEVKAKRGKRPTAFQFLQEIKPEAVAYITIKTTLACLTSADNTTVQAVASAIGRAIEDEARFGRIRDLEAKHFKKNVEEQLNKRVGHVYKKAFMQVVEHDMLSKGLLGGEAWSSWHKEDSIHVGVRCIEMLIESTGMVSLHRQNAGVVGQDSETIELAPEYAEAIATRAGALAGISPMFQPCVVPPKPWTGITGGGYWAAGRKPLQLVRTRSLAALRRYEEVSMPEVIKAVNIAQNTAWRVNKKVLDVANAITQWQHCPVADVPAMDRGEMPARPLDIDTNEIALKAWKKEASAFYRKDKARVSRRLSMEFMLSQANKFANYKAIWFPQNMDWRGRVYAVPMFNPQGNDMTKGLLTFAQGKPIGEDGFYWLKIHGANTAGVDKVPFPQRIKFVEDNHTNIMECAKAPLENTWWAEQDSPFCFLAFCFEYAGVINHGLSYNCSLPLAFDGSCSGIQHFSAMLRDEIGGKAVNLLPSAEVQDIYRIVSDKVNEVLKQDLINGTSTTLETVTDKKTGEITERTKYGTKVMAQWWLEHGVNRGVTKRSVMTLVYGSKEFGFRDQVLSDTIQPAIDNGKGDMFLNPNQAAGYMAKLIWNAVSVTVVAAVEAMNWLKSAAKLLAAEVKDKKTDTVLRGRCAVHWVTPDGFPVWQEYKKPIQTRLNLMFLGQFRLQPTINTNKDSEIDAHKQESGIAPNFVHSQDGNHLRMTVVWAHEKYGIESFALIHDSFGTIPADAANLFKAVRETMVSTYESCDVLADFYDQFADQLHESQLDKMPALPAKGNLNLRDILKSDFAFA

SEQ ID NO: 345 - DNA, 2670 bp, synthetic construct
  misc_feature 1..2670: note = Variant of RNA polymerase
  source 1..2670: mol_type = other DNA
atgcaccatcaccatcaccatatgaacacgattaacatcgctaagaacgactgttctgacatcgaactggctgctatcccgttcaacactctggctgaccattacggtgagcgtttagctcgcgaacagttggcccttgagcatgagtcttacgagatgggtgaagcacgcttccgcaagatgtttgagcgtcaacttaaagctggtgaggttgcggataacgctgccgccaagcctctcatcactaccctactccctaagatgattgcacgcatcaacgactggtttgaggaagtgaaagctaagcgcggcaagcgcccgacagccttccagttcctgcaagaaatcaagccggaagccgtagcgtacatcaccattaagaccactctggcttgcctaaccagtgcggacaatacaaccgttcaggctgtagcaagcgcaatcggtcgggccattgaggacgaggctcgcttcggtcgtatccgtgaccttgaagctaagcacttcaagaaaaacgttgaggaacaactcaacaagcgcgtagggcacgtctacaagaaagcatttatgcaagttgtcgaggctgacatgctctctaagggtctactcggtggcgaggcgtggtcttcgtggcataaggaagactctattcatgtaggagtacgctgcatcgagatgctcattgagtcaaccggaatggttagcttacaccgccaaaatgctggcgtagtaggtcaagactctgagactatcgaactcgcacctgaatacgctgaggctatcgcaacccgtgcaggtgcgctggctggcatctctccgatgttccaaccttgcgtagttcctcctaagccgtggactggcattactggtggtggctattgggctgcggggcgcaaacccctgcagttagtacgtactcgcagtctggcggcgcttcgccgctatgaagaagtgtcgatgccggaggtcatcaaagcagtcaacattgcgcagaatacagcatggcgtgtgaacaagaaagttctcgacgtagcgaatgcaatcacccaatggcagcactgtccagtcgcggatgtgcctgcgatggatcgtggcgaaatgccagctcgtccgttggacatcgataccaacgagattgcacttaaagcgtggaagaaagaagcttccgcgttctaccgcaaagacaaagcacgcgttagccgtcgtctgtcaatggagtttatgttatctcaggcgaacaagtttgcgaattataaagcaatctggtttccgcaaaacatggattggcgtgggcgcgtgtacgctgtcccgatgttcaatcctcagggcaacgatatgacgaaaggcctgctgacctttgcgcagggtaaacccattggtgaagacggcttctattggctcaagattcatggcgcaaatacagctggagtggataaagtaccgtttccacaacgcatcaaatttgttgaggataaccatacgaatattatggaatgcgcgaaagcaccgctggaaaacacttggtgggcggaacaggactcgccgttctgttttctggcgttctgctttgagtatgctggcgtcatcaatcacggtctgtcgtacaactgtagcttgcctctggcatttgatggtagttgctccggcattcaacatttctcagcgatgttacgcgacgaaattggcggcaaagctgtgaatctcctcccatctgcggaagtgcaggatatttatcgtatcgtcagcgacaaagttaacgaggtactgaaacaagatctgattaacggtacctctaccaccttggaaacggtgactgataagaagacaggcgaaattaccgaacgcacgaaatacgggaccaaagttatggcacagtggtggttagaacacggtgtgaatcgtggcgtcacgaaacgctcggttatgactttggtgtatgggagcaaagagtttggattccgcgatcaagtgctgagtgacaccattcaaccggcgatcgataacggcaaaggtgacatgtttctgaatccgaatcaggctgctggttacatggcgaaactgatctggaacgcagtgtccgtcaccgtagtcgcagcagttgaggcgatgaactggctgaaaagtgcggcgaaattacttgctgctgaagtgaaggataagaagacggatacagttctgcgtggccgctgcgcagtacattgggtgactcccgacggcttccctgtgtggcaggaatacaagaagcctattcagacgcgcttgaacctgatgttcctcggtcagttccgcttacagcctaccattaacaccaacaaagatagcgagattgatgcacacaaacaggagtctggtatcgctcctaactttgtacacagccaagacggtaaccaccttcgtatgactgtagtgtgggcacacgagaagtacggaatcgaatcttttgcactgattcacgactccttcggtaccattccggctgacgctgcgaacctgttcaaagcagtgcgcgaaactatggtttcgacatatgagtcttgtgatgtactggctgatttctacgaccagttcgctgaccagttgcacgagtctcaattggacaaaatgccagcacttccggctaaaggtaacttgaacctccgtgacatcttaaaatcggacttcgcgttcgcg

SEQ ID NO: 346 - protein, 890 aa, synthetic construct
  REGION 1..890: note = Variant of RNA polymerase
MHHHHHHMNTINIAKNDCSDIELAAIPFNTLADHYGERLAREQLALEHESYEMGEARFRKMFERQLKAGEVADNAAAKPLITTLLPKMIARINDWFEEVKAKRGKRPTAFQFLQEIKPEAVAYITIKTTLACLTSADNTTVQAVASAIGRAIEDEARFGRIRDLEAKHFKKNVEEQLNKRVGHVYKKAFMQVVEADMLSKGLLGGEAWSSWHKEDSIHVGVRCIEMLIESTGMVSLHRQNAGVVGQDSETIELAPEYAEAIATRAGALAGISPMFQPCVVPPKPWTGITGGGYWAAGRKPLQLVRTRSLAALRRYEEVSMPEVIKAVNIAQNTAWRVNKKVLDVANAITQWQHCPVADVPAMDRGEMPARPLDIDTNEIALKAWKKEASAFYRKDKARVSRRLSMEFMLSQANKFANYKAIWFPQNMDWRGRVYAVPMFNPQGNDMTKGLLTFAQGKPIGEDGFYWLKIHGANTAGVDKVPFPQRIKFVEDNHTNIMECAKAPLENTWWAEQDSPFCFLAFCFEYAGVINHGLSYNCSLPLAFDGSCSGIQHFSAMLRDEIGGKAVNLLPSAEVQDIYRIVSDKVNEVLKQDLINGTSTTLETVTDKKTGEITERTKYGTKVMAQWWLEHGVNRGVTKRSVMTLVYGSKEFGFRDQVLSDTIQPAIDNGKGDMFLNPNQAAGYMAKLIWNAVSVTVVAAVEAMNWLKSAAKLLAAEVKDKKTDTVLRGRCAVHWVTPDGFPVWQEYKKPIQTRLNLMFLGQFRLQPTINTNKDSEIDAHKQESGIAPNFVHSQDGNHLRMTVVWAHEKYGIESFALIHDSFGTIPADAANLFKAVRETMVSTYESCDVLADFYDQFADQLHESQLDKMPALPAKGNLNLRDILKSDFAFA

SEQ ID NO: 347 - DNA, 2670 bp, synthetic construct
  misc_feature 1..2670: note = Variant of RNA polymerase
  source 1..2670: mol_type = other DNA
atgcaccatcaccatcaccatatgaacacgattaacatcgctaagaacgacttctctgacatcgaactggctgctatcccgttcaacactctggctgaccattacggtgagcgtttagctcgcgaacagttggcccttgagcatgagtcttacgagatgggtgaagcacgcttccgcaagatgtttgagcgtcaacttagggctggtgaggttgcggataacgctgccgccaagcctctcatcactaccctactccctaagatgattgcacgcatcaacgactggtttgaggaagtgaaagctaagcgcggcaagcgcccgacagccttccagttcctgcaagaaatcaagccggaagccgtagcgtacatcaccattaagaccactctggcttgcctaaccagtgcggacaatacaaccgttcaggctgtagcaagcgcaatcggtcgggccattgaggacgaggctcgcttcggtcgtatccgtgaccttgaagctaagcacttcaagaaaaacgttgaggaacaactcaacaagcgcgtagggcacgtctacaagaaagcatttatgcaagttgtcgaggctgacatgctctctaagggtctactcggtggcgaggcgtggtcttcgtggcataaggaagactctattcatgtaggagtacgctgcatcgagatgctcattgagtcaaccggaatggttagcttacaccgccaaaatgctggcgtagtaggtcaagactctgagactatcgaactcgcacctgaatacgctgaggctatcgcaacccgtgcaggtgcgctggctggcatctctccgatgttccaaccttgcgtagttcctcctaagccgtggactggcattactggtggtggctattgggctgcggggcgcaaacccctgcagttagtacgtactcgcagtctggcggcgcttcgccgctatgaagaagtgtcgatgccggaggtcatcaaagcagtcaacattgcgcagaatacagcatggcgtgtgaacaagaaagttctcgacgtagcgaatgcaatcacccaatggcagcactgtccagtcgcggatgtgcctgcgatggatcgtggcgaaatgccagctcgtccgttggacatcgataccaacgagattgcacttaaagcgtggaagaaagaagcttccgcgttctaccgcaaagacaaagcacgcgttagccgtcgtctgtcaatggagtttatgttatctcaggcgaacaagtttgcgaattataaagcaatctggtttccgcaaaacatggattggcgtgggcgcgtgtacgctgtcccgatgttcaatcctcagggcaacgatatgacgaaaggcctgctgacctttgcgcagggtaaacccattggtgaagacggcttctattggctcaagattcatggcgcaaatacagctggagtggataaagtaccgtttccacaacgcatcaaatttgttgaggataaccatacgaatattatggaatgcgcgaaagcaccgctggaaaacacttggtgggcggaacaggactcgccgttctgttttctggcgttctgctttgagtatgctggcgtcatcaatcacggtctgtcgtacaactgtagcttgcctctggcatttgatggtagttgctccggcattcaacatttctcagcgatgttacgcgacgaaattggcggcaaagctgtgaatctcctcccatctgcggaagtgcaggatatttatcgtatcgtcagcgacaaagttaacgaggtactgaaacaagatctgattaacggtacctctaccaccttggaaacggtgactgataagaagacaggcgaaattaccgaacgcacgaaatacgggaccaaagttatggcacagtggtggttagaacacggtgtgaatcgtggcgtcacgaaacgctcggttatgactttggtgtatgggagcaaagagtttggattccgcgatcaagtgctgagtgacaccattcaaccggcgatcgataacggcaaaggtgacatgtttctgaatccgaatcaggctgctggttacatggcgaaactgatctggaacgcagtgtccgtcaccgtagtcgcagcagttgaggcgatgaactggctgaaaagtgcggcgaaattacttgctgctgaagtgaaggataagaagacggatacagttctgcgtggccgctgcgcagtacattgggtgactcccgacggcttccctgtgtggcaggaatacaagaagcctattcagacgcgcttgaacctgatgttcctcggtcagttccgcttacagcctaccattaacaccaacaaagatagcgagattgatgcacacaaacaggagtctggtatcgctcctaactttgtacacagccaagacggtaaccaccttcgtatgactgtagtgtgggcacacgagaagtacggaatcgaatcttttgcactgattcacgactccttcggtaccattccggctgacgctgcgaacctgttcaaagcagtgcgcgaaactatggtttcgacatatgagtcttgtgatgtactggctgatttctacgaccagttcgctgaccagttgcacgagtctcaattggacaaaatgccagcacttccggctaaaggtaacttgaacctccgtgacatcttaaaatcggacttcgcgttcgcg

SEQ ID NO: 348 - protein, 890 aa, synthetic construct
  REGION 1..890: note = Variant of RNA polymerase
MHHHHHHMNTINIAKNDFSDIELAAIPFNTLADHYGERLAREQLALEHESYEMGEARFRKMFERQLRAGEVADNAAAKPLITTLLPKMIARINDWFEEVKAKRGKRPTAFQFLQEIKPEAVAYITIKTTLACLTSADNTTVQAVASAIGRAIEDEARFGRIRDLEAKHFKKNVEEQLNKRVGHVYKKAFMQVVEADMLSKGLLGGEAWSSWHKEDSIHVGVRCIEMLIESTGMVSLHRQNAGVVGQDSETIELAPEYAEAIATRAGALAGISPMFQPCVVPPKPWTGITGGGYWAAGRKPLQLVRTRSLAALRRYEEVSMPEVIKAVNIAQNTAWRVNKKVLDVANAITQWQHCPVADVPAMDRGEMPARPLDIDTNEIALKAWKKEASAFYRKDKARVSRRLSMEFMLSQANKFANYKAIWFPQNMDWRGRVYAVPMFNPQGNDMTKGLLTFAQGKPIGEDGFYWLKIHGANTAGVDKVPFPQRIKFVEDNHTNIMECAKAPLENTWWAEQDSPFCFLAFCFEYAGVINHGLSYNCSLPLAFDGSCSGIQHFSAMLRDEIGGKAVNLLPSAEVQDIYRIVSDKVNEVLKQDLINGTSTTLETVTDKKTGEITERTKYGTKVMAQWWLEHGVNRGVTKRSVMTLVYGSKEFGFRDQVLSDTIQPAIDNGKGDMFLNPNQAAGYMAKLIWNAVSVTVVAAVEAMNWLKSAAKLLAAEVKDKKTDTVLRGRCAVHWVTPDGFPVWQEYKKPIQTRLNLMFLGQFRLQPTINTNKDSEIDAHKQESGIAPNFVHSQDGNHLRMTVVWAHEKYGIESFALIHDSFGTIPADAANLFKAVRETMVSTYESCDVLADFYDQFADQLHESQLDKMPALPAKGNLNLRDILKSDFAFA

SEQ ID NO: 349 - DNA, 2670 bp, synthetic construct
  misc_feature 1..2670: note = Variant of RNA polymerase
  source 1..2670: mol_type = other DNA
atgcaccatcaccatcaccatatgaacacgattaacatcgctaagaacgacttctctgacatcgaactggctgctatcccgttcaacactctggctgaccattacggtgagcgtttagctcgcgaacagttggcccttgagcatgagtcttacgagatgggtgaagcacgcttccgcaagatgtttgagcgtcaacttaaagctggtgaggttgcggataacgctgccgccaagcctctcatcactaccctactccctaagatgattgcacgcatcaacgactggtttgaggaagtgaaagctaagcgcggcaagcgcccgacagccttccagttcctgcaagaaatcaagccggaagccgtagcgtacatcaccattaagaccactctggcttgcctaaccagtgcggacaatacaaccgttcaggctgtagcaagcgcaatcggtcgggccattgaggacgaggctcgcttcggtcgtatccgtgaccttgaagctaagcacttcaagaaaaacgttgaggaacaactcaacaagcgcagggggcacgtctacaagaaagcatttatgcaagttgtcgaggctgacatgctctctaagggtctactcggtggcgaggcgtggtcttcgtggcataaggaagactctattcatgtaggagtacgctgcatcgagatgctcattgagtcaaccggaatggttagcttacaccgccaaaatgctggcgtagtaggtcaagactctgagactatcgaactcgcacctgaatacgctgaggctatcgcaacccgtgcaggtgcgctggctggcatctctccgatgttccaaccttgcgtagttcctcctaagccgtggactggcattactggtggtggctattgggctgcggggcgcaaacccctgcagttagtacgtactcgcagtctggcggcgcttcgccgctatgaagaagtgtcgatgccggaggtcatcaaagcagtcaacattgcgcagaatacagcatggcgtgtgaacaagaaagttctcgacgtagcgaatgcaatcacccaatggcagcactgtccagtcgcggatgtgcctgcgatggatcgtggcgaaatgccagctcgtccgttggacatcgataccaacgagattgcacttaaagcgtggaagaaagaagcttccgcgttctaccgcaaagacaaagcacgcgttagccgtcgtctgtcaatggagtttatgttatctcaggcgaacaagtttgcgaattataaagcaatctggtttccgcaaaacatggattggcgtgggcgcgtgtacgctgtcccgatgttcaatcctcagggcaacgatatgacgaaaggcctgctgacctttgcgcagggtaaacccattggtgaagacggcttctattggctcaagattcatggcgcaaatacagctggagtggataaagtaccgtttccacaacgcatcaaatttgttgaggataaccatacgaatattatggaatgcgcgaaagcaccgctggaaaacacttggtgggcggaacaggactcgccgttctgttttctggcgttctgctttgagtatgctggcgtcatcaatcacggtctgtcgtacaactgtagcttgcctctggcatttgatggtagttgctccggcattcaacatttctcagcgatgttacgcgacgaaattggcggcaaagctgtgaatctcctcccatctgcggaagtgcaggatatttatcgtatcgtcagcgacaaagttaacgaggtactgaaacaagatctgattaacggtacctctaccaccttggaaacggtgactgataagaagacaggcgaaattaccgaacgcacgaaatacgggaccaaagttatggcacagtggtggttagaacacggtgtgaatcgtggcgtcacgaaacgctcggttatgactttggtgtatgggagcaaagagtttggattccgcgatcaagtgctgagtgacaccattcaaccggcgatcgataacggcaaaggtgacatgtttctgaatccgaatcaggctgctggttacatggcgaaactgatctggaacgcagtgtccgtcaccgtagtcgcagcagttgaggcgatgaactggctgaaaagtgcggcgaaattacttgctgctgaagtgaaggataagaagacggatacagttctgcgtggccgctgcgcagtacattgggtgactcccgacggcttccctgtgtggcaggaatacaagaagcctattcagacgcgcttgaacctgatgttcctcggtcagttccgcttacagcctaccattaacaccaacaaagatagcgagattgatgcacacaaacaggagtctggtatcgctcctaactttgtacacagccaagacggtaaccaccttcgtatgactgtagtgtgggcacacgagaagtacggaatcgaatcttttgcactgattcacgactccttcggtaccattccggctgacgctgcgaacctgttcaaagcagtgcgcgaaactatggtttcgacatatgagtcttgtgatgtactggctgatttctacgaccagttcgctgaccagttgcacgagtctcaattggacaaaatgccagcacttccggctaaaggtaacttgaacctccgtgacatcttaaaatcggacttcgcgttcgcg

SEQ ID NO: 350 - protein, 890 aa, synthetic construct
  REGION 1..890: note = Variant of RNA polymerase
MHHHHHHMNTINIAKNDFSDIELAAIPFNTLADHYGERLAREQLALEHESYEMGEARFRKMFERQLKAGEVADNAAAKPLITTLLPKMIARINDWFEEVKAKRGKRPTAFQFLQEIKPEAVAYITIKTTLACLTSADNTTVQAVASAIGRAIEDEARFGRIRDLEAKHFKKNVEEQLNKRRGHVYKKAFMQVVEADMLSKGLLGGEAWSSWHKEDSIHVGVRCIEMLIESTGMVSLHRQNAGVVGQDSETIELAPEYAEAIATRAGALAGISPMFQPCVVPPKPWTGITGGGYWAAGRKPLQLVRTRSLAALRRYEEVSMPEVIKAVNIAQNTAWRVNKKVLDVANAITQWQHCPVADVPAMDRGEMPARPLDIDTNEIALKAWKKEASAFYRKDKARVSRRLSMEFMLSQANKFANYKAIWFPQNMDWRGRVYAVPMFNPQGNDMTKGLLTFAQGKPIGEDGFYWLKIHGANTAGVDKVPFPQRIKFVEDNHTNIMECAKAPLENTWWAEQDSPFCFLAFCFEYAGVINHGLSYNCSLPLAFDGSCSGIQHFSAMLRDEIGGKAVNLLPSAEVQDIYRIVSDKVNEVLKQDLINGTSTTLETVTDKKTGEITERTKYGTKVMAQWWLEHGVNRGVTKRSVMTLVYGSKEFGFRDQVLSDTIQPAIDNGKGDMFLNPNQAAGYMAKLIWNAVSVTVVAAVEAMNWLKSAAKLLAAEVKDKKTDTVLRGRCAVHWVTPDGFPVWQEYKKPIQTRLNLMFLGQFRLQPTINTNKDSEIDAHKQESGIAPNFVHSQDGNHLRMTVVWAHEKYGIESFALIHDSFGTIPADAANLFKAVRETMVSTYESCDVLADFYDQFADQLHESQLDKMPALPAKGNLNLRDILKSDFAFA

SEQ ID NO: 351 - DNA, 2670 bp, synthetic construct
  misc_feature 1..2670: note = Variant of RNA polymerase
  source 1..2670: mol_type = other DNA
atgcaccatcaccatcaccatatgaacacgattaacatcgctaagaacgacttctctgacatcgaactggctgctatcccgttcaacactctggctgaccattacggtgagcgtttagctcgcgaacagttggcccttgagcatgagtcttacgagatgggtgaagcacgcttccgcaagatgtttgagcgtcaacttaaagctggtgaggttgcggataacgctgccgccaagcctctcatcactaccctactccctaagatgattgcacgcatcaacgactggtttgaggaagtgaaagctaagcgcggcaagcgcccgacagccttccagttcctgcaagaaatcaagccggaagccgtagcgtacatcaccattaagaccactctggcttgcctaaccagtgcggacaatacaaccgttcaggctgtagcaagcgcaatcggtcgggccattgaggacgaggctcgcttcggtcgtatccgtgaccttgaagctaagcacttcaggaaaaacgttgaggaacaactcaacaagcgcgtagggcacgtctacaagaaagcatttatgcaagttgtcgaggctgacatgctctctaagggtctactcggtggcgaggcgtggtcttcgtggcataaggaagactctattcatgtaggagtacgctgcatcgagatgctcattgagtcaaccggaatggttagcttacaccgccaaaatgctggcgtagtaggtcaagactctgagactatcgaactcgcacctgaatacgctgaggctatcgcaacccgtgcaggtgcgctggctggcatctctccgatgttccaaccttgcgtagttcctcctaagccgtggactggcattactggtggtggctattgggctgcggggcgcaaacccctgcagttagtacgtactcgcagtctggcggcgcttcgccgctatgaagaagtgtcgatgccggaggtcatcaaagcagtcaacattgcgcagaatacagcatggcgtgtgaacaagaaagttctcgacgtagcgaatgcaatcacccaatggcagcactgtccagtcgcggatgtgcctgcgatggatcgtggcgaaatgccagctcgtccgttggacatcgataccaacgagattgcacttaaagcgtggaagaaagaagcttccgcgttctaccgcaaagacaaagcacgcgttagccgtcgtctgtcaatggagtttatgttatctcaggcgaacaagtttgcgaattataaagcaatctggtttccgcaaaacatggattggcgtgggcgcgtgtacgctgtcccgatgttcaatcctcagggcaacgatatgacgaaaggcctgctgacctttgcgcagggtaaacccattggtgaagacggcttctattggctcaagattcatggcgcaaatacagctggagtggataaagtaccgtttccacaacgcatcaaatttgttgaggataaccatacgaatattatggaatgcgcgaaagcaccgctggaaaacacttggtgggcggaacaggactcgccgttctgttttctggcgttctgctttgagtatgctggcgtcatcaatcacggtctgtcgtacaactgtagcttgcctctggcatttgatggtagttgctccggcattcaacatttctcagcgatgttacgcgacgaaattggcggcaaagctgtgaatctcctcccatctgcggaagtgcaggatatttatcgtatcgtcagcgacaaagttaacgaggtactgaaacaagatctgattaacggtacctctaccaccttggaaacggtgactgataagaagacaggcgaaattaccgaacgcacgaaatacgggaccaaagttatggcacagtggtggttagaacacggtgtgaatcgtggcgtcacgaaacgctcggttatgactttggtgtatgggagcaaagagtttggattccgcgatcaagtgctgagtgacaccattcaaccggcgatcgataacggcaaaggtgacatgtttctgaatccgaatcaggctgctggttacatggcgaaactgatctggaacgcagtgtccgtcaccgtagtcgcagcagttgaggcgatgaactggctgaaaagtgcggcgaaattacttgctgctgaagtgaaggataagaagacggatacagttctgcgtggccgctgcgcagtacattgggtgactcccgacggcttccctgtgtggcaggaatacaagaagcctattcagacgcgcttgaacctgatgttcctcggtcagttccgcttacagcctaccattaacaccaacaaagatagcgagattgatgcacacaaacaggagtctggtatcgctcctaactttgtacacagccaagacggtaaccaccttcgtatgactgtagtgtgggcacacgagaagtacggaatcgaatcttttgcactgattcacgactccttcggtaccattccggctgacgctgcgaacctgttcaaagcagtgcgcgaaactatggtttcgacatatgagtcttgtgatgtactggctgatttctacgaccagttcgctgaccagttgcacgagtctcaattggacaaaatgccagcacttccggctaaaggtaacttgaacctccgtgacatcttaaaatcggacttcgcgttcgcg

SEQ ID NO: 352 - protein, 890 aa, synthetic construct
  REGION 1..890: note = Variant of RNA polymerase
MHHHHHHMNTINIAKNDFSDIELAAIPFNTLADHYGERLAREQLALEHESYEMGEARFRKMFERQLKAGEVADNAAAKPLITTLLPKMIARINDWFEEVKAKRGKRPTAFQFLQEIKPEAVAYITIKTTLACLTSADNTTVQAVASAIGRAIEDEARFGRIRDLEAKHFRKNVEEQLNKRVGHVYKKAFMQVVEADMLSKGLLGGEAWSSWHKEDSIHVGVRCIEMLIESTGMVSLHRQNAGVVGQDSETIELAPEYAEAIATRAGALAGISPMFQPCVVPPKPWTGITGGGYWAAGRKPLQLVRTRSLAALRRYEEVSMPEVIKAVNIAQNTAWRVNKKVLDVANAITQWQHCPVADVPAMDRGEMPARPLDIDTNEIALKAWKKEASAFYRKDKARVSRRLSMEFMLSQANKFANYKAIWFPQNMDWRGRVYAVPMFNPQGNDMTKGLLTFAQGKPIGEDGFYWLKIHGANTAGVDKVPFPQRIKFVEDNHTNIMECAKAPLENTWWAEQDSPFCFLAFCFEYAGVINHGLSYNCSLPLAFDGSCSGIQHFSAMLRDEIGGKAVNLLPSAEVQDIYRIVSDKVNEVLKQDLINGTSTTLETVTDKKTGEITERTKYGTKVMAQWWLEHGVNRGVTKRSVMTLVYGSKEFGFRDQVLSDTIQPAIDNGKGDMFLNPNQAAGYMAKLIWNAVSVTVVAAVEAMNWLKSAAKLLAAEVKDKKTDTVLRGRCAVHWVTPDGFPVWQEYKKPIQTRLNLMFLGQFRLQPTINTNKDSEIDAHKQESGIAPNFVHSQDGNHLRMTVVWAHEKYGIESFALIHDSFGTIPADAANLFKAVRETMVSTYESCDVLADFYDQFADQLHESQLDKMPALPAKGNLNLRDILKSDFAFA

SEQ ID NO: 353 - DNA, 2670 bp, synthetic construct
  misc_feature 1..2670: note = Variant of RNA polymerase
  source 1..2670: mol_type = other DNA
atgcaccatcaccatcaccatatgaacacgattaacatcgctaagaacgacttctctgacatcgaactggctgctatcccgttcaacactctggctgaccattacggtgagcgtttagctcgcgaacagttggcccttgagcatgagtcttacgagatgggtgaagcacgcttccgcaagatgtttgagcgtcaacttaaagctggtgaggttgcggataacgctgccgccaagcctctcatcactaccctactccctaagatgattgcacgcatcaacgactggtttgaggaagtgaaagctaagcgcggcaagcgcccgacagccttccagttcctgcaagaaatcaagccggaagccgtagcgtacatcaccattaagaccactctggcttgcctaaccagtgcggacaatacaaccgttcaggctgtagcaagcgcaatcggtcgggccattgaggacgaggctcgcttcggtcgtatccgtgaccttgaagctaagcacttcaagaaaaacgttgaggaacaactcaacaagcgcgtagggcacgtctacaagaaagcatttatgcaagttgtcgaggctgacatgctctctaagggtctactcggtggcgaggcgtggtcttcgtggcataaggaagactctattcatgtaggagtacgctgcatcgagatgctcattgagtcaaccggaatggttagcttacaccgccaaaatgctggcgtagtaggtcaagactctgagactatcgaactcgcacctgaatacgctgaggctatcgcaacccgtgcaggtgcgctggctggcatctctccgatgttccaaccttgcgtagttcctcctaagccgtgggttggcattactggtggtggctattgggctgcggggcgcaaacccctgcagttagtacgtactcgcagtctggcggcgcttcgccgctatgaagaagtgtcgatgccggaggtcatcaaagcagtcaacattgcgcagaatacagcatggcgtgtgaacaagaaagttctcgacgtagcgaatgcaatcacccaatggcagcactgtccagtcgcggatgtgcctgcgatggatcgtggcgaaatgccagctcgtccgttggacatcgataccaacgagattgcacttaaagcgtggaagaaagaagcttccgcgttctaccgcaaagacaaagcacgcgttagccgtcgtctgtcaatggagtttatgttatctcaggcgaacaagtttgcgaattataaagcaatctggtttccgcaaaacatggattggcgtgggcgcgtgtacgctgtcccgatgttcaatcctcagggcaacgatatgacgaaaggcctgctgacctttgcgcagggtaaacccattggtgaagacggcttctattggctcaagattcatggcgcaaatacagctggagtggataaagtaccgtttccacaacgcatcaaatttgttgaggataaccatacgaatattatggaatgcgcgaaagcaccgctggaaaacacttggtgggcggaacaggactcgccgttctgttttctggcgttctgctttgagtatgctggcgtcatcaatcacggtctgtcgtacaactgtagcttgcctctggcatttgatggtagttgctccggcattcaacatttctcagcgatgttacgcgacgaaattggcggcaaagctgtgaatctcctcccatctgcggaagtgcaggatatttatcgtatcgtcagcgacaaagttaacgaggtactgaaacaagatctgattaacggtacctctaccaccttggaaacggtgactgataagaagacaggcgaaattaccgaacgcacgaaatacgggaccaaagttatggcacagtggtggttagaacacggtgtgaatcgtggcgtcacgaaacgctcggttatgactttggtgtatgggagcaaagagtttggattccgcgatcaagtgctgagtgacaccattcaaccggcgatcgataacggcaaaggtgacatgtttctgaatccgaatcaggctgctggttacatggcgaaactgatctggaacgcagtgtccgtcaccgtagtcgcagcagttgaggcgatgaactggctgaaaagtgcggcgaaattacttgctgctgaagtgaaggataagaagacggatacagttctgcgtggccgctgcgcagtacattgggtgactcccgacggcttccctgtgtggcaggaatacaagaagcctattcagacgcgcttgaacctgatgttcctcggtcagttccgcttacagcctaccattaacaccaacaaagatagcgagattgatgcacacaaacaggagtctggtatcgctcctaactttgtacacagccaagacggtaaccaccttcgtatgactgtagtgtgggcacacgagaagtacggaatcgaatcttttgcactgattcacgactccttcggtaccattccggctgacgctgcgaacctgttcaaagcagtgcgcgaaactatggtttcgacatatgagtcttgtgatgtactggctgatttctacgaccagttcgctgaccagttgcacgagtctcaattggacaaaatgccagcacttccggctaaaggtaacttgaacctccgtgacatcttaaaatcggacttcgcgttcgcg

SEQ ID NO: 354 - protein, 890 aa, synthetic construct
  REGION 1..890: note = Variant of RNA polymerase
MHHHHHHMNTINIAKNDFSDIELAAIPFNTLADHYGERLAREQLALEHESYEMGEARFRKMFERQLKAGEVADNAAAKPLITTLLPKMIARINDWFEEVKAKRGKRPTAFQFLQEIKPEAVAYITIKTTLACLTSADNTTVQAVASAIGRAIEDEARFGRIRDLEAKHFKKNVEEQLNKRVGHVYKKAFMQVVEADMLSKGLLGGEAWSSWHKEDSIHVGVRCIEMLIESTGMVSLHRQNAGVVGQDSETIELAPEYAEAIATRAGALAGISPMFQPCVVPPKPWVGITGGGYWAAGRKPLQLVRTRSLAALRRYEEVSMPEVIKAVNIAQNTAWRVNKKVLDVANAITQWQHCPVADVPAMDRGEMPARPLDIDTNEIALKAWKKEASAFYRKDKARVSRRLSMEFMLSQANKFANYKAIWFPQNMDWRGRVYAVPMFNPQGNDMTKGLLTFAQGKPIGEDGFYWLKIHGANTAGVDKVPFPQRIKFVEDNHTNIMECAKAPLENTWWAEQDSPFCFLAFCFEYAGVINHGLSYNCSLPLAFDGSCSGIQHFSAMLRDEIGGKAVNLLPSAEVQDIYRIVSDKVNEVLKQDLINGTSTTLETVTDKKTGEITERTKYGTKVMAQWWLEHGVNRGVTKRSVMTLVYGSKEFGFRDQVLSDTIQPAIDNGKGDMFLNPNQAAGYMAKLIWNAVSVTVVAAVEAMNWLKSAAKLLAAEVKDKKTDTVLRGRCAVHWVTPDGFPVWQEYKKPIQTRLNLMFLGQFRLQPTINTNKDSEIDAHKQESGIAPNFVHSQDGNHLRMTVVWAHEKYGIESFALIHDSFGTIPADAANLFKAVRETMVSTYESCDVLADFYDQFADQLHESQLDKMPALPAKGNLNLRDILKSDFAFA

SEQ ID NO: 355 - DNA, 2670 bp, synthetic construct
  misc_feature 1..2670: note = Variant of RNA polymerase
  source 1..2670: mol_type = other DNA
atgcaccatcaccatcaccatatgaacacgattaacatcgctaagaacgacttctctgacatcgaactggctgctatcccgttcaacactctggctgaccattacggtgagcgtttagctcgcgaacagttggcccttgagcatgagtcttacgagatgggtgaagcacgcttccgcaaggagtttgagcgtcaacttaaagctggtgaggttgcggataacgctgccgccaagcctctcatcactaccctactccctaagatgattgcacgcatcaacgactggtttgaggaagtgaaagctaagcgcggcaagcgcccgacagccttccagttcctgcaagaaatcaagccggaagccgtagcgtacatcaccattaagaccactctggcttgcctaaccagtgcggacaatacaaccgttcaggctgtagcaagcgcaatcggtcgggccattgaggacgaggctcgcttcggtcgtatccgtgaccttgaagctaagcacttcaagaaaaacgttgaggaacaactcaacaagcgcgtagggcacgtctacaagaaagcatttatgcaagttgtcgaggctgacatgctctctaagggtctactcggtggcgaggcgtggtcttcgtggcataaggaagactctattcatgtaggagtacgctgcatcgagatgctcattgagtcaaccggaatggttagcttacaccgccaaaatgctggcgtagtaggtcaagactctgagactatcgaactcgcacctgaatacgctgaggctatcgcaacccgtgcaggtgcgctggctggcatctctccgatgttccaaccttgcgtagttcctcctaagccgtggactggcattactggtggtggctattgggctgcggggcgcaaacccctgcagttagtacgtactcgcagtctggcggcgcttcgccgctatgaagaagtgtcgatgccggaggtcatcaaagcagtcaacattgcgcagaatacagcatggcgtgtgaacaagaaagttctcgacgtagcgaatgcaatcacccaatggcagcactgtccagtcgcggatgtgcctgcgatggatcgtggcgaaatgccagctcgtccgttggacatcgataccaacgagattgcacttaaagcgtggaagaaagaagcttccgcgttctaccgcaaagacaaagcacgcgttagccgtcgtctgtcaatggagtttatgttatctcaggcgaacaagtttgcgaattataaagcaatctggtttccgcaaaacatggattggcgtgggcgcgtgtacgctgtcccgatgttcaatcctcagggcaacgatatgacgaaaggcctgctgacctttgcgcagggtaaacccattggtgaagacggcttctattggctcaagattcatggcgcaaatacagctggagtggataaagtaccgtttccacaacgcatcaaatttgttgaggataaccatacgaatattatggaatgcgcgaaagcaccgctggaaaacacttggtgggcggaacaggactcgccgttctgttttctggcgttctgctttgagtatgctggcgtcatcaatcacggtctgtcgtacaactgtagcttgcctctggcatttgatggtagttgctccggcattcaacatttctcagcgatgttacgcgacgaaattggcggcaaagctgtgaatctcctcccatctgcggaagtgcaggatatttatcgtatcgtcagcgacaaagttaacgaggtactgaaacaagatctgattaacggtacctctaccaccttggaaacggtgactgataagaagacaggcgaaattaccgaacgcacgaaatacgggaccaaagttatggcacagtggtggttagaacacggtgtgaatcgtggcgtcacgaaacgctcggttatgactttggtgtatgggagcaaagagtttggattccgcgatcaagtgctgagtgacaccattcaaccggcgatcgataacggcaaaggtgacatgtttctgaatccgaatcaggctgctggttacatggcgaaactgatctggaacgcagtgtccgtcaccgtagtcgcagcagttgaggcgatgaactggctgaaaagtgcggcgaaattacttgctgctgaagtgaaggataagaagacggatacagttctgcgtggccgctgcgcagtacattgggtgactcccgacggcttccctgtgtggcaggaatacaagaagcctattcagacgcgcttgaacctgatgttcctcggtcagttccgcttacagcctaccattaacaccaacaaagatagcgagattgatgcacacaaacaggagtctggtatcgctcctaactttgtacacagccaagacggtaaccaccttcgtatgactgtagtgtgggcacacgagaagtacggaatcgaatcttttgcactgattcacgactccttcggtaccattccggctgacgctgcgaacctgttcaaagcagtgcgcgaaactatggtttcgacatatgagtcttgtgatgtactggctgatttctacgaccagttcgctgaccagttgcacgagtctcaattggacaaaatgccagcacttccggctaaaggtaacttgaacctccgtgacatcttaaaatcggacttcgcgttcgcg

SEQ ID NO: 356 - protein, 890 aa, synthetic construct
  REGION 1..890: note = Variant of RNA polymerase
MHHHHHHMNTINIAKNDFSDIELAAIPFNTLADHYGERLAREQLALEHESYEMGEARFRKEFERQLKAGEVADNAAAKPLITTLLPKMIARINDWFEEVKAKRGKRPTAFQFLQEIKPEAVAYITIKTTLACLTSADNTTVQAVASAIGRAIEDEARFGRIRDLEAKHFKKNVEEQLNKRVGHVYKKAFMQVVEADMLSKGLLGGEAWSSWHKEDSIHVGVRCIEMLIESTGMVSLHRQNAGVVGQDSETIELAPEYAEAIATRAGALAGISPMFQPCVVPPKPWTGITGGGYWAAGRKPLQLVRTRSLAALRRYEEVSMPEVIKAVNIAQNTAWRVNKKVLDVANAITQWQHCPVADVPAMDRGEMPARPLDIDTNEIALKAWKKEASAFYRKDKARVSRRLSMEFMLSQANKFANYKAIWFPQNMDWRGRVYAVPMFNPQGNDMTKGLLTFAQGKPIGEDGFYWLKIHGANTAGVDKVPFPQRIKFVEDNHTNIMECAKAPLENTWWAEQDSPFCFLAFCFEYAGVINHGLSYNCSLPLAFDGSCSGIQHFSAMLRDEIGGKAVNLLPSAEVQDIYRIVSDKVNEVLKQDLINGTSTTLETVTDKKTGEITERTKYGTKVMAQWWLEHGVNRGVTKRSVMTLVYGSKEFGFRDQVLSDTIQPAIDNGKGDMFLNPNQAAGYMAKLIWNAVSVTVVAAVEAMNWLKSAAKLLAAEVKDKKTDTVLRGRCAVHWVTPDGFPVWQEYKKPIQTRLNLMFLGQFRLQPTINTNKDSEIDAHKQESGIAPNFVHSQDGNHLRMTVVWAHEKYGIESFALIHDSFGTIPADAANLFKAVRETMVSTYESCDVLADFYDQFADQLHESQLDKMPALPAKGNLNLRDILKSDFAFA

SEQ ID NO: 357 - DNA, 2670 bp, synthetic construct
  misc_feature 1..2670: note = Variant of RNA polymerase
  source 1..2670: mol_type = other DNA
atgcaccatcaccatcaccatatgaacacgattaacatcgctaagaacgacttctctgacatcgaactggctgctatcccgttcaacactctggctgaccattacggtgagcgtttagctcgcgaacagttggcccttgagcatgagtcttacgagatgggtgaagcacgcttccgcaagatgtttgagcgtcaacttaaagctggtgaggttgcggataacgctgccgccaagcctctcatcactaccctactccctaagatgattgcacgcatcaacgactggtttgaggaagtgaaagctaagcgcggcaagcgcccgacagccttccagttcctgcaagaaatcaagccggaagccgtagcgtacatcaccattaagaccactctggcttgcctaaccagtgcggacaatacaaccgttcaggctgtagcaagcgcaatcggtcgggccattgaggacgaggctcgcttcggtcgtatccgtgaccttgaagctaagcacttcaagaaaaacgttgaggaacaactcaacaagcgcgtagggcacgtctacaagaaagcatttatgcaagttgtcgaggctgacatgctctctaagggtctactcggtggcgaggcgtggtcttcgtggcataaggaagactctattcatgtaggagtacgctgcatcgagatgctcattgagtcaaccggaatggttagcttacaccgccaaaatgctggcgtagtaggtcaagactctgagactatcgaactcgcacctgaatacgctgaggctatcgcaacccgtgcaggtgcgctggctggcatctctccgatgttccaaccttgcgtagttcctcctaagccgtggactggcattactggtggtggctattgggctgcggggcgcaaacccctgcagttagtacgtactcgcagtctggcggcgcttcgccgctatgaagaagtgtcgatgccggaggtcatcaaagcagtcaacattgcgcagaatacagcatggcgtgtgaacaagaaagttctcgacgtagcgaatgcaatcacccaatggcagcactgtccagtcgcggatgtgcctgcgatggatcgtggcgaaatgccagctcgtccgttggacatcgataccaacgagattgcacttaaagcgtggaagaaagaagcttccgcgttctaccgcaaagacaaagcacgcgttagccgtcgtctgtcaatggagtttatgttatctcaggcgaacaagtttgcgaattatgtggcaatctggtttccgcaaaacatggattggcgtgggcgcgtgtacgctgtcccgatgttcaatcctcagggcaacgatatgacgaaaggcctgctgacctttgcgcagggtaaacccattggtgaagacggcttctattggctcaagattcatggcgcaaatacagctggagtggataaagtaccgtttccacaacgcatcaaatttgttgaggataaccatacgaatattatggaatgcgcgaaagcaccgctggaaaacacttggtgggcggaacaggactcgccgttctgttttctggcgttctgctttgagtatgctggcgtcatcaatcacggtctgtcgtacaactgtagcttgcctctggcatttgatggtagttgctccggcattcaacatttctcagcgatgttacgcgacgaaattggcggcaaagctgtgaatctcctcccatctgcggaagtgcaggatatttatcgtatcgtcagcgacaaagttaacgaggtactgaaacaagatctgattaacggtacctctaccaccttggaaacggtgactgataagaagacaggcgaaattaccgaacgcacgaaatacgggaccaaagttatggcacagtggtggttagaacacggtgtgaatcgtggcgtcacgaaacgctcggttatgactttggtgtatgggagcaaagagtttggattccgcgatcaagtgctgagtgacaccattcaaccggcgatcgataacggcaaaggtgacatgtttctgaatccgaatcaggctgctggttacatggcgaaactgatctggaacgcagtgtccgtcaccgtagtcgcagcagttgaggcgatgaactggctgaaaagtgcggcgaaattacttgctgctgaagtgaaggataagaagacggatacagttctgcgtggccgctgcgcagtacattgggtgactcccgacggcttccctgtgtggcaggaatacaagaagcctattcagacgcgcttgaacctgatgttcctcggtcagttccgcttacagcctaccattaacaccaacaaagatagcgagattgatgcacacaaacaggagtctggtatcgctcctaactttgtacacagccaagacggtaaccaccttcgtatgactgtagtgtgggcacacgagaagtacggaatcgaatcttttgcactgattcacgactccttcggtaccattccggctgacgctgcgaacctgttcaaagcagtgcgcgaaactatggtttcgacatatgagtcttgtgatgtactggctgatttctacgaccagttcgctgaccagttgcacgagtctcaattggacaaaatgccagcacttccggctaaaggtaacttgaacctccgtgacatcttaaaatcggacttcgcgttcgcg

SEQ ID NO: 358 - protein, 890 aa, synthetic construct
  REGION 1..890: note = Variant of RNA polymerase
MHHHHHHMNTINIAKNDFSDIELAAIPFNTLADHYGERLAREQLALEHESYEMGEARFRKMFERQLKAGEVADNAAAKPLITTLLPKMIARINDWFEEVKAKRGKRPTAFQFLQEIKPEAVAYITIKTTLACLTSADNTTVQAVASAIGRAIEDEARFGRIRDLEAKHFKKNVEEQLNKRVGHVYKKAFMQVVEADMLSKGLLGGEAWSSWHKEDSIHVGVRCIEMLIESTGMVSLHRQNAGVVGQDSETIELAPEYAEAIATRAGALAGISPMFQPCVVPPKPWTGITGGGYWAAGRKPLQLVRTRSLAALRRYEEVSMPEVIKAVNIAQNTAWRVNKKVLDVANAITQWQHCPVADVPAMDRGEMPARPLDIDTNEIALKAWKKEASAFYRKDKARVSRRLSMEFMLSQANKFANYVAIWFPQNMDWRGRVYAVPMFNPQGNDMTKGLLTFAQGKPIGEDGFYWLKIHGANTAGVDKVPFPQRIKFVEDNHTNIMECAKAPLENTWWAEQDSPFCFLAFCFEYAGVINHGLSYNCSLPLAFDGSCSGIQHFSAMLRDEIGGKAVNLLPSAEVQDIYRIVSDKVNEVLKQDLINGTSTTLETVTDKKTGEITERTKYGTKVMAQWWLEHGVNRGVTKRSVMTLVYGSKEFGFRDQVLSDTIQPAIDNGKGDMFLNPNQAAGYMAKLIWNAVSVTVVAAVEAMNWLKSAAKLLAAEVKDKKTDTVLRGRCAVHWVTPDGFPVWQEYKKPIQTRLNLMFLGQFRLQPTINTNKDSEIDAHKQESGIAPNFVHSQDGNHLRMTVVWAHEKYGIESFALIHDSFGTIPADAANLFKAVRETMVSTYESCDVLADFYDQFADQLHESQLDKMPALPAKGNLNLRDILKSDFAFA

SEQ ID NO: 359 - DNA, 2670 bp, synthetic construct
  misc_feature 1..2670: note = Variant of RNA polymerase
  source 1..2670: mol_type = other DNA
atgcaccatcaccatcaccatatgaacacgattaacatcgctaagaacgacttctctgacatcgaactggctgctatcccgttcaacactctggctgaccattacggtgagcgtttagctcgcgaacagttggcccttgagcatgagtcttacgagatgggtgaagcacgcttccgcgttatgtttgagcgtcaacttaaagctggtgaggttgcggataacgctgccgccaagcctctcatcactaccctactccctaagatgattgcacgcatcaacgactggtttgaggaagtgaaagctaagcgcggcaagcgcccgacagccttccagttcctgcaagaaatcaagccggaagccgtagcgtacatcaccattaagaccactctggcttgcctaaccagtgcggacaatacaaccgttcaggctgtagcaagcgcaatcggtcgggccattgaggacgaggctcgcttcggtcgtatccgtgaccttgaagctaagcacttcaagaaaaacgttgaggaacaactcaacaagcgcgtagggcacgtctacaagaaagcatttatgcaagttgtcgaggctgacatgctctctaagggtctactcggtggcgaggcgtggtcttcgtggcataaggaagactctattcatgtaggagtacgctgcatcgagatgctcattgagtcaaccggaatggttagcttacaccgccaaaatgctggcgtagtaggtcaagactctgagactatcgaactcgcacctgaatacgctgaggctatcgcaacccgtgcaggtgcgctggctggcatctctccgatgttccaaccttgcgtagttcctcctaagccgtggactggcattactggtggtggctattgggctgcggggcgcaaacccctgcagttagtacgtactcgcagtctggcggcgcttcgccgctatgaagaagtgtcgatgccggaggtcatcaaagcagtcaacattgcgcagaatacagcatggcgtgtgaacaagaaagttctcgacgtagcgaatgcaatcacccaatggcagcactgtccagtcgcggatgtgcctgcgatggatcgtggcgaaatgccagctcgtccgttggacatcgataccaacgagattgcacttaaagcgtggaagaaagaagcttccgcgttctaccgcaaagacaaagcacgcgttagccgtcgtctgtcaatggagtttatgttatctcaggcgaacaagtttgcgaattataaagcaatctggtttccgcaaaacatggattggcgtgggcgcgtgtacgctgtcccgatgttcaatcctcagggcaacgatatgacgaaaggcctgctgacctttgcgcagggtaaacccattggtgaagacggcttctattggctcaagattcatggcgcaaatacagctggagtggataaagtaccgtttccacaacgcatcaaatttgttgaggataaccatacgaatattatggaatgcgcgaaagcaccgctggaaaacacttggtgggcggaacaggactcgccgttctgttttctggcgttctgctttgagtatgctggcgtcatcaatcacggtctgtcgtacaactgtagcttgcctctggcatttgatggtagttgctccggcattcaacatttctcagcgatgttacgcgacgaaattggcggcaaagctgtgaatctcctcccatctgcggaagtgcaggatatttatcgtatcgtcagcgacaaagttaacgaggtactgaaacaagatctgattaacggtacctctaccaccttggaaacggtgactgataagaagacaggcgaaattaccgaacgcacgaaatacgggaccaaagttatggcacagtggtggttagaacacggtgtgaatcgtggcgtcacgaaacgctcggttatgactttggtgtatgggagcaaagagtttggattccgcgatcaagtgctgagtgacaccattcaaccggcgatcgataacggcaaaggtgacatgtttctgaatccgaatcaggctgctggttacatggcgaaactgatctggaacgcagtgtccgtcaccgtagtcgcagcagttgaggcgatgaactggctgaaaagtgcggcgaaattacttgctgctgaagtgaaggataagaagacggatacagttctgcgtggccgctgcgcagtacattgggtgactcccgacggcttccctgtgtggcaggaatacaagaagcctattcagacgcgcttgaacctgatgttcctcggtcagttccgcttacagcctaccattaacaccaacaaagatagcgagattgatgcacacaaacaggagtctggtatcgctcctaactttgtacacagccaagacggtaaccaccttcgtatgactgtagtgtgggcacacgagaagtacggaatcgaatcttttgcactgattcacgactccttcggtaccattccggctgacgctgcgaacctgttcaaagcagtgcgcgaaactatggtttcgacatatgagtcttgtgatgtactggctgatttctacgaccagttcgctgaccagttgcacgagtctcaattggacaaaatgccagcacttccggctaaaggtaacttgaacctccgtgacatcttaaaatcggacttcgcgttcgcg

SEQ ID NO: 360 - protein, 890 aa, synthetic construct
  REGION 1..890: note = Variant of RNA polymerase
MHHHHHHMNTINIAKNDFSDIELAAIPFNTLADHYGERLAREQLALEHESYEMGEARFRVMFERQLKAGEVADNAAAKPLITTLLPKMIARINDWFEEVKAKRGKRPTAFQFLQEIKPEAVAYITIKTTLACLTSADNTTVQAVASAIGRAIEDEARFGRIRDLEAKHFKKNVEEQLNKRVGHVYKKAFMQVVEADMLSKGLLGGEAWSSWHKEDSIHVGVRCIEMLIESTGMVSLHRQNAGVVGQDSETIELAPEYAEAIATRAGALAGISPMFQPCVVPPKPWTGITGGGYWAAGRKPLQLVRTRSLAALRRYEEVSMPEVIKAVNIAQNTAWRVNKKVLDVANAITQWQHCPVADVPAMDRGEMPARPLDIDTNEIALKAWKKEASAFYRKDKARVSRRLSMEFMLSQANKFANYKAIWFPQNMDWRGRVYAVPMFNPQGNDMTKGLLTFAQGKPIGEDGFYWLKIHGANTAGVDKVPFPQRIKFVEDNHTNIMECAKAPLENTWWAEQDSPFCFLAFCFEYAGVINHGLSYNCSLPLAFDGSCSGIQHFSAMLRDEIGGKAVNLLPSAEVQDIYRIVSDKVNEVLKQDLINGTSTTLETVTDKKTGEITERTKYGTKVMAQWWLEHGVNRGVTKRSVMTLVYGSKEFGFRDQVLSDTIQPAIDNGKGDMFLNPNQAAGYMAKLIWNAVSVTVVAAVEAMNWLKSAAKLLAAEVKDKKTDTVLRGRCAVHWVTPDGFPVWQEYKKPIQTRLNLMFLGQFRLQPTINTNKDSEIDAHKQESGIAPNFVHSQDGNHLRMTVVWAHEKYGIESFALIHDSFGTIPADAANLFKAVRETMVSTYESCDVLADFYDQFADQLHESQLDKMPALPAKGNLNLRDILKSDFAFA

SEQ ID NO: 361 - DNA, 2670 bp, synthetic construct
  misc_feature 1..2670: note = Variant of RNA polymerase
  source 1..2670: mol_type = other DNA
atgcaccatcaccatcaccatatgaacacgattaacatcgctaagaacgacttctctgacatcgaactggctgctatcccgttcaacactctggctgaccattacggtgagcgtttagctcgcgaacagttggcccttgagcatgagtcttacgagatgggtgaagcacgcttccgcaagatgtttgagcgtcaacttaaagctggtgaggttgcggataacgctgccgccaagcctctcatcactaccctactccctaagatgattgcacgcatcaacgactggtttgaggaagtgaaagctaagcgcggcaagcgcccgacagccttccagttcctgcaagaaatcaagccggaagccgtagcgtacatcaccattaagaccactctggcttgcctaaccagtgcggacaatacaaccgttcaggctgtagcaagcgcaatcggtcgggccattgaggacgaggctcgcttcggtcgtatccgtgaccttgaagctaagcacttcaagaaaaacgttgaggaacaactcaacaagcgcgtagggtgtgtctacaagaaagcatttatgcaagttgtcgaggctgacatgctctctaagggtctactcggtggcgaggcgtggtcttcgtggcataaggaagactctattcatgtaggagtacgctgcatcgagatgctcattgagtcaaccggaatggttagcttacaccgccaaaatgctggcgtagtaggtcaagactctgagactatcgaactcgcacctgaatacgctgaggctatcgcaacccgtgcaggtgcgctggctggcatctctccgatgttccaaccttgcgtagttcctcctaagccgtggactggcattactggtggtggctattgggctgcggggcgcaaacccctgcagttagtacgtactcgcagtctggcggcgcttcgccgctatgaagaagtgtcgatgccggaggtcatcaaagcagtcaacattgcgcagaatacagcatggcgtgtgaacaagaaagttctcgacgtagcgaatgcaatcacccaatggcagcactgtccagtcgcggatgtgcctgcgatggatcgtggcgaaatgccagctcgtccgttggacatcgataccaacgagattgcacttaaagcgtggaagaaagaagcttccgcgttctaccgcaaagacaaagcacgcgttagccgtcgtctgtcaatggagtttatgttatctcaggcgaacaagtttgcgaattataaagcaatctggtttccgcaaaacatggattggcgtgggcgcgtgtacgctgtcccgatgttcaatcctcagggcaacgatatgacgaaaggcctgctgacctttgcgcagggtaaacccattggtgaagacggcttctattggctcaagattcatggcgcaaatacagctggagtggataaagtaccgtttccacaacgcatcaaatttgttgaggataaccatacgaatattatggaatgcgcgaaagcaccgctggaaaacacttggtgggcggaacaggactcgccgttctgttttctggcgttctgctttgagtatgctggcgtcatcaatcacggtctgtcgtacaactgtagcttgcctctggcatttgatggtagttgctccggcattcaacatttctcagcgatgttacgcgacgaaattggcggcaaagctgtgaatctcctcccatctgcggaagtgcaggatatttatcgtatcgtcagcgacaaagttaacgaggtactgaaacaagatctgattaacggtacctctaccaccttggaaacggtgactgataagaagacaggcgaaattaccgaacgcacgaaatacgggaccaaagttatggcacagtggtggttagaacacggtgtgaatcgtggcgtcacgaaacgctcggttatgactttggtgtatgggagcaaagagtttggattccgcgatcaagtgctgagtgacaccattcaaccggcgatcgataacggcaaaggtgacatgtttctgaatccgaatcaggctgctggttacatggcgaaactgatctggaacgcagtgtccgtcaccgtagtcgcagcagttgaggcgatgaactggctgaaaagtgcggcgaaattacttgctgctgaagtgaaggataagaagacggatacagttctgcgtggccgctgcgcagtacattgggtgactcccgacggcttccctgtgtggcaggaatacaagaagcctattcagacgcgcttgaacctgatgttcctcggtcagttccgcttacagcctaccattaacaccaacaaagatagcgagattgatgcacacaaacaggagtctggtatcgctcctaactttgtacacagccaagacggtaaccaccttcgtatgactgtagtgtgggcacacgagaagtacggaatcgaatcttttgcactgattcacgactccttcggtaccattccggctgacgctgcgaacctgttcaaagcagtgcgcgaaactatggtttcgacatatgagtcttgtgatgtactggctgatttctacgaccagttcgctgaccagttgcacgagtctcaattggacaaaatgccagcacttccggctaaaggtaacttgaacctccgtgacatcttaaaatcggacttcgcgttcgcg

SEQ ID NO: 362 - protein, 890 aa, synthetic construct
  REGION 1..890: note = Variant of RNA polymerase
MHHHHHHMNTINIAKNDFSDIELAAIPFNTLADHYGERLAREQLALEHESYEMGEARFRKMFERQLKAGEVADNAAAKPLITTLLPKMIARINDWFEEVKAKRGKRPTAFQFLQEIKPEAVAYITIKTTLACLTSADNTTVQAVASAIGRAIEDEARFGRIRDLEAKHFKKNVEEQLNKRVGCVYKKAFMQVVEADMLSKGLLGGEAWSSWHKEDSIHVGVRCIEMLIESTGMVSLHRQNAGVVGQDSETIELAPEYAEAIATRAGALAGISPMFQPCVVPPKPWTGITGGGYWAAGRKPLQLVRTRSLAALRRYEEVSMPEVIKAVNIAQNTAWRVNKKVLDVANAITQWQHCPVADVPAMDRGEMPARPLDIDTNEIALKAWKKEASAFYRKDKARVSRRLSMEFMLSQANKFANYKAIWFPQNMDWRGRVYAVPMFNPQGNDMTKGLLTFAQGKPIGEDGFYWLKIHGANTAGVDKVPFPQRIKFVEDNHTNIMECAKAPLENTWWAEQDSPFCFLAFCFEYAGVINHGLSYNCSLPLAFDGSCSGIQHFSAMLRDEIGGKAVNLLPSAEVQDIYRIVSDKVNEVLKQDLINGTSTTLETVTDKKTGEITERTKYGTKVMAQWWLEHGVNRGVTKRSVMTLVYGSKEFGFRDQVLSDTIQPAIDNGKGDMFLNPNQAAGYMAKLIWNAVSVTVVAAVEAMNWLKSAAKLLAAEVKDKKTDTVLRGRCAVHWVTPDGFPVWQEYKKPIQTRLNLMFLGQFRLQPTINTNKDSEIDAHKQESGIAPNFVHSQDGNHLRMTVVWAHEKYGIESFALIHDSFGTIPADAANLFKAVRETMVSTYESCDVLADFYDQFADQLHESQLDKMPALPAKGNLNLRDILKSDFAFA

SEQ ID NO: 363 - DNA, 2670 bp, synthetic construct
  misc_feature 1..2670: note = Variant of RNA polymerase
  source 1..2670: mol_type = other DNA
atgcaccatcaccatcaccatatgaacacgattaacatcgctaagaacgacttctctgacatcgaactggctgctatcccgttcaacactctggctgaccattacggtgagcgtttagctcgcgaacagttggcccttgagcatgagtcttacgagatgggtgaagcacgcttccgcaagatgtttgagcgtcaacttaaagctggtgaggttgcggataacgctgccgccaagcctctcatcactaccctactccctaagatgattgcacgcatcaacgactggtttgaggaagtgaaagctaagcgcggcaagcgcccgacagccttccagttcctgcaagaaatcaagccggaagccgtagcgtacatcaccattaagaccactctggcttgcctaaccagtgcggacaatacaaccgttcaggctgtagcaagcgcaatcggtcgggccattgaggacgaggctcgcttcggtcgtatccgtgaccttgaagctaagcacttcaagaaaaacgttgaggaacaactcaacaagcgcgtagggcacgtctacaagaaagcatttatgcaagttgtcgaggctgacatgctctctaagggtctactcggtggcgaggcgtggtcttcgtggcataaggaagactctattcatgtaggagtacgctgcatcgagatgctcattgagtcaaccggaatggttagcttacaccgccaaaatgctggcgtagtaggtcaagactctgagactatcgaactcgcacctgaatacgctgaggctatcgcaacccgtgcaggtgcgctggctggcatctctccgatgttccaaccttgcgtagttcctcctaagccgtggactggcattactggtggtggctattgggctgcggggcgcaaacccctgcagttagtacgtactcgcagtctggcggcgcttcgccgctatgaagaagtgtcgatgccggaggtcatcaaagcagtcaacattgcgcagaatacagcatggcgtgtgaacaagaaagttctcgacgtagcgaatgcaatcacccaatggcagcactgtccagtcgcggatgtgcctgcgatggatcgtggcgaaatgccagctcgtccgttggacatcgataccaacgagattgcacttaaagcgtggaagaaagaagcttccgcgttctaccgcaaagacaaagcacgcgttagccgtcgtctgtcaatggagtttatgttatctcaggcgaacaagtttgcgaattataaagcaatctggtttccgcaaaacatggattggcgtgggcgcgtgtacgctgtcccgatgttcaatcctcagggcaacgatatgacgaaaggcctgctgacctttgcgcagtataaacccattggtgaagacggcttctattggctcaagattcatggcgcaaatacagctggagtggataaagtaccgtttccacaacgcatcaaatttgttgaggataaccatacgaatattatggaatgcgcgaaagcaccgctggaaaacacttggtgggcggaacaggactcgccgttctgttttctggcgttctgctttgagtatgctggcgtcatcaatcacggtctgtcgtacaactgtagcttgcctctggcatttgatggtagttgctccggcattcaacatttctcagcgatgttacgcgacgaaattggcggcaaagctgtgaatctcctcccatctgcggaagtgcaggatatttatcgtatcgtcagcgacaaagttaacgaggtactgaaacaagatctgattaacggtacctctaccaccttggaaacggtgactgataagaagacaggcgaaattaccgaacgcacgaaatacgggaccaaagttatggcacagtggtggttagaacacggtgtgaatcgtggcgtcacgaaacgctcggttatgactttggtgtatgggagcaaagagtttggattccgcgatcaagtgctgagtgacaccattcaaccggcgatcgataacggcaaaggtgacatgtttctgaatccgaatcaggctgctggttacatggcgaaactgatctggaacgcagtgtccgtcaccgtagtcgcagcagttgaggcgatgaactggctgaaaagtgcggcgaaattacttgctgctgaagtgaaggataagaagacggatacagttctgcgtggccgctgcgcagtacattgggtgactcccgacggcttccctgtgtggcaggaatacaagaagcctattcagacgcgcttgaacctgatgttcctcggtcagttccgcttacagcctaccattaacaccaacaaagatagcgagattgatgcacacaaacaggagtctggtatcgctcctaactttgtacacagccaagacggtaaccaccttcgtatgactgtagtgtgggcacacgagaagtacggaatcgaatcttttgcactgattcacgactccttcggtaccattccggctgacgctgcgaacctgttcaaagcagtgcgcgaaactatggtttcgacatatgagtcttgtgatgtactggctgatttctacgaccagttcgctgaccagttgcacgagtctcaattggacaaaatgccagcacttccggctaaaggtaacttgaacctccgtgacatcttaaaatcggacttcgcgttcgcg

SEQ ID NO: 364 - protein, 890 aa, synthetic construct
  REGION 1..890: note = Variant of RNA polymerase
MHHHHHHMNTINIAKNDFSDIELAAIPFNTLADHYGERLAREQLALEHESYEMGEARFRKMFERQLKAGEVADNAAAKPLITTLLPKMIARINDWFEEVKAKRGKRPTAFQFLQEIKPEAVAYITIKTTLACLTSADNTTVQAVASAIGRAIEDEARFGRIRDLEAKHFKKNVEEQLNKRVGHVYKKAFMQVVEADMLSKGLLGGEAWSSWHKEDSIHVGVRCIEMLIESTGMVSLHRQNAGVVGQDSETIELAPEYAEAIATRAGALAGISPMFQPCVVPPKPWTGITGGGYWAAGRKPLQLVRTRSLAALRRYEEVSMPEVIKAVNIAQNTAWRVNKKVLDVANAITQWQHCPVADVPAMDRGEMPARPLDIDTNEIALKAWKKEASAFYRKDKARVSRRLSMEFMLSQANKFANYKAIWFPQNMDWRGRVYAVPMFNPQGNDMTKGLLTFAQYKPIGEDGFYWLKIHGANTAGVDKVPFPQRIKFVEDNHTNIMECAKAPLENTWWAEQDSPFCFLAFCFEYAGVINHGLSYNCSLPLAFDGSCSGIQHFSAMLRDEIGGKAVNLLPSAEVQDIYRIVSDKVNEVLKQDLINGTSTTLETVTDKKTGEITERTKYGTKVMAQWWLEHGVNRGVTKRSVMTLVYGSKEFGFRDQVLSDTIQPAIDNGKGDMFLNPNQAAGYMAKLIWNAVSVTVVAAVEAMNWLKSAAKLLAAEVKDKKTDTVLRGRCAVHWVTPDGFPVWQEYKKPIQTRLNLMFLGQFRLQPTINTNKDSEIDAHKQESGIAPNFVHSQDGNHLRMTVVWAHEKYGIESFALIHDSFGTIPADAANLFKAVRETMVSTYESCDVLADFYDQFADQLHESQLDKMPALPAKGNLNLRDILKSDFAFA

SEQ ID NO: 365 - DNA, 2670 bp, synthetic construct
  misc_feature 1..2670: note = Variant of RNA polymerase
  source 1..2670: mol_type = other DNA
atgcaccatcaccatcaccatatgaacacgattaacatcgctaagaacgacttctctgacatcgaactggctgctatcccgttcaacactctggctgaccattacggtgagcgtttagctcgcgaacagttggcccttgagcatgagtcttacgagatgggtgaagcacgcttccgcaagatgtttgagcgtcaacttaaagctggtgaggttgcggataacgctgccgccaagcctctcatcactaccctactccctaagatgattgcacgcatcaacgactggtttgaggaagtgaaagctaagcgcggcaagcgcccgacagccttccagttcctgcaagaaatcaagccggaagccgtagcgtacatcaccattaagaccactctggcttgcctaaccagtgcggacaatacaaccgttcaggctgtagcaagcgcaatcggtcgggccattgaggacgaggctcgcttcggtcgtatccgtgaccttgaagctaagcacttcaagaaaaacgttgaggaacaactcaacccgcgcgtagggcacgtctacaagaaagcatttatgcaagttgtcgaggctgacatgctctctaagggtctactcggtggcgaggcgtggtcttcgtggcataaggaagactctattcatgtaggagtacgctgcatcgagatgctcattgagtcaaccggaatggttagcttacaccgccaaaatgctggcgtagtaggtcaagactctgagactatcgaactcgcacctgaatacgctgaggctatcgcaacccgtgcaggtgcgctggctggcatctctccgatgttccaaccttgcgtagttcctcctaagccgtggactggcattactggtggtggctattgggctgcggggcgcaaacccctgcagttagtacgtactcgcagtctggcggcgcttcgccgctatgaagaagtgtcgatgccggaggtcatcaaagcagtcaacattgcgcagaatacagcatggcgtgtgaacaagaaagttctcgacgtagcgaatgcaatcacccaatggcagcactgtccagtcgcggatgtgcctgcgatggatcgtggcgaaatgccagctcgtccgttggacatcgataccaacgagattgcacttaaagcgtggaagaaagaagcttccgcgttctaccgcaaagacaaagcacgcgttagccgtcgtctgtcaatggagtttatgttatctcaggcgaacaagtttgcgaattataaagcaatctggtttccgcaaaacatggattggcgtgggcgcgtgtacgctgtcccgatgttcaatcctcagggcaacgatatgacgaaaggcctgctgacctttgcgcagggtaaacccattggtgaagacggcttctattggctcaagattcatggcgcaaatacagctggagtggataaagtaccgtttccacaacgcatcaaatttgttgaggataaccatacgaatattatggaatgcgcgaaagcaccgctggaaaacacttggtgggcggaacaggactcgccgttctgttttctggcgttctgctttgagtatgctggcgtcatcaatcacggtctgtcgtacaactgtagcttgcctctggcatttgatggtagttgctccggcattcaacatttctcagcgatgttacgcgacgaaattggcggcaaagctgtgaatctcctcccatctgcggaagtgcaggatatttatcgtatcgtcagcgacaaagttaacgaggtactgaaacaagatctgattaacggtacctctaccaccttggaaacggtgactgataagaagacaggcgaaattaccgaacgcacgaaatacgggaccaaagttatggcacagtggtggttagaacacggtgtgaatcgtggcgtcacgaaacgctcggttatgactttggtgtatgggagcaaagagtttggattccgcgatcaagtgctgagtgacaccattcaaccggcgatcgataacggcaaaggtgacatgtttctgaatccgaatcaggctgctggttacatggcgaaactgatctggaacgcagtgtccgtcaccgtagtcgcagcagttgaggcgatgaactggctgaaaagtgcggcgaaattacttgctgctgaagtgaaggataagaagacggatacagttctgcgtggccgctgcgcagtacattgggtgactcccgacggcttccctgtgtggcaggaatacaagaagcctattcagacgcgcttgaacctgatgttcctcggtcagttccgcttacagcctaccattaacaccaacaaagatagcgagattgatgcacacaaacaggagtctggtatcgctcctaactttgtacacagccaagacggtaaccaccttcgtatgactgtagtgtgggcacacgagaagtacggaatcgaatcttttgcactgattcacgactccttcggtaccattccggctgacgctgcgaacctgttcaaagcagtgcgcgaaactatggtttcgacatatgagtcttgtgatgtactggctgatttctacgaccagttcgctgaccagttgcacgagtctcaattggacaaaatgccagcacttccggctaaaggtaacttgaacctccgtgacatcttaaaatcggacttcgcgttcgcg

SEQ ID NO: 366 - protein, 890 aa, synthetic construct
  REGION 1..890: note = Variant of RNA polymerase
MHHHHHHMNTINIAKNDFSDIELAAIPFNTLADHYGERLAREQLALEHESYEMGEARFRKMFERQLKAGEVADNAAAKPLITTLLPKMIARINDWFEEVKAKRGKRPTAFQFLQEIKPEAVAYITIKTTLACLTSADNTTVQAVASAIGRAIEDEARFGRIRDLEAKHFKKNVEEQLNPRVGHVYKKAFMQVVEADMLSKGLLGGEAWSSWHKEDSIHVGVRCIEMLIESTGMVSLHRQNAGVVGQDSETIELAPEYAEAIATRAGALAGISPMFQPCVVPPKPWTGITGGGYWAAGRKPLQLVRTRSLAALRRYEEVSMPEVIKAVNIAQNTAWRVNKKVLDVANAITQWQHCPVADVPAMDRGEMPARPLDIDTNEIALKAWKKEASAFYRKDKARVSRRLSMEFMLSQANKFANYKAIWFPQNMDWRGRVYAVPMFNPQGNDMTKGLLTFAQGKPIGEDGFYWLKIHGANTAGVDKVPFPQRIKFVEDNHTNIMECAKAPLENTWWAEQDSPFCFLAFCFEYAGVINHGLSYNCSLPLAFDGSCSGIQHFSAMLRDEIGGKAVNLLPSAEVQDIYRIVSDKVNEVLKQDLINGTSTTLETVTDKKTGEITERTKYGTKVMAQWWLEHGVNRGVTKRSVMTLVYGSKEFGFRDQVLSDTIQPAIDNGKGDMFLNPNQAAGYMAKLIWNAVSVTVVAAVEAMNWLKSAAKLLAAEVKDKKTDTVLRGRCAVHWVTPDGFPVWQEYKKPIQTRLNLMFLGQFRLQPTINTNKDSEIDAHKQESGIAPNFVHSQDGNHLRMTVVWAHEKYGIESFALIHDSFGTIPADAANLFKAVRETMVSTYESCDVLADFYDQFADQLHESQLDKMPALPAKGNLNLRDILKSDFAFA

SEQ ID NO: 367 - DNA, 2670 bp, synthetic construct
  misc_feature 1..2670: note = Variant of RNA polymerase
  source 1..2670: mol_type = other DNA
atgcaccatcaccatcaccatatgaacacgattaacatcgctaagaacgacttctctgacatcgaactggctgctatcccgttcaacactctggctgaccattacggtgagcgtttagctcgcgaacagttggcccttgagcatgagtcttacgagatgggtgaagcacgcttccgcaagatgtttgagcgtcaacttaaagctggtgaggttgcggataacgctgccgccaagcctctcatcactaccctactccctaagatgattgcacgcatcaacgactggtttgaggaagtgaaagctaagcgcggcaagcgcccgacagccttccagttcctgcaagaaatcaagccggaagccgtagcgtacatcaccattaagaccactctggcttgcctaaccagtgcggacaatacaaccgttcaggctgtagcaagcgcaatcggtcgggccattgaggacgaggctcgcttcggtcgtatccgtgaccttgaagctaagcacttcaagaaaaacgttgaggaacaactcaacaagcgcgtagggcacgtctacaagaaagcatttatgcaagttgtcagggctgacatgctctctaagggtctactcggtggcgaggcgtggtcttcgtggcataaggaagactctattcatgtaggagtacgctgcatcgagatgctcattgagtcaaccggaatggttagcttacaccgccaaaatgctggcgtagtaggtcaagactctgagactatcgaactcgcacctgaatacgctgaggctatcgcaacccgtgcaggtgcgctggctggcatctctccgatgttccaaccttgcgtagttcctcctaagccgtggactggcattactggtggtggctattgggctgcggggcgcaaacccctgcagttagtacgtactcgcagtctggcggcgcttcgccgctatgaagaagtgtcgatgccggaggtcatcaaagcagtcaacattgcgcagaatacagcatggcgtgtgaacaagaaagttctcgacgtagcgaatgcaatcacccaatggcagcactgtccagtcgcggatgtgcctgcgatggatcgtggcgaaatgccagctcgtccgttggacatcgataccaacgagattgcacttaaagcgtggaagaaagaagcttccgcgttctaccgcaaagacaaagcacgcgttagccgtcgtctgtcaatggagtttatgttatctcaggcgaacaagtttgcgaattataaagcaatctggtttccgcaaaacatggattggcgtgggcgcgtgtacgctgtcccgatgttcaatcctcagggcaacgatatgacgaaaggcctgctgacctttgcgcagggtaaacccattggtgaagacggcttctattggctcaagattcatggcgcaaatacagctggagtggataaagtaccgtttccacaacgcatcaaatttgttgaggataaccatacgaatattatggaatgcgcgaaagcaccgctggaaaacacttggtgggcggaacaggactcgccgttctgttttctggcgttctgctttgagtatgctggcgtcatcaatcacggtctgtcgtacaactgtagcttgcctctggcatttgatggtagttgctccggcattcaacatttctcagcgatgttacgcgacgaaattggcggcaaagctgtgaatctcctcccatctgcggaagtgcaggatatttatcgtatcgtcagcgacaaagttaacgaggtactgaaacaagatctgattaacggtacctctaccaccttggaaacggtgactgataagaagacaggcgaaattaccgaacgcacgaaatacgggaccaaagttatggcacagtggtggttagaacacggtgtgaatcgtggcgtcacgaaacgctcggttatgactttggtgtatgggagcaaagagtttggattccgcgatcaagtgctgagtgacaccattcaaccggcgatcgataacggcaaaggtgacatgtttctgaatccgaatcaggctgctggttacatggcgaaactgatctggaacgcagtgtccgtcaccgtagtcgcagcagttgaggcgatgaactggctgaaaagtgcggcgaaattacttgctgctgaagtgaaggataagaagacggatacagttctgcgtggccgctgcgcagtacattgggtgactcccgacggcttccctgtgtggcaggaatacaagaagcctattcagacgcgcttgaacctgatgttcctcggtcagttccgcttacagcctaccattaacaccaacaaagatagcgagattgatgcacacaaacaggagtctggtatcgctcctaactttgtacacagccaagacggtaaccaccttcgtatgactgtagtgtgggcacacgagaagtacggaatcgaatcttttgcactgattcacgactccttcggtaccattccggctgacgctgcgaacctgttcaaagcagtgcgcgaaactatggtttcgacatatgagtcttgtgatgtactggctgatttctacgaccagttcgctgaccagttgcacgagtctcaattggacaaaatgccagcacttccggctaaaggtaacttgaacctccgtgacatcttaaaatcggacttcgcgttcgcg

SEQ ID NO: 368 - protein, 890 aa, synthetic construct
  REGION 1..890: note = Variant of RNA polymerase
MHHHHHHMNTINIAKNDFSDIELAAIPFNTLADHYGERLAREQLALEHESYEMGEARFRKMFERQLKAGEVADNAAAKPLITTLLPKMIARINDWFEEVKAKRGKRPTAFQFLQEIKPEAVAYITIKTTLACLTSADNTTVQAVASAIGRAIEDEARFGRIRDLEAKHFKKNVEEQLNKRVGHVYKKAFMQVVRADMLSKGLLGGEAWSSWHKEDSIHVGVRCIEMLIESTGMVSLHRQNAGVVGQDSETIELAPEYAEAIATRAGALAGISPMFQPCVVPPKPWTGITGGGYWAAGRKPLQLVRTRSLAALRRYEEVSMPEVIKAVNIAQNTAWRVNKKVLDVANAITQWQHCPVADVPAMDRGEMPARPLDIDTNEIALKAWKKEASAFYRKDKARVSRRLSMEFMLSQANKFANYKAIWFPQNMDWRGRVYAVPMFNPQGNDMTKGLLTFAQGKPIGEDGFYWLKIHGANTAGVDKVPFPQRIKFVEDNHTNIMECAKAPLENTWWAEQDSPFCFLAFCFEYAGVINHGLSYNCSLPLAFDGSCSGIQHFSAMLRDEIGGKAVNLLPSAEVQDIYRIVSDKVNEVLKQDLINGTSTTLETVTDKKTGEITERTKYGTKVMAQWWLEHGVNRGVTKRSVMTLVYGSKEFGFRDQVLSDTIQPAIDNGKGDMFLNPNQAAGYMAKLIWNAVSVTVVAAVEAMNWLKSAAKLLAAEVKDKKTDTVLRGRCAVHWVTPDGFPVWQEYKKPIQTRLNLMFLGQFRLQPTINTNKDSEIDAHKQESGIAPNFVHSQDGNHLRMTVVWAHEKYGIESFALIHDSFGTIPADAANLFKAVRETMVSTYESCDVLADFYDQFADQLHESQLDKMPALPAKGNLNLRDILKSDFAFA

SEQ ID NO: 369 - DNA, 2670 bp, synthetic construct
  misc_feature 1..2670: note = Variant of RNA polymerase
  source 1..2670: mol_type = other DNA
atgcaccatcaccatcaccatatgaacacgattaacatcgctaagaacgacttctctgacatcgaactggctgctatcccgttcaacactctggctgaccattacggtgagcgtttagctcgcgaacagttggcccttgagcatgagtcttacgagatgggtgaagcacgcttccgcaagatgtttgagcgtcaacttaaagctggtgaggttgcggataacgctgccgccaagcctctcatcactaccctactccctaagatgattgcacgcatcaacgactggtttgaggaagtgaaagctaagcgcggcaagcgcccgacagccttccagttcctgcaagaaatcaagccggaagccgtagcgtacatcaccattaagaccactctggcttgcctaaccagtgcggacaatacaaccgttcaggctgtagcaagcgcaatcggtcgggccattgaggacgaggctcgcttcggtcgtatccgtgaccttgaagctaagcacttcaagaaaaacgttgaggaacaactcaacaagcgcgtagggcacgtctacaagaaagcatttatgcaagttgtcgaggctgacatgctctctaagggtctactcggtggcgaggcgtggtcttcgtggcataaggaagactctattcatgtaggagtacgctgcatcgagatgctcattgagtcaaccggaatggttagcttacaccgccaaaatgctggcgtagtaggtcaagactctgagactatcgaactcgcacctgaatacgctgaggctatcgcaacccgtgcaggtgcgctggctggcatctctccgatgttccaaccttgcgtagttcctcctaagccgtggactggcattactggtggtggctattgggctgcggggcgcaaacccctgcagttagtacgtactcgcagtctggcggcgcttcgccgctatgaagaagtgtcgatgccggaggtcatcaaagcagtcaacattgcgcagaatacagcatggcgtgtgaacaagaaagttctcgacgtagcgaatgcaatcacccaatggcagcactgtccagtcgcggatgtgcctgcgatggatcgtggcgaaatgccagctcgtccgttggacatcgataccaacgagattgcacttaaagcgtggaagaaagaagcttccgcgttctaccgcaaagacaaagcacgcgttagccgtcgtctgtcaatggagtttatgttatctcaggcgaacaagtttgcgaattataaagcaatctggtttccgcaaaacatggattggcgtgggcgcgtgtacgctgtcccgatgttcaatcctcagggcaacgatatgacgaaaggcctgctgacctttgcgcagggtaaacccattggtgaagacggcttctattggctccgtattcatggcgcaaatacagctggagtggataaagtaccgtttccacaacgcatcaaatttgttgaggataaccatacgaatattatggaatgcgcgaaagcaccgctggaaaacacttggtgggcggaacaggactcgccgttctgttttctggcgttctgctttgagtatgctggcgtcatcaatcacggtctgtcgtacaactgtagcttgcctctggcatttgatggtagttgctccggcattcaacatttctcagcgatgttacgcgacgaaattggcggcaaagctgtgaatctcctcccatctgcggaagtgcaggatatttatcgtatcgtcagcgacaaagttaacgaggtactgaaacaagatctgattaacggtacctctaccaccttggaaacggtgactgataagaagacaggcgaaattaccgaacgcacgaaatacgggaccaaagttatggcacagtggtggttagaacacggtgtgaatcgtggcgtcacgaaacgctcggttatgactttggtgtatgggagcaaagagtttggattccgcgatcaagtgctgagtgacaccattcaaccggcgatcgataacggcaaaggtgacatgtttctgaatccgaatcaggctgctggttacatggcgaaactgatctggaacgcagtgtccgtcaccgtagtcgcagcagttgaggcgatgaactggctgaaaagtgcggcgaaattacttgctgctgaagtgaaggataagaagacggatacagttctgcgtggccgctgcgcagtacattgggtgactcccgacggcttccctgtgtggcaggaatacaagaagcctattcagacgcgcttgaacctgatgttcctcggtcagttccgcttacagcctaccattaacaccaacaaagatagcgagattgatgcacacaaacaggagtctggtatcgctcctaactttgtacacagccaagacggtaaccaccttcgtatgactgtagtgtgggcacacgagaagtacggaatcgaatcttttgcactgattcacgactccttcggtaccattccggctgacgctgcgaacctgttcaaagcagtgcgcgaaactatggtttcgacatatgagtcttgtgatgtactggctgatttctacgaccagttcgctgaccagttgcacgagtctcaattggacaaaatgccagcacttccggctaaaggtaacttgaacctccgtgacatcttaaaatcggacttcgcgttcgcg

SEQ ID NO: 370 - protein, 890 aa, synthetic construct
  REGION 1..890: note = Variant of RNA polymerase
MHHHHHHMNTINIAKNDFSDIELAAIPFNTLADHYGERLAREQLALEHESYEMGEARFRKMFERQLKAGEVADNAAAKPLITTLLPKMIARINDWFEEVKAKRGKRPTAFQFLQEIKPEAVAYITIKTTLACLTSADNTTVQAVASAIGRAIEDEARFGRIRDLEAKHFKKNVEEQLNKRVGHVYKKAFMQVVEADMLSKGLLGGEAWSSWHKEDSIHVGVRCIEMLIESTGMVSLHRQNAGVVGQDSETIELAPEYAEAIATRAGALAGISPMFQPCVVPPKPWTGITGGGYWAAGRKPLQLVRTRSLAALRRYEEVSMPEVIKAVNIAQNTAWRVNKKVLDVANAITQWQHCPVADVPAMDRGEMPARPLDIDTNEIALKAWKKEASAFYRKDKARVSRRLSMEFMLSQANKFANYKAIWFPQNMDWRGRVYAVPMFNPQGNDMTKGLLTFAQGKPIGEDGFYWLRIHGANTAGVDKVPFPQRIKFVEDNHTNIMECAKAPLENTWWAEQDSPFCFLAFCFEYAGVINHGLSYNCSLPLAFDGSCSGIQHFSAMLRDEIGGKAVNLLPSAEVQDIYRIVSDKVNEVLKQDLINGTSTTLETVTDKKTGEITERTKYGTKVMAQWWLEHGVNRGVTKRSVMTLVYGSKEFGFRDQVLSDTIQPAIDNGKGDMFLNPNQAAGYMAKLIWNAVSVTVVAAVEAMNWLKSAAKLLAAEVKDKKTDTVLRGRCAVHWVTPDGFPVWQEYKKPIQTRLNLMFLGQFRLQPTINTNKDSEIDAHKQESGIAPNFVHSQDGNHLRMTVVWAHEKYGIESFALIHDSFGTIPADAANLFKAVRETMVSTYESCDVLADFYDQFADQLHESQLDKMPALPAKGNLNLRDILKSDFAFA

SEQ ID NO: 371 - DNA, 2670 bp, synthetic construct
  misc_feature 1..2670: note = Variant of RNA polymerase
  source 1..2670: mol_type = other DNA
atgcaccatcaccatcaccatatgaacacgattaacatcgctaagaacgacttctctgacatcgaactggctgctatcccgttcaacactctggctgaccattacggtgagcgtttagctcgcgaacagttggcccttgagcatgagtcttacgagatgggtgaagcacgcttccgcaagatgtttgagcgtcaacttaaagctggtgaggttgcggataacgctgccgccaagcctctcatcactaccctactccctaagatgattgcacgcatcaacgactggtttgaggaagtgaaagctaagcgcggcaagcgcccgacagccttccagttcctgcaagaaatcaagccggaagccgtagcgtacatcaccattaagaccactctggcttgcctaaccagtgcggacaatacaaccgttcaggctgtagcaagcgcaatcggtcgggccattgaggacgaggctcgcttcggtcgtatccgtgaccttgaagctaagcacttcaagaaaaacgttgaggaacaactcaacaagcgcgtagggcacgtctacaagaaagcatttatgcaagttattgaggctgacatgctctctaagggtctactcggtggcgaggcgtggtcttcgtggcataaggaagactctattcatgtaggagtacgctgcatcgagatgctcattgagtcaaccggaatggttagcttacaccgccaaaatgctggcgtagtaggtcaagactctgagactatcgaactcgcacctgaatacgctgaggctatcgcaacccgtgcaggtgcgctggctggcatctctccgatgttccaaccttgcgtagttcctcctaagccgtggactggcattactggtggtggctattgggctgcggggcgcaaacccctgcagttagtacgtactcgcagtctggcggcgcttcgccgctatgaagaagtgtcgatgccggaggtcatcaaagcagtcaacattgcgcagaatacagcatggcgtgtgaacaagaaagttctcgacgtagcgaatgcaatcacccaatggcagcactgtccagtcgcggatgtgcctgcgatggatcgtggcgaaatgccagctcgtccgttggacatcgataccaacgagattgcacttaaagcgtggaagaaagaagcttccgcgttctaccgcaaagacaaagcacgcgttagccgtcgtctgtcaatggagtttatgttatctcaggcgaacaagtttgcgaattataaagcaatctggtttccgcaaaacatggattggcgtgggcgcgtgtacgctgtcccgatgttcaatcctcagggcaacgatatgacgaaaggcctgctgacctttgcgcagggtaaacccattggtgaagacggcttctattggctcaagattcatggcgcaaatacagctggagtggataaagtaccgtttccacaacgcatcaaatttgttgaggataaccatacgaatattatggaatgcgcgaaagcaccgctggaaaacacttggtgggcggaacaggactcgccgttctgttttctggcgttctgctttgagtatgctggcgtcatcaatcacggtctgtcgtacaactgtagcttgcctctggcatttgatggtagttgctccggcattcaacatttctcagcgatgttacgcgacgaaattggcggcaaagctgtgaatctcctcccatctgcggaagtgcaggatatttatcgtatcgtcagcgacaaagttaacgaggtactgaaacaagatctgattaacggtacctctaccaccttggaaacggtgactgataagaagacaggcgaaattaccgaacgcacgaaatacgggaccaaagttatggcacagtggtggttagaacacggtgtgaatcgtggcgtcacgaaacgctcggttatgactttggtgtatgggagcaaagagtttggattccgcgatcaagtgctgagtgacaccattcaaccggcgatcgataacggcaaaggtgacatgtttctgaatccgaatcaggctgctggttacatggcgaaactgatctggaacgcagtgtccgtcaccgtagtcgcagcagttgaggcgatgaactggctgaaaagtgcggcgaaattacttgctgctgaagtgaaggataagaagacggatacagttctgcgtggccgctgcgcagtacattgggtgactcccgacggcttccctgtgtggcaggaatacaagaagcctattcagacgcgcttgaacctgatgttcctcggtcagttccgcttacagcctaccattaacaccaacaaagatagcgagattgatgcacacaaacaggagtctggtatcgctcctaactttgtacacagccaagacggtaaccaccttcgtatgactgtagtgtgggcacacgagaagtacggaatcgaatcttttgcactgattcacgactccttcggtaccattccggctgacgctgcgaacctgttcaaagcagtgcgcgaaactatggtttcgacatatgagtcttgtgatgtactggctgatttctacgaccagttcgctgaccagttgcacgagtctcaattggacaaaatgccagcacttccggctaaaggtaacttgaacctccgtgacatcttaaaatcggacttcgcgttcgcg

SEQ ID NO: 372 - protein, 890 aa, synthetic construct
  REGION 1..890: note = Variant of RNA polymerase
MHHHHHHMNTINIAKNDFSDIELAAIPFNTLADHYGERLAREQLALEHESYEMGEARFRKMFERQLKAGEVADNAAAKPLITTLLPKMIARINDWFEEVKAKRGKRPTAFQFLQEIKPEAVAYITIKTTLACLTSADNTTVQAVASAIGRAIEDEARFGRIRDLEAKHFKKNVEEQLNKRVGHVYKKAFMQVIEADMLSKGLLGGEAWSSWHKEDSIHVGVRCIEMLIESTGMVSLHRQNAGVVGQDSETIELAPEYAEAIATRAGALAGISPMFQPCVVPPKPWTGITGGGYWAAGRKPLQLVRTRSLAALRRYEEVSMPEVIKAVNIAQNTAWRVNKKVLDVANAITQWQHCPVADVPAMDRGEMPARPLDIDTNEIALKAWKKEASAFYRKDKARVSRRLSMEFMLSQANKFANYKAIWFPQNMDWRGRVYAVPMFNPQGNDMTKGLLTFAQGKPIGEDGFYWLKIHGANTAGVDKVPFPQRIKFVEDNHTNIMECAKAPLENTWWAEQDSPFCFLAFCFEYAGVINHGLSYNCSLPLAFDGSCSGIQHFSAMLRDEIGGKAVNLLPSAEVQDIYRIVSDKVNEVLKQDLINGTSTTLETVTDKKTGEITERTKYGTKVMAQWWLEHGVNRGVTKRSVMTLVYGSKEFGFRDQVLSDTIQPAIDNGKGDMFLNPNQAAGYMAKLIWNAVSVTVVAAVEAMNWLKSAAKLLAAEVKDKKTDTVLRGRCAVHWVTPDGFPVWQEYKKPIQTRLNLMFLGQFRLQPTINTNKDSEIDAHKQESGIAPNFVHSQDGNHLRMTVVWAHEKYGIESFALIHDSFGTIPADAANLFKAVRETMVSTYESCDVLADFYDQFADQLHESQLDKMPALPAKGNLNLRDILKSDFAFA

SEQ ID NO: 373 - DNA, 2670 bp, synthetic construct
  misc_feature 1..2670: note = Variant of RNA polymerase
  source 1..2670: mol_type = other DNA
atgcaccatcaccatcaccatatgaacacgattaacatcgctaagaacgacttctctgacatcgaactggctgctatcccgttcaacactctggctgaccattacggtgagcgtttagctcgcgaacagttggcccttgagcatgagtcttacgagatgggtgaagcacgcttccgcaagatgtttgagcgtcaacttaaagctggtgaggttgcggataacgctgccgccaagcctctcatcactaccctactccctaagatgattgcacgcatcaacgactggtttgaggaagtgaaagctaagcgcggcaagcgcccgacagccttccagttcctgcaagaaatcaagccggaagccgtagcgtacatcaccattaagaccactctggcttgcctaaccagtgcggacaatacaaccgttcaggctgtagcaagcgcaatcggtcgggccattgaggacgaggctcgcttcggtcgtatccgtgaccttgaagctaagcacttcaagaaaaacgttgaggaacaactcaacaagcgcgtagggcacgtctacaagaaagcatttatgcaagttgtcgaggctgacatgctctctaagggtctactcggtggcgaggcgtggtcttcgtggcataaggaagactctattcatgtaggagtacgctgcatcgagatgctcattgagtcaaccggaatggttagcttacaccgccaaaatgctggcgtagtaggtcaagactctgagactatcgaactcgcacctgaatacgctgaggctatcgcaacccgtgcaggtgcgctggctggcatctctccgatgttccaaccttgcgtagttcctcctaagccgtggactggcattactggtggtggctattgggctgcggggcgcaaacccctgcagttagtacgtactcgcagtctggcggcgcttcgccgctatgaagaagtgtcgatgccggaggtcatcaaagcagtcaacattgcgcagaatacagcatggcgtgtgaacaagaaagttctcgacgtagcgaatgcaatcacccaatggcagcactgtccagtcgcggatgtgcctgcgatggatcgtggcgaaatgccagctcgtccgttggacatcgataccaacgagattgcacttaaagcgtggaagaaagaagcttccgcgttctaccgcaaagacaaagcacgcgttagccgtcgtctgtcaatggagtttatgttatctcaggcgaacaagtttgcgaattataaagcaatctggtttccgcaaaacatggattggcgtgggcgcgtgtacgctgtcccgatgttcaatcctcagggcaacgatatgacgaaaggcctgctgacctttgcgcagggtaaacccattggtgaagacggcttctattggctcaagattcatggcgcaaatacagctggagtggataaagtaccgtttccacaacgcatcaaatttgttgaggataaccatacgaatattatggaatgcgcgaaagcaccgctggaaaacacttggtgggcggaacaggactcgccgttctgttttctggcgttctgctttgagtatgctggcgtcatcaatcacggtctgtcgtacaactgtagcttgcctctggcatttgatggtagttgctccggcattcaacatttctcagcgatgttacgcgacgaaattggcggcaaagctgtgaatctcctcccatctgcggaagtgcaggatatttatcgtatcgtcagcgacaaagttaacgaggtactgaaacaagatctgattaacggtacctctaccaccttggaaacggtgactgataagaagacaggcgaaattaccgaacgcacgaaatacgggaccaaagttatggcacagtggtggttagaacacggtgtgaatcgtggcgtcacgaaacgctcggttatgactttggtgtatgggagcaaagagtttggattccgcgatcaagtgctgagtgacaccattcaaccggcgatcgataacggcaaaggtgacatgtttctgaatccgaatcaggctgctggttacatggcgaaactgatctggaacgcagtgtccgtcaccgtagtcgcagcagttgaggcgatgaactggctgaaaagtgcggcgaaattacttgctgctgaagtgaaggatgcgaagacggatacagttctgcgtggccgctgcgcagtacattgggtgactcccgacggcttccctgtgtggcaggaatacaagaagcctattcagacgcgcttgaacctgatgttcctcggtcagttccgcttacagcctaccattaacaccaacaaagatagcgagattgatgcacacaaacaggagtctggtatcgctcctaactttgtacacagccaagacggtaaccaccttcgtatgactgtagtgtgggcacacgagaagtacggaatcgaatcttttgcactgattcacgactccttcggtaccattccggctgacgctgcgaacctgttcaaagcagtgcgcgaaactatggtttcgacatatgagtcttgtgatgtactggctgatttctacgaccagttcgctgaccagttgcacgagtctcaattggacaaaatgccagcacttccggctaaaggtaacttgaacctccgtgacatcttaaaatcggacttcgcgttcgcg

SEQ ID NO: 374 - protein, 890 aa, synthetic construct
  REGION 1..890: note = Variant of RNA polymerase
MHHHHHHMNTINIAKNDFSDIELAAIPFNTLADHYGERLAREQLALEHESYEMGEARFRKMFERQLKAGEVADNAAAKPLITTLLPKMIARINDWFEEVKAKRGKRPTAFQFLQEIKPEAVAYITIKTTLACLTSADNTTVQAVASAIGRAIEDEARFGRIRDLEAKHFKKNVEEQLNKRVGHVYKKAFMQVVEADMLSKGLLGGEAWSSWHKEDSIHVGVRCIEMLIESTGMVSLHRQNAGVVGQDSETIELAPEYAEAIATRAGALAGISPMFQPCVVPPKPWTGITGGGYWAAGRKPLQLVRTRSLAALRRYEEVSMPEVIKAVNIAQNTAWRVNKKVLDVANAITQWQHCPVADVPAMDRGEMPARPLDIDTNEIALKAWKKEASAFYRKDKARVSRRLSMEFMLSQANKFANYKAIWFPQNMDWRGRVYAVPMFNPQGNDMTKGLLTFAQGKPIGEDGFYWLKIHGANTAGVDKVPFPQRIKFVEDNHTNIMECAKAPLENTWWAEQDSPFCFLAFCFEYAGVINHGLSYNCSLPLAFDGSCSGIQHFSAMLRDEIGGKAVNLLPSAEVQDIYRIVSDKVNEVLKQDLINGTSTTLETVTDKKTGEITERTKYGTKVMAQWWLEHGVNRGVTKRSVMTLVYGSKEFGFRDQVLSDTIQPAIDNGKGDMFLNPNQAAGYMAKLIWNAVSVTVVAAVEAMNWLKSAAKLLAAEVKDAKTDTVLRGRCAVHWVTPDGFPVWQEYKKPIQTRLNLMFLGQFRLQPTINTNKDSEIDAHKQESGIAPNFVHSQDGNHLRMTVVWAHEKYGIESFALIHDSFGTIPADAANLFKAVRETMVSTYESCDVLADFYDQFADQLHESQLDKMPALPAKGNLNLRDILKSDFAFA

SEQ ID NO: 375 - DNA, 2670 bp, synthetic construct
  misc_feature 1..2670: note = Variant of RNA polymerase
  source 1..2670: mol_type = other DNA
atgcaccatcaccatcaccatatgaacacgattaacatcgctaagaacgacttctctgacatcgaactggctgctatcccgttcaacactctggctgaccattacggtgagcgtttagctcgcgaacagttggcccttgagcatgagtcttacgagatgggtgaagcacgcttccgcaagatgtttgagcgtcaacttaaagctggtgaggttgcggataacgctgccgccaagcctctcatcactaccctactccctaagatgattgcacgcatcaacgactggtttgaggaagtgaaagctaagcgcggcaagcgcccgacagccttccagttcctgcaagaaatcaagccggaagccgtagcgtacatcaccattaagaccactctggcttgcctaaccagtgcggacaatacaaccgttcaggctgtagcaagcgcaatcggtcgggccattgaggacgaggctcgcttcggtcgtatccgtgaccttgaagctaagcacttcaagaaaaacgttgaggaacaactcaacaagcgcgtagggcacgtctacaagaaagcatttatgcaagttgtcgaggctgacatgctctctaagggtctactcggtggcgaggcgtggtcttcgtggcataaggaagactctattcatgtaggagtacgctgcatcgagatgctcattgagtcaaccggaatggttagcttacaccgccaaaatgctggcgtagtaggtcaagactctgagactatcgaactcgcacctgaatacgctgaggctatcgcaacccgtgcaggtgcgctggctggcatctctccgatgttccaaccttgcgtagttcctcctaagccgtggactggcattactggtggtggctattgggctgcggggcgcaaacccctgcagttagtacgtactcgcagtctggcggcgcttcgccgctatgaagaagtgtcgatgccggaggtcatcaaagcagtcaacattgcgcagaatacagcatggcgtgtgaacaagaaagttctcgacgtagcgaatgcaatcacccaatggcagcactgtccagtcgcggatgtgcctgcgatggatcgtggcgaaatgccagctcgtccgttggacatcgataccaacgagattgcacttaaagcgtggaagaaagaagcttccgcgttctaccgcaaagacaaagcacgcgttagccgtcgtctgtcaatggagtttatgttatctcaggcgaacaagtttgcgaattataaagcaatctggtttccgcaaaacatggattggcgtgggcgcgtgtacgctgtcccgatgttcaatcctcagggcaacgatatgacgaaaggcctgctgacctttgcgcagggtaaacccattggtgaagacggcttctattggctcaagattcatggcgcaaatacagctggagtggataaagtaccgtttccacaacgcatcaaatttgttgaggataaccatacgaatattatggaatgcgcgaaagcaccgctggaaaacacttggtgggcggaacaggactcgccgttctgttttctggcgttctgctttgagtatgctggcgtcatcaatcacggtctggagtacaactgtagcttgcctctggcatttgatggtagttgctccggcattcaacatttctcagcgatgttacgcgacgaaattggcggcaaagctgtgaatctcctcccatctgcggaagtgcaggatatttatcgtatcgtcagcgacaaagttaacgaggtactgaaacaagatctgattaacggtacctctaccaccttggaaacggtgactgataagaagacaggcgaaattaccgaacgcacgaaatacgggaccaaagttatggcacagtggtggttagaacacggtgtgaatcgtggcgtcacgaaacgctcggttatgactttggtgtatgggagcaaagagtttggattccgcgatcaagtgctgagtgacaccattcaaccggcgatcgataacggcaaaggtgacatgtttctgaatccgaatcaggctgctggttacatggcgaaactgatctggaacgcagtgtccgtcaccgtagtcgcagcagttgaggcgatgaactggctgaaaagtgcggcgaaattacttgctgctgaagtgaaggataagaagacggatacagttctgcgtggccgctgcgcagtacattgggtgactcccgacggcttccctgtgtggcaggaatacaagaagcctattcagacgcgcttgaacctgatgttcctcggtcagttccgcttacagcctaccattaacaccaacaaagatagcgagattgatgcacacaaacaggagtctggtatcgctcctaactttgtacacagccaagacggtaaccaccttcgtatgactgtagtgtgggcacacgagaagtacggaatcgaatcttttgcactgattcacgactccttcggtaccattccggctgacgctgcgaacctgttcaaagcagtgcgcgaaactatggtttcgacatatgagtcttgtgatgtactggctgatttctacgaccagttcgctgaccagttgcacgagtctcaattggacaaaatgccagcacttccggctaaaggtaacttgaacctccgtgacatcttaaaatcggacttcgcgttcgcg

SEQ ID NO: 376 - protein, 890 aa, synthetic construct
  REGION 1..890: note = Variant of RNA polymerase
MHHHHHHMNTINIAKNDFSDIELAAIPFNTLADHYGERLAREQLALEHESYEMGEARFRKMFERQLKAGEVADNAAAKPLITTLLPKMIARINDWFEEVKAKRGKRPTAFQFLQEIKPEAVAYITIKTTLACLTSADNTTVQAVASAIGRAIEDEARFGRIRDLEAKHFKKNVEEQLNKRVGHVYKKAFMQVVEADMLSKGLLGGEAWSSWHKEDSIHVGVRCIEMLIESTGMVSLHRQNAGVVGQDSETIELAPEYAEAIATRAGALAGISPMFQPCVVPPKPWTGITGGGYWAAGRKPLQLVRTRSLAALRRYEEVSMPEVIKAVNIAQNTAWRVNKKVLDVANAITQWQHCPVADVPAMDRGEMPARPLDIDTNEIALKAWKKEASAFYRKDKARVSRRLSMEFMLSQANKFANYKAIWFPQNMDWRGRVYAVPMFNPQGNDMTKGLLTFAQGKPIGEDGFYWLKIHGANTAGVDKVPFPQRIKFVEDNHTNIMECAKAPLENTWWAEQDSPFCFLAFCFEYAGVINHGLEYNCSLPLAFDGSCSGIQHFSAMLRDEIGGKAVNLLPSAEVQDIYRIVSDKVNEVLKQDLINGTSTTLETVTDKKTGEITERTKYGTKVMAQWWLEHGVNRGVTKRSVMTLVYGSKEFGFRDQVLSDTIQPAIDNGKGDMFLNPNQAAGYMAKLIWNAVSVTVVAAVEAMNWLKSAAKLLAAEVKDKKTDTVLRGRCAVHWVTPDGFPVWQEYKKPIQTRLNLMFLGQFRLQPTINTNKDSEIDAHKQESGIAPNFVHSQDGNHLRMTVVWAHEKYGIESFALIHDSFGTIPADAANLFKAVRETMVSTYESCDVLADFYDQFADQLHESQLDKMPALPAKGNLNLRDILKSDFAFA

SEQ ID NO: 377 - DNA, 2670 bp, synthetic construct
  misc_feature 1..2670: note = Variant of RNA polymerase
  source 1..2670: mol_type = other DNA
atgcaccatcaccatcaccatatgaacacgattaacatcgctaagaacgacttctctgacatcgaactggctgctatcccgttcaacactctggctgaccattacggtgagcgtttagctcgcgaacagttggcccttgagcatgagtcttacgagatgggtgaagcacgcttccgcaagatgtttgagcgtcaacttaaagctggtgaggttgcggataacgctgccgccaagcctctcatcactaccctactccctaagatgattgcacgcatcaacgactggtttgaggaagtgaaagctaagcgcggcaagcgcccgacagccttccagttcctgcaagaaatcaagccggaagccgtagcgtacatcaccattaagaccactctggcttgcctaaccagtgcggacaatacaaccgttcaggctgtagcaagcgcaatcggtcgggccattgaggacgaggctcgcttcggtcgtatccgtgaccttgaagctaagcacttcaagaaaaacgttgaggaacaactcaacaagcgcgtagggcacgtctacaagaaagcatttatgcaagttgtcgaggctgacatgctctctaagggtctactcggtggcgaggcgtggtcttcgtggcataaggaagactctattcatgtaggagtacgctgcatcgagatgctcattgagtcaaccggaatggttagcttacaccgccaaaatgctggcgtagtaggtcaagactctgagactatcgaactcgcacctgaatacgctgaggctatcgcaacccgtgcaggtgcgctggctggcatctctccgatgttccaaccttgcgtagttcctcctaagccgtggactggcattactggtggtggctattgggctgcggggcgcaaacccctgcagttagtacgtactcgcagtctggcggcgcttcgccgctatgaagaagtgtcgatgccggaggtcatcaaagcagtcaacattgcgcagaatacagcatggcgtgtgaacaagaaagttctcgacgtagcgaatgcaatcacccaatggcagcactgtccagtcgcggatgtgcctgcgatggatcgtggcgaaatgccagctcgtccgttggacatcgataccaacgagattgcacttaaagcgtggaagaaagaagcttccgcgttctaccgcaaagacaaagcacgcgttagccgtcgtctgtcaatggagtttatgttatctcaggcgaacaagtttgcgaattataaagcaatctggtttccgcaaaacatggattggcgtgggcgcgtgtacgctgtcccgatgttcaatcctcagggcaacgatatgacgaaaggcctgctgacctttgcgcagggtaaacccattggtgaagacggcttctattggctcaagattcatggcgcaaatacagctggagtggataaagtaccgtttccacaacgcatcaaatttgttgaggataaccatacgaatattatggaatgcgcgaaagcaccgctggaaaacacttggtgggcggaacaggactcgccgttctgttttctggcgttctgctttgagtatgctggcgtcatcaatcacggtctgtcgtacaactgtagcttgcctctggcatttgatggtagttgctccggcattcaacatttctcagcgatgttacgcgacgaaattggcggcaaagctgtgaatctcctcccatctgcggaagtgcaggatatttatcgtatcgtcagcgacaaagttaacgaggtactgaaacaagatctgattaacggtacctctaccacctcggaaacggtgactgataagaagacaggcgaaattaccgaacgcacgaaatacgggaccaaagttatggcacagtggtggttagaacacggtgtgaatcgtggcgtcacgaaacgctcggttatgactttggtgtatgggagcaaagagtttggattccgcgatcaagtgctgagtgacaccattcaaccggcgatcgataacggcaaaggtgacatgtttctgaatccgaatcaggctgctggttacatggcgaaactgatctggaacgcagtgtccgtcaccgtagtcgcagcagttgaggcgatgaactggctgaaaagtgcggcgaaattacttgctgctgaagtgaaggataagaagacggatacagttctgcgtggccgctgcgcagtacattgggtgactcccgacggcttccctgtgtggcaggaatacaagaagcctattcagacgcgcttgaacctgatgttcctcggtcagttccgcttacagcctaccattaacaccaacaaagatagcgagattgatgcacacaaacaggagtctggtatcgctcctaactttgtacacagccaagacggtaaccaccttcgtatgactgtagtgtgggcacacgagaagtacggaatcgaatcttttgcactgattcacgactccttcggtaccattccggctgacgctgcgaacctgttcaaagcagtgcgcgaaactatggtttcgacatatgagtcttgtgatgtactggctgatttctacgaccagttcgctgaccagttgcacgagtctcaattggacaaaatgccagcacttccggctaaaggtaacttgaacctccgtgacatcttaaaatcggacttcgcgttcgcg

SEQ ID NO: 378 - protein, 890 aa, synthetic construct
  REGION 1..890: note = Variant of RNA polymerase
MHHHHHHMNTINIAKNDFSDIELAAIPFNTLADHYGERLAREQLALEHESYEMGEARFRKMFERQLKAGEVADNAAAKPLITTLLPKMIARINDWFEEVKAKRGKRPTAFQFLQEIKPEAVAYITIKTTLACLTSADNTTVQAVASAIGRAIEDEARFGRIRDLEAKHFKKNVEEQLNKRVGHVYKKAFMQVVEADMLSKGLLGGEAWSSWHKEDSIHVGVRCIEMLIESTGMVSLHRQNAGVVGQDSETIELAPEYAEAIATRAGALAGISPMFQPCVVPPKPWTGITGGGYWAAGRKPLQLVRTRSLAALRRYEEVSMPEVIKAVNIAQNTAWRVNKKVLDVANAITQWQHCPVADVPAMDRGEMPARPLDIDTNEIALKAWKKEASAFYRKDKARVSRRLSMEFMLSQANKFANYKAIWFPQNMDWRGRVYAVPMFNPQGNDMTKGLLTFAQGKPIGEDGFYWLKIHGANTAGVDKVPFPQRIKFVEDNHTNIMECAKAPLENTWWAEQDSPFCFLAFCFEYAGVINHGLSYNCSLPLAFDGSCSGIQHFSAMLRDEIGGKAVNLLPSAEVQDIYRIVSDKVNEVLKQDLINGTSTTSETVTDKKTGEITERTKYGTKVMAQWWLEHGVNRGVTKRSVMTLVYGSKEFGFRDQVLSDTIQPAIDNGKGDMFLNPNQAAGYMAKLIWNAVSVTVVAAVEAMNWLKSAAKLLAAEVKDKKTDTVLRGRCAVHWVTPDGFPVWQEYKKPIQTRLNLMFLGQFRLQPTINTNKDSEIDAHKQESGIAPNFVHSQDGNHLRMTVVWAHEKYGIESFALIHDSFGTIPADAANLFKAVRETMVSTYESCDVLADFYDQFADQLHESQLDKMPALPAKGNLNLRDILKSDFAFA

SEQ ID NO: 379 - DNA, 2670 bp, synthetic construct
  misc_feature 1..2670: note = Variant of RNA polymerase
  source 1..2670: mol_type = other DNA
atgcaccatcaccatcaccatatgaacacgattaacatcgctaagaacgacttctctgacatcgaactggctgctatcccgttcaacactctggctgaccattacggtgagcgtttagctcgcgaacagttggcccttgagcatgagtcttacgagatgggtgaactgcgcttccgcaagatgtttgagcgtcaacttaaagctggtgaggttgcggataacgctgccgccaagcctctcatcactaccctactccctaagatgattgcacgcatcaacgactggtttgaggaagtgaaagctaagcgcggcaagcgcccgacagccttccagttcctgcaagaaatcaagccggaagccgtagcgtacatcaccattaagaccactctggcttgcctaaccagtgcggacaatacaaccgttcaggctgtagcaagcgcaatcggtcgggccattgaggacgaggctcgcttcggtcgtatccgtgaccttgaagctaagcacttcaagaaaaacgttgaggaacaactcaacaagcgcgtagggcacgtctacaagaaagcatttatgcaagttgtcgaggctgacatgctctctaagggtctactcggtggcgaggcgtggtcttcgtggcataaggaagactctattcatgtaggagtacgctgcatcgagatgctcattgagtcaaccggaatggttagcttacaccgccaaaatgctggcgtagtaggtcaagactctgagactatcgaactcgcacctgaatacgctgaggctatcgcaacccgtgcaggtgcgctggctggcatctctccgatgttccaaccttgcgtagttcctcctaagccgtggactggcattactggtggtggctattgggctgcggggcgcaaacccctgcagttagtacgtactcgcagtctggcggcgcttcgccgctatgaagaagtgtcgatgccggaggtcatcaaagcagtcaacattgcgcagaatacagcatggcgtgtgaacaagaaagttctcgacgtagcgaatgcaatcacccaatggcagcactgtccagtcgcggatgtgcctgcgatggatcgtggcgaaatgccagctcgtccgttggacatcgataccaacgagattgcacttaaagcgtggaagaaagaagcttccgcgttctaccgcaaagacaaagcacgcgttagccgtcgtctgtcaatggagtttatgttatctcaggcgaacaagtttgcgaattataaagcaatctggtttccgcaaaacatggattggcgtgggcgcgtgtacgctgtcccgatgttcaatcctcagggcaacgatatgacgaaaggcctgctgacctttgcgcagggtaaacccattggtgaagacggcttctattggctcaagattcatggcgcaaatacagctggagtggataaagtaccgtttccacaacgcatcaaatttgttgaggataaccatacgaatattatggaatgcgcgaaagcaccgctggaaaacacttggtgggcggaacaggactcgccgttctgttttctggcgttctgctttgagtatgctggcgtcatcaatcacggtctgtcgtacaactgtagcttgcctctggcatttgatggtagttgctccggcattcaacatttctcagcgatgttacgcgacgaaattggcggcaaagctgtgaatctcctcccatctgcggaagtgcaggatatttatcgtatcgtcagcgacaaagttaacgaggtactgaaacaagatctgattaacggtacctctaccaccttggaaacggtgactgataagaagacaggcgaaattaccgaacgcacgaaatacgggaccaaagttatggcacagtggtggttagaacacggtgtgaatcgtggcgtcacgaaacgctcggttatgactttggtgtatgggagcaaagagtttggattccgcgatcaagtgctgagtgacaccattcaaccggcgatcgataacggcaaaggtgacatgtttctgaatccgaatcaggctgctggttacatggcgaaactgatctggaacgcagtgtccgtcaccgtagtcgcagcagttgaggcgatgaactggctgaaaagtgcggcgaaattacttgctgctgaagtgaaggataagaagacggatacagttctgcgtggccgctgcgcagtacattgggtgactcccgacggcttccctgtgtggcaggaatacaagaagcctattcagacgcgcttgaacctgatgttcctcggtcagttccgcttacagcctaccattaacaccaacaaagatagcgagattgatgcacacaaacaggagtctggtatcgctcctaactttgtacacagccaagacggtaaccaccttcgtatgactgtagtgtgggcacacgagaagtacggaatcgaatcttttgcactgattcacgactccttcggtaccattccggctgacgctgcgaacctgttcaaagcagtgcgcgaaactatggtttcgacatatgagtcttgtgatgtactggctgatttctacgaccagttcgctgaccagttgcacgagtctcaattggacaaaatgccagcacttccggctaaaggtaacttgaacctccgtgacatcttaaaatcggacttcgcgttcgcg

SEQ ID NO: 380 - protein, 890 aa, synthetic construct
  REGION 1..890: note = Variant of RNA polymerase
MHHHHHHMNTINIAKNDFSDIELAAIPFNTLADHYGERLAREQLALEHESYEMGELRFRKMFERQLKAGEVADNAAAKPLITTLLPKMIARINDWFEEVKAKRGKRPTAFQFLQEIKPEAVAYITIKTTLACLTSADNTTVQAVASAIGRAIEDEARFGRIRDLEAKHFKKNVEEQLNKRVGHVYKKAFMQVVEADMLSKGLLGGEAWSSWHKEDSIHVGVRCIEMLIESTGMVSLHRQNAGVVGQDSETIELAPEYAEAIATRAGALAGISPMFQPCVVPPKPWTGITGGGYWAAGRKPLQLVRTRSLAALRRYEEVSMPEVIKAVNIAQNTAWRVNKKVLDVANAITQWQHCPVADVPAMDRGEMPARPLDIDTNEIALKAWKKEASAFYRKDKARVSRRLSMEFMLSQANKFANYKAIWFPQNMDWRGRVYAVPMFNPQGNDMTKGLLTFAQGKPIGEDGFYWLKIHGANTAGVDKVPFPQRIKFVEDNHTNIMECAKAPLENTWWAEQDSPFCFLAFCFEYAGVINHGLSYNCSLPLAFDGSCSGIQHFSAMLRDEIGGKAVNLLPSAEVQDIYRIVSDKVNEVLKQDLINGTSTTLETVTDKKTGEITERTKYGTKVMAQWWLEHGVNRGVTKRSVMTLVYGSKEFGFRDQVLSDTIQPAIDNGKGDMFLNPNQAAGYMAKLIWNAVSVTVVAAVEAMNWLKSAAKLLAAEVKDKKTDTVLRGRCAVHWVTPDGFPVWQEYKKPIQTRLNLMFLGQFRLQPTINTNKDSEIDAHKQESGIAPNFVHSQDGNHLRMTVVWAHEKYGIESFALIHDSFGTIPADAANLFKAVRETMVSTYESCDVLADFYDQFADQLHESQLDKMPALPAKGNLNLRDILKSDFAFA

SEQ ID NO: 381 - DNA, 2670 bp, synthetic construct
  misc_feature 1..2670: note = Variant of RNA polymerase
  source 1..2670: mol_type = other DNA
atgcaccatcaccatcaccatatgaacacgattaacatcgctaagaacgacttctctgacatcgaactggctgctatcccgttcaacactctggctgaccattacggtgagcgtttagctcgcgaacagttggcccttgagcatgagtcttacgagatgggtgaagcacgcttccgcaagatgtttgagcgtcaacttaaagctggtgaggttgcggataacgctgccgccaagcctctcatcactaccctactccctaagatgattgcacgcatcaacgactggtttgaggaagtgaaagctaagcgcggcaagcgcccgacagccttccagttcctgcaagaaatcaagccggaagccgtagcgtacatcaccattaagaccactctggcttgcctaaccagtgcggacaatacaaccgttcaggctgtagcaagcgcaatcggtcgggccattgaggacgaggctcgcttcggtcgtatccgtgaccttgaagctaagcacttcaagaaaaacgttgaggaacaactcaacaagcgcgtagggcacgtctacaagaaagcatttatgtgtgttgtcgaggctgacatgctctctaagggtctactcggtggcgaggcgtggtcttcgtggcataaggaagactctattcatgtaggagtacgctgcatcgagatgctcattgagtcaaccggaatggttagcttacaccgccaaaatgctggcgtagtaggtcaagactctgagactatcgaactcgcacctgaatacgctgaggctatcgcaacccgtgcaggtgcgctggctggcatctctccgatgttccaaccttgcgtagttcctcctaagccgtggactggcattactggtggtggctattgggctgcggggcgcaaacccctgcagttagtacgtactcgcagtctggcggcgcttcgccgctatgaagaagtgtcgatgccggaggtcatcaaagcagtcaacattgcgcagaatacagcatggcgtgtgaacaagaaagttctcgacgtagcgaatgcaatcacccaatggcagcactgtccagtcgcggatgtgcctgcgatggatcgtggcgaaatgccagctcgtccgttggacatcgataccaacgagattgcacttaaagcgtggaagaaagaagcttccgcgttctaccgcaaagacaaagcacgcgttagccgtcgtctgtcaatggagtttatgttatctcaggcgaacaagtttgcgaattataaagcaatctggtttccgcaaaacatggattggcgtgggcgcgtgtacgctgtcccgatgttcaatcctcagggcaacgatatgacgaaaggcctgctgacctttgcgcagggtaaacccattggtgaagacggcttctattggctcaagattcatggcgcaaatacagctggagtggataaagtaccgtttccacaacgcatcaaatttgttgaggataaccatacgaatattatggaatgcgcgaaagcaccgctggaaaacacttggtgggcggaacaggactcgccgttctgttttctggcgttctgctttgagtatgctggcgtcatcaatcacggtctgtcgtacaactgtagcttgcctctggcatttgatggtagttgctccggcattcaacatttctcagcgatgttacgcgacgaaattggcggcaaagctgtgaatctcctcccatctgcggaagtgcaggatatttatcgtatcgtcagcgacaaagttaacgaggtactgaaacaagatctgattaacggtacctctaccaccttggaaacggtgactgataagaagacaggcgaaattaccgaacgcacgaaatacgggaccaaagttatggcacagtggtggttagaacacggtgtgaatcgtggcgtcacgaaacgctcggttatgactttggtgtatgggagcaaagagtttggattccgcgatcaagtgctgagtgacaccattcaaccggcgatcgataacggcaaaggtgacatgtttctgaatccgaatcaggctgctggttacatggcgaaactgatctggaacgcagtgtccgtcaccgtagtcgcagcagttgaggcgatgaactggctgaaaagtgcggcgaaattacttgctgctgaagtgaaggataagaagacggatacagttctgcgtggccgctgcgcagtacattgggtgactcccgacggcttccctgtgtggcaggaatacaagaagcctattcagacgcgcttgaacctgatgttcctcggtcagttccgcttacagcctaccattaacaccaacaaagatagcgagattgatgcacacaaacaggagtctggtatcgctcctaactttgtacacagccaagacggtaaccaccttcgtatgactgtagtgtgggcacacgagaagtacggaatcgaatcttttgcactgattcacgactccttcggtaccattccggctgacgctgcgaacctgttcaaagcagtgcgcgaaactatggtttcgacatatgagtcttgtgatgtactggctgatttctacgaccagttcgctgaccagttgcacgagtctcaattggacaaaatgccagcacttccggctaaaggtaacttgaacctccgtgacatcttaaaatcggacttcgcgttcgcg

SEQ ID NO: 382 - protein, 890 aa, synthetic construct
  REGION 1..890: note = Variant of RNA polymerase
MHHHHHHMNTINIAKNDFSDIELAAIPFNTLADHYGERLAREQLALEHESYEMGEARFRKMFERQLKAGEVADNAAAKPLITTLLPKMIARINDWFEEVKAKRGKRPTAFQFLQEIKPEAVAYITIKTTLACLTSADNTTVQAVASAIGRAIEDEARFGRIRDLEAKHFKKNVEEQLNKRVGHVYKKAFMCVVEADMLSKGLLGGEAWSSWHKEDSIHVGVRCIEMLIESTGMVSLHRQNAGVVGQDSETIELAPEYAEAIATRAGALAGISPMFQPCVVPPKPWTGITGGGYWAAGRKPLQLVRTRSLAALRRYEEVSMPEVIKAVNIAQNTAWRVNKKVLDVANAITQWQHCPVADVPAMDRGEMPARPLDIDTNEIALKAWKKEASAFYRKDKARVSRRLSMEFMLSQANKFANYKAIWFPQNMDWRGRVYAVPMFNPQGNDMTKGLLTFAQGKPIGEDGFYWLKIHGANTAGVDKVPFPQRIKFVEDNHTNIMECAKAPLENTWWAEQDSPFCFLAFCFEYAGVINHGLSYNCSLPLAFDGSCSGIQHFSAMLRDEIGGKAVNLLPSAEVQDIYRIVSDKVNEVLKQDLINGTSTTLETVTDKKTGEITERTKYGTKVMAQWWLEHGVNRGVTKRSVMTLVYGSKEFGFRDQVLSDTIQPAIDNGKGDMFLNPNQAAGYMAKLIWNAVSVTVVAAVEAMNWLKSAAKLLAAEVKDKKTDTVLRGRCAVHWVTPDGFPVWQEYKKPIQTRLNLMFLGQFRLQPTINTNKDSEIDAHKQESGIAPNFVHSQDGNHLRMTVVWAHEKYGIESFALIHDSFGTIPADAANLFKAVRETMVSTYESCDVLADFYDQFADQLHESQLDKMPALPAKGNLNLRDILKSDFAFA

SEQ ID NO: 383 - DNA, 2670 bp, synthetic construct
  misc_feature 1..2670: note = Variant of RNA polymerase
  source 1..2670: mol_type = other DNA
atgcaccatcaccatcaccatatgaacacgattaacatcgctaagaacgacttctctgacatcgaactggctgctatcccgttcaacactctggctgaccattacggtgagcgtttagctcgcgaacagttggcccttgagcatgagtcttacgagatgggtgaagcacgcttccgcaagatgtttgagcgtcaacttaaagctggtgaggttgcggataacgctgccgccaagcctctcatcactaccctactccctaagatgattgcacgcatcaacgactggtttgaggaagtgaaagctaagcgcggcaagcgcccgacagccttccagttcctgcaagaaatcaagccggaagccgtagcgtacatcaccattaagaccactctggcttgcctaaccagtgcggacaatacaaccgttcaggctgtagcaagcgcaatcggtcgggccattgaggacgaggctcgcttcggtcgtatccgtgaccttgaagctaagcacttcaagaaaaacgttgaggaacaactcaacaagcgcgtagggcacgtctacaagaaagcatttatgcaagttgtcgagagggacatgctctctaagggtctactcggtggcgaggcgtggtcttcgtggcataaggaagactctattcatgtaggagtacgctgcatcgagatgctcattgagtcaaccggaatggttagcttacaccgccaaaatgctggcgtagtaggtcaagactctgagactatcgaactcgcacctgaatacgctgaggctatcgcaacccgtgcaggtgcgctggctggcatctctccgatgttccaaccttgcgtagttcctcctaagccgtggactggcattactggtggtggctattgggctgcggggcgcaaacccctgcagttagtacgtactcgcagtctggcggcgcttcgccgctatgaagaagtgtcgatgccggaggtcatcaaagcagtcaacattgcgcagaatacagcatggcgtgtgaacaagaaagttctcgacgtagcgaatgcaatcacccaatggcagcactgtccagtcgcggatgtgcctgcgatggatcgtggcgaaatgccagctcgtccgttggacatcgataccaacgagattgcacttaaagcgtggaagaaagaagcttccgcgttctaccgcaaagacaaagcacgcgttagccgtcgtctgtcaatggagtttatgttatctcaggcgaacaagtttgcgaattataaagcaatctggtttccgcaaaacatggattggcgtgggcgcgtgtacgctgtcccgatgttcaatcctcagggcaacgatatgacgaaaggcctgctgacctttgcgcagggtaaacccattggtgaagacggcttctattggctcaagattcatggcgcaaatacagctggagtggataaagtaccgtttccacaacgcatcaaatttgttgaggataaccatacgaatattatggaatgcgcgaaagcaccgctggaaaacacttggtgggcggaacaggactcgccgttctgttttctggcgttctgctttgagtatgctggcgtcatcaatcacggtctgtcgtacaactgtagcttgcctctggcatttgatggtagttgctccggcattcaacatttctcagcgatgttacgcgacgaaattggcggcaaagctgtgaatctcctcccatctgcggaagtgcaggatatttatcgtatcgtcagcgacaaagttaacgaggtactgaaacaagatctgattaacggtacctctaccaccttggaaacggtgactgataagaagacaggcgaaattaccgaacgcacgaaatacgggaccaaagttatggcacagtggtggttagaacacggtgtgaatcgtggcgtcacgaaacgctcggttatgactttggtgtatgggagcaaagagtttggattccgcgatcaagtgctgagtgacaccattcaaccggcgatcgataacggcaaaggtgacatgtttctgaatccgaatcaggctgctggttacatggcgaaactgatctggaacgcagtgtccgtcaccgtagtcgcagcagttgaggcgatgaactggctgaaaagtgcggcgaaattacttgctgctgaagtgaaggataagaagacggatacagttctgcgtggccgctgcgcagtacattgggtgactcccgacggcttccctgtgtggcaggaatacaagaagcctattcagacgcgcttgaacctgatgttcctcggtcagttccgcttacagcctaccattaacaccaacaaagatagcgagattgatgcacacaaacaggagtctggtatcgctcctaactttgtacacagccaagacggtaaccaccttcgtatgactgtagtgtgggcacacgagaagtacggaatcgaatcttttgcactgattcacgactccttcggtaccattccggctgacgctgcgaacctgttcaaagcagtgcgcgaaactatggtttcgacatatgagtcttgtgatgtactggctgatttctacgaccagttcgctgaccagttgcacgagtctcaattggacaaaatgccagcacttccggctaaaggtaacttgaacctccgtgacatcttaaaatcggacttcgcgttcgcg

SEQ ID NO: 384 - protein, 890 aa, synthetic construct
  REGION 1..890: note = Variant of RNA polymerase
MHHHHHHMNTINIAKNDFSDIELAAIPFNTLADHYGERLAREQLALEHESYEMGEARFRKMFERQLKAGEVADNAAAKPLITTLLPKMIARINDWFEEVKAKRGKRPTAFQFLQEIKPEAVAYITIKTTLACLTSADNTTVQAVASAIGRAIEDEARFGRIRDLEAKHFKKNVEEQLNKRVGHVYKKAFMQVVERDMLSKGLLGGEAWSSWHKEDSIHVGVRCIEMLIESTGMVSLHRQNAGVVGQDSETIELAPEYAEAIATRAGALAGISPMFQPCVVPPKPWTGITGGGYWAAGRKPLQLVRTRSLAALRRYEEVSMPEVIKAVNIAQNTAWRVNKKVLDVANAITQWQHCPVADVPAMDRGEMPARPLDIDTNEIALKAWKKEASAFYRKDKARVSRRLSMEFMLSQANKFANYKAIWFPQNMDWRGRVYAVPMFNPQGNDMTKGLLTFAQGKPIGEDGFYWLKIHGANTAGVDKVPFPQRIKFVEDNHTNIMECAKAPLENTWWAEQDSPFCFLAFCFEYAGVINHGLSYNCSLPLAFDGSCSGIQHFSAMLRDEIGGKAVNLLPSAEVQDIYRIVSDKVNEVLKQDLINGTSTTLETVTDKKTGEITERTKYGTKVMAQWWLEHGVNRGVTKRSVMTLVYGSKEFGFRDQVLSDTIQPAIDNGKGDMFLNPNQAAGYMAKLIWNAVSVTVVAAVEAMNWLKSAAKLLAAEVKDKKTDTVLRGRCAVHWVTPDGFPVWQEYKKPIQTRLNLMFLGQFRLQPTINTNKDSEIDAHKQESGIAPNFVHSQDGNHLRMTVVWAHEKYGIESFALIHDSFGTIPADAANLFKAVRETMVSTYESCDVLADFYDQFADQLHESQLDKMPALPAKGNLNLRDILKSDFAFA

SEQ ID NO: 385 - DNA, 2670 bp, synthetic construct
  misc_feature 1..2670: note = Variant of RNA polymerase
  source 1..2670: mol_type = other DNA
atgcaccatcaccatcaccatatgaacacgattaacatcgctaagaacgacttctctgacatcgaactggctgctatcccgttcaacactctggctgaccattacggtgagcgtttagctcgcgaacagttggcccttgagcatgagtcttacgagatgggtgaagcacgcttccgcaagatgtttgagcgtcaacttaaagctggtgaggttgcggataacgctgccgccaagcctctcatcactaccctactccctaagatgattgcacgcatcaacgactggtttgaggaagtgaaagctaagcgcggcaagcgcccgacagccttccagttcctgcaagaaatcaagccggaagccgtagggtacatcaccattaagaccactctggcttgcctaaccagtgcggacaatacaaccgttcaggctgtagcaagcgcaatcggtcgggccattgaggacgaggctcgcttcggtcgtatccgtgaccttgaagctaagcacttcaagaaaaacgttgaggaacaactcaacaagcgcgtagggcacgtctacaagaaagcatttatgcaagttgtcgaggctgacatgctctctaagggtctactcggtggcgaggcgtggtcttcgtggcataaggaagactctattcatgtaggagtacgctgcatcgagatgctcattgagtcaaccggaatggttagcttacaccgccaaaatgctggcgtagtaggtcaagactctgagactatcgaactcgcacctgaatacgctgaggctatcgcaacccgtgcaggtgcgctggctggcatctctccgatgttccaaccttgcgtagttcctcctaagccgtggactggcattactggtggtggctattgggctgcggggcgcaaacccctgcagttagtacgtactcgcagtctggcggcgcttcgccgctatgaagaagtgtcgatgccggaggtcatcaaagcagtcaacattgcgcagaatacagcatggcgtgtgaacaagaaagttctcgacgtagcgaatgcaatcacccaatggcagcactgtccagtcgcggatgtgcctgcgatggatcgtggcgaaatgccagctcgtccgttggacatcgataccaacgagattgcacttaaagcgtggaagaaagaagcttccgcgttctaccgcaaagacaaagcacgcgttagccgtcgtctgtcaatggagtttatgttatctcaggcgaacaagtttgcgaattataaagcaatctggtttccgcaaaacatggattggcgtgggcgcgtgtacgctgtcccgatgttcaatcctcagggcaacgatatgacgaaaggcctgctgacctttgcgcagggtaaacccattggtgaagacggcttctattggctcaagattcatggcgcaaatacagctggagtggataaagtaccgtttccacaacgcatcaaatttgttgaggataaccatacgaatattatggaatgcgcgaaagcaccgctggaaaacacttggtgggcggaacaggactcgccgttctgttttctggcgttctgctttgagtatgctggcgtcatcaatcacggtctgtcgtacaactgtagcttgcctctggcatttgatggtagttgctccggcattcaacatttctcagcgatgttacgcgacgaaattggcggcaaagctgtgaatctcctcccatctgcggaagtgcaggatatttatcgtatcgtcagcgacaaagttaacgaggtactgaaacaagatctgattaacggtacctctaccaccttggaaacggtgactgataagaagacaggcgaaattaccgaacgcacgaaatacgggaccaaagttatggcacagtggtggttagaacacggtgtgaatcgtggcgtcacgaaacgctcggttatgactttggtgtatgggagcaaagagtttggattccgcgatcaagtgctgagtgacaccattcaaccggcgatcgataacggcaaaggtgacatgtttctgaatccgaatcaggctgctggttacatggcgaaactgatctggaacgcagtgtccgtcaccgtagtcgcagcagttgaggcgatgaactggctgaaaagtgcggcgaaattacttgctgctgaagtgaaggataagaagacggatacagttctgcgtggccgctgcgcagtacattgggtgactcccgacggcttccctgtgtggcaggaatacaagaagcctattcagacgcgcttgaacctgatgttcctcggtcagttccgcttacagcctaccattaacaccaacaaagatagcgagattgatgcacacaaacaggagtctggtatcgctcctaactttgtacacagccaagacggtaaccaccttcgtatgactgtagtgtgggcacacgagaagtacggaatcgaatcttttgcactgattcacgactccttcggtaccattccggctgacgctgcgaacctgttcaaagcagtgcgcgaaactatggtttcgacatatgagtcttgtgatgtactggctgatttctacgaccagttcgctgaccagttgcacgagtctcaattggacaaaatgccagcacttccggctaaaggtaacttgaacctccgtgacatcttaaaatcggacttcgcgttcgcg

SEQ ID NO: 386 - protein, 890 aa, synthetic construct
  REGION 1..890: note = Variant of RNA polymerase
MHHHHHHMNTINIAKNDFSDIELAAIPFNTLADHYGERLAREQLALEHESYEMGEARFRKMFERQLKAGEVADNAAAKPLITTLLPKMIARINDWFEEVKAKRGKRPTAFQFLQEIKPEAVGYITIKTTLACLTSADNTTVQAVASAIGRAIEDEARFGRIRDLEAKHFKKNVEEQLNKRVGHVYKKAFMQVVEADMLSKGLLGGEAWSSWHKEDSIHVGVRCIEMLIESTGMVSLHRQNAGVVGQDSETIELAPEYAEAIATRAGALAGISPMFQPCVVPPKPWTGITGGGYWAAGRKPLQLVRTRSLAALRRYEEVSMPEVIKAVNIAQNTAWRVNKKVLDVANAITQWQHCPVADVPAMDRGEMPARPLDIDTNEIALKAWKKEASAFYRKDKARVSRRLSMEFMLSQANKFANYKAIWFPQNMDWRGRVYAVPMFNPQGNDMTKGLLTFAQGKPIGEDGFYWLKIHGANTAGVDKVPFPQRIKFVEDNHTNIMECAKAPLENTWWAEQDSPFCFLAFCFEYAGVINHGLSYNCSLPLAFDGSCSGIQHFSAMLRDEIGGKAVNLLPSAEVQDIYRIVSDKVNEVLKQDLINGTSTTLETVTDKKTGEITERTKYGTKVMAQWWLEHGVNRGVTKRSVMTLVYGSKEFGFRDQVLSDTIQPAIDNGKGDMFLNPNQAAGYMAKLIWNAVSVTVVAAVEAMNWLKSAAKLLAAEVKDKKTDTVLRGRCAVHWVTPDGFPVWQEYKKPIQTRLNLMFLGQFRLQPTINTNKDSEIDAHKQESGIAPNFVHSQDGNHLRMTVVWAHEKYGIESFALIHDSFGTIPADAANLFKAVRETMVSTYESCDVLADFYDQFADQLHESQLDKMPALPAKGNLNLRDILKSDFAFA

SEQ ID NO: 387 - DNA, 2670 bp, synthetic construct
  misc_feature 1..2670: note = Variant of RNA polymerase
  source 1..2670: mol_type = other DNA
atgcaccatcaccatcaccatatgaacacgattaacatcgctaagaacgacttctctgacatcgaactggctgctatcccgttcaacactctggctgaccattacggtgagcgtttagctcgcgaacagttggcccttgagcatgagtcttacgagatgggtgaagcacgcttccgcatgatgtttgagcgtcaacttaaagctggtgaggttgcggataacgctgccgccaagcctctcatcactaccctactccctaagatgattgcacgcatcaacgactggtttgaggaagtgaaagctaagcgcggcaagcgcccgacagccttccagttcctgcaagaaatcaagccggaagccgtagcgtacatcaccattaagaccactctggcttgcctaaccagtgcggacaatacaaccgttcaggctgtagcaagcgcaatcggtcgggccattgaggacgaggctcgcttcggtcgtatccgtgaccttgaagctaagcacttcaagaaaaacgttgaggaacaactcaacaagcgcgtagggcacgtctacaagaaagcatttatgcaagttgtcgaggctgacatgctctctaagggtctactcggtggcgaggcgtggtcttcgtggcataaggaagactctattcatgtaggagtacgctgcatcgagatgctcattgagtcaaccggaatggttagcttacaccgccaaaatgctggcgtagtaggtcaagactctgagactatcgaactcgcacctgaatacgctgaggctatcgcaacccgtgcaggtgcgctggctggcatctctccgatgttccaaccttgcgtagttcctcctaagccgtggactggcattactggtggtggctattgggctgcggggcgcaaacccctgcagttagtacgtactcgcagtctggcggcgcttcgccgctatgaagaagtgtcgatgccggaggtcatcaaagcagtcaacattgcgcagaatacagcatggcgtgtgaacaagaaagttctcgacgtagcgaatgcaatcacccaatggcagcactgtccagtcgcggatgtgcctgcgatggatcgtggcgaaatgccagctcgtccgttggacatcgataccaacgagattgcacttaaagcgtggaagaaagaagcttccgcgttctaccgcaaagacaaagcacgcgttagccgtcgtctgtcaatggagtttatgttatctcaggcgaacaagtttgcgaattataaagcaatctggtttccgcaaaacatggattggcgtgggcgcgtgtacgctgtcccgatgttcaatcctcagggcaacgatatgacgaaaggcctgctgacctttgcgcagggtaaacccattggtgaagacggcttctattggctcaagattcatggcgcaaatacagctggagtggataaagtaccgtttccacaacgcatcaaatttgttgaggataaccatacgaatattatggaatgcgcgaaagcaccgctggaaaacacttggtgggcggaacaggactcgccgttctgttttctggcgttctgctttgagtatgctggcgtcatcaatcacggtctgtcgtacaactgtagcttgcctctggcatttgatggtagttgctccggcattcaacatttctcagcgatgttacgcgacgaaattggcggcaaagctgtgaatctcctcccatctgcggaagtgcaggatatttatcgtatcgtcagcgacaaagttaacgaggtactgaaacaagatctgattaacggtacctctaccaccttggaaacggtgactgataagaagacaggcgaaattaccgaacgcacgaaatacgggaccaaagttatggcacagtggtggttagaacacggtgtgaatcgtggcgtcacgaaacgctcggttatgactttggtgtatgggagcaaagagtttggattccgcgatcaagtgctgagtgacaccattcaaccggcgatcgataacggcaaaggtgacatgtttctgaatccgaatcaggctgctggttacatggcgaaactgatctggaacgcagtgtccgtcaccgtagtcgcagcagttgaggcgatgaactggctgaaaagtgcggcgaaattacttgctgctgaagtgaaggataagaagacggatacagttctgcgtggccgctgcgcagtacattgggtgactcccgacggcttccctgtgtggcaggaatacaagaagcctattcagacgcgcttgaacctgatgttcctcggtcagttccgcttacagcctaccattaacaccaacaaagatagcgagattgatgcacacaaacaggagtctggtatcgctcctaactttgtacacagccaagacggtaaccaccttcgtatgactgtagtgtgggcacacgagaagtacggaatcgaatcttttgcactgattcacgactccttcggtaccattccggctgacgctgcgaacctgttcaaagcagtgcgcgaaactatggtttcgacatatgagtcttgtgatgtactggctgatttctacgaccagttcgctgaccagttgcacgagtctcaattggacaaaatgccagcacttccggctaaaggtaacttgaacctccgtgacatcttaaaatcggacttcgcgttcgcg

SEQ ID NO: 388 - protein, 890 aa, synthetic construct
  REGION 1..890: note = Variant of RNA polymerase
MHHHHHHMNTINIAKNDFSDIELAAIPFNTLADHYGERLAREQLALEHESYEMGEARFRMMFERQLKAGEVADNAAAKPLITTLLPKMIARINDWFEEVKAKRGKRPTAFQFLQEIKPEAVAYITIKTTLACLTSADNTTVQAVASAIGRAIEDEARFGRIRDLEAKHFKKNVEEQLNKRVGHVYKKAFMQVVEADMLSKGLLGGEAWSSWHKEDSIHVGVRCIEMLIESTGMVSLHRQNAGVVGQDSETIELAPEYAEAIATRAGALAGISPMFQPCVVPPKPWTGITGGGYWAAGRKPLQLVRTRSLAALRRYEEVSMPEVIKAVNIAQNTAWRVNKKVLDVANAITQWQHCPVADVPAMDRGEMPARPLDIDTNEIALKAWKKEASAFYRKDKARVSRRLSMEFMLSQANKFANYKAIWFPQNMDWRGRVYAVPMFNPQGNDMTKGLLTFAQGKPIGEDGFYWLKIHGANTAGVDKVPFPQRIKFVEDNHTNIMECAKAPLENTWWAEQDSPFCFLAFCFEYAGVINHGLSYNCSLPLAFDGSCSGIQHFSAMLRDEIGGKAVNLLPSAEVQDIYRIVSDKVNEVLKQDLINGTSTTLETVTDKKTGEITERTKYGTKVMAQWWLEHGVNRGVTKRSVMTLVYGSKEFGFRDQVLSDTIQPAIDNGKGDMFLNPNQAAGYMAKLIWNAVSVTVVAAVEAMNWLKSAAKLLAAEVKDKKTDTVLRGRCAVHWVTPDGFPVWQEYKKPIQTRLNLMFLGQFRLQPTINTNKDSEIDAHKQESGIAPNFVHSQDGNHLRMTVVWAHEKYGIESFALIHDSFGTIPADAANLFKAVRETMVSTYESCDVLADFYDQFADQLHESQLDKMPALPAKGNLNLRDILKSDFAFA

SEQ ID NO: 389 - DNA, 2670 bp, synthetic construct
  misc_feature 1..2670: note = Variant of RNA polymerase
  source 1..2670: mol_type = other DNA
atgcaccatcaccatcaccatatgaacacgattaacatcgctaagaacgacttctctgacatcgaactggctgctatcccgttcaacactctggctgaccattacggtgagcgtttagctcgcgaacagttggcccttgagcatgagtcttacgagatgggtgaagcacgcttccgcaagatgtttgagcgtcaacttaaagctggtgaggttgcggataacgctgccgccaagcctctcatcactaccgtgctccctaagatgattgcacgcatcaacgactggtttgaggaagtgaaagctaagcgcggcaagcgcccgacagccttccagttcctgcaagaaatcaagccggaagccgtagcgtacatcaccattaagaccactctggcttgcctaaccagtgcggacaatacaaccgttcaggctgtagcaagcgcaatcggtcgggccattgaggacgaggctcgcttcggtcgtatccgtgaccttgaagctaagcacttcaagaaaaacgttgaggaacaactcaacaagcgcgtagggcacgtctacaagaaagcatttatgcaagttgtcgaggctgacatgctctctaagggtctactcggtggcgaggcgtggtcttcgtggcataaggaagactctattcatgtaggagtacgctgcatcgagatgctcattgagtcaaccggaatggttagcttacaccgccaaaatgctggcgtagtaggtcaagactctgagactatcgaactcgcacctgaatacgctgaggctatcgcaacccgtgcaggtgcgctggctggcatctctccgatgttccaaccttgcgtagttcctcctaagccgtggactggcattactggtggtggctattgggctgcggggcgcaaacccctgcagttagtacgtactcgcagtctggcggcgcttcgccgctatgaagaagtgtcgatgccggaggtcatcaaagcagtcaacattgcgcagaatacagcatggcgtgtgaacaagaaagttctcgacgtagcgaatgcaatcacccaatggcagcactgtccagtcgcggatgtgcctgcgatggatcgtggcgaaatgccagctcgtccgttggacatcgataccaacgagattgcacttaaagcgtggaagaaagaagcttccgcgttctaccgcaaagacaaagcacgcgttagccgtcgtctgtcaatggagtttatgttatctcaggcgaacaagtttgcgaattataaagcaatctggtttccgcaaaacatggattggcgtgggcgcgtgtacgctgtcccgatgttcaatcctcagggcaacgatatgacgaaaggcctgctgacctttgcgcagggtaaacccattggtgaagacggcttctattggctcaagattcatggcgcaaatacagctggagtggataaagtaccgtttccacaacgcatcaaatttgttgaggataaccatacgaatattatggaatgcgcgaaagcaccgctggaaaacacttggtgggcggaacaggactcgccgttctgttttctggcgttctgctttgagtatgctggcgtcatcaatcacggtctgtcgtacaactgtagcttgcctctggcatttgatggtagttgctccggcattcaacatttctcagcgatgttacgcgacgaaattggcggcaaagctgtgaatctcctcccatctgcggaagtgcaggatatttatcgtatcgtcagcgacaaagttaacgaggtactgaaacaagatctgattaacggtacctctaccaccttggaaacggtgactgataagaagacaggcgaaattaccgaacgcacgaaatacgggaccaaagttatggcacagtggtggttagaacacggtgtgaatcgtggcgtcacgaaacgctcggttatgactttggtgtatgggagcaaagagtttggattccgcgatcaagtgctgagtgacaccattcaaccggcgatcgataacggcaaaggtgacatgtttctgaatccgaatcaggctgctggttacatggcgaaactgatctggaacgcagtgtccgtcaccgtagtcgcagcagttgaggcgatgaactggctgaaaagtgcggcgaaattacttgctgctgaagtgaaggataagaagacggatacagttctgcgtggccgctgcgcagtacattgggtgactcccgacggcttccctgtgtggcaggaatacaagaagcctattcagacgcgcttgaacctgatgttcctcggtcagttccgcttacagcctaccattaacaccaacaaagatagcgagattgatgcacacaaacaggagtctggtatcgctcctaactttgtacacagccaagacggtaaccaccttcgtatgactgtagtgtgggcacacgagaagtacggaatcgaatcttttgcactgattcacgactccttcggtaccattccggctgacgctgcgaacctgttcaaagcagtgcgcgaaactatggtttcgacatatgagtcttgtgatgtactggctgatttctacgaccagttcgctgaccagttgcacgagtctcaattggacaaaatgccagcacttccggctaaaggtaacttgaacctccgtgacatcttaaaatcggacttcgcgttcgcg

SEQ ID NO: 390 - protein, 890 aa, synthetic construct
  REGION 1..890: note = Variant of RNA polymerase
MHHHHHHMNTINIAKNDFSDIELAAIPFNTLADHYGERLAREQLALEHESYEMGEARFRKMFERQLKAGEVADNAAAKPLITTVLPKMIARINDWFEEVKAKRGKRPTAFQFLQEIKPEAVAYITIKTTLACLTSADNTTVQAVASAIGRAIEDEARFGRIRDLEAKHFKKNVEEQLNKRVGHVYKKAFMQVVEADMLSKGLLGGEAWSSWHKEDSIHVGVRCIEMLIESTGMVSLHRQNAGVVGQDSETIELAPEYAEAIATRAGALAGISPMFQPCVVPPKPWTGITGGGYWAAGRKPLQLVRTRSLAALRRYEEVSMPEVIKAVNIAQNTAWRVNKKVLDVANAITQWQHCPVADVPAMDRGEMPARPLDIDTNEIALKAWKKEASAFYRKDKARVSRRLSMEFMLSQANKFANYKAIWFPQNMDWRGRVYAVPMFNPQGNDMTKGLLTFAQGKPIGEDGFYWLKIHGANTAGVDKVPFPQRIKFVEDNHTNIMECAKAPLENTWWAEQDSPFCFLAFCFEYAGVINHGLSYNCSLPLAFDGSCSGIQHFSAMLRDEIGGKAVNLLPSAEVQDIYRIVSDKVNEVLKQDLINGTSTTLETVTDKKTGEITERTKYGTKVMAQWWLEHGVNRGVTKRSVMTLVYGSKEFGFRDQVLSDTIQPAIDNGKGDMFLNPNQAAGYMAKLIWNAVSVTVVAAVEAMNWLKSAAKLLAAEVKDKKTDTVLRGRCAVHWVTPDGFPVWQEYKKPIQTRLNLMFLGQFRLQPTINTNKDSEIDAHKQESGIAPNFVHSQDGNHLRMTVVWAHEKYGIESFALIHDSFGTIPADAANLFKAVRETMVSTYESCDVLADFYDQFADQLHESQLDKMPALPAKGNLNLRDILKSDFAFA

SEQ ID NO: 391 - DNA, 2670 bp, synthetic construct
  misc_feature 1..2670: note = Variant of RNA polymerase
  source 1..2670: mol_type = other DNA
atgcaccatcaccatcaccatatgaacacgattaacatcgctaagaacgacttctctgacatcgaactggctgctatcccgttcaacactctggctgaccattacggtgagcgtttagctcgcgaacagttggcccttgagcatgagtcttacgagatgggtgaagcacgcttccgcaagatgtttgagcgtcaacttaaagctggtgaggttgcggataacgctgccgccaagcctctcatcactaccctactccctaagatgattgcacgcatcaacgactggtttgaggaagtgaaagctaagcgcggcaagcgcccgacagccttccagttcctgcaagaaatcaagccggaagccgtagcgtacatcaccattaagaccactctggcttgcctaaccagtgcggacaatacaaccgttcaggctgtagcaagcgcaatcggtcgggccattgaggacgaggctcgcttcggtcgtatccgtgaccttgaagctaagcacttcaagaaaaacgttgaggaacaactcaacaagcgcgtagggcacgtctacaagaaagcatttatgcaagttgtcgaggctgacatgctctctaagggtctactcggtggcgaggcgtggtcttcgtggcataaggaagactctattcatgtaggagtacgctgcatcgagatgctcattgagtcaaccggaatggttagcttacaccgccaaaatgctggcgtagtaggtcaagactctgagactatcgaactcgcacctgaatacgctgaggctatcgcaacccgtgcaggtgcgctggctggcatctctccgatgttccaaccttgcgtagttcctcctaagccgtggactggcattactggtggtggctattgggctgcggggcgcaaacccctgcagttagtacgtactcgcagtctggcggcgcttcgccgctatgaagaagtgtcgatgccggaggtcatcaaagcagtcaacattgcgcagaatacagcatggcgtgtgaacaagaaagttctcgacgtagcgaatgcaatcacccaatggcagcactgtccagtcgcggatgtgcctgcgatggatcgtggcgaaatgccagctcgtccgttggacatcgataccaacgagattgcacttaaagcgtggaagaaagaagcttccgcgttctaccgcaaagacaaagcacgcgttagccgtcgtctgtcaatggagtttatgttatctcaggcgaacaagtttgcgaatgttaaagcaatctggtttccgcaaaacatggattggcgtgggcgcgtgtacgctgtcccgatgttcaatcctcagggcaacgatatgacgaaaggcctgctgacctttgcgcagggtaaacccattggtgaagacggcttctattggctcaagattcatggcgcaaatacagctggagtggataaagtaccgtttccacaacgcatcaaatttgttgaggataaccatacgaatattatggaatgcgcgaaagcaccgctggaaaacacttggtgggcggaacaggactcgccgttctgttttctggcgttctgctttgagtatgctggcgtcatcaatcacggtctgtcgtacaactgtagcttgcctctggcatttgatggtagttgctccggcattcaacatttctcagcgatgttacgcgacgaaattggcggcaaagctgtgaatctcctcccatctgcggaagtgcaggatatttatcgtatcgtcagcgacaaagttaacgaggtactgaaacaagatctgattaacggtacctctaccaccttggaaacggtgactgataagaagacaggcgaaattaccgaacgcacgaaatacgggaccaaagttatggcacagtggtggttagaacacggtgtgaatcgtggcgtcacgaaacgctcggttatgactttggtgtatgggagcaaagagtttggattccgcgatcaagtgctgagtgacaccattcaaccggcgatcgataacggcaaaggtgacatgtttctgaatccgaatcaggctgctggttacatggcgaaactgatctggaacgcagtgtccgtcaccgtagtcgcagcagttgaggcgatgaactggctgaaaagtgcggcgaaattacttgctgctgaagtgaaggataagaagacggatacagttctgcgtggccgctgcgcagtacattgggtgactcccgacggcttccctgtgtggcaggaatacaagaagcctattcagacgcgcttgaacctgatgttcctcggtcagttccgcttacagcctaccattaacaccaacaaagatagcgagattgatgcacacaaacaggagtctggtatcgctcctaactttgtacacagccaagacggtaaccaccttcgtatgactgtagtgtgggcacacgagaagtacggaatcgaatcttttgcactgattcacgactccttcggtaccattccggctgacgctgcgaacctgttcaaagcagtgcgcgaaactatggtttcgacatatgagtcttgtgatgtactggctgatttctacgaccagttcgctgaccagttgcacgagtctcaattggacaaaatgccagcacttccggctaaaggtaacttgaacctccgtgacatcttaaaatcggacttcgcgttcgcg

SEQ ID NO: 392 - protein, 890 aa, synthetic construct
  REGION 1..890: note = Variant of RNA polymerase
MHHHHHHMNTINIAKNDFSDIELAAIPFNTLADHYGERLAREQLALEHESYEMGEARFRKMFERQLKAGEVADNAAAKPLITTLLPKMIARINDWFEEVKAKRGKRPTAFQFLQEIKPEAVAYITIKTTLACLTSADNTTVQAVASAIGRAIEDEARFGRIRDLEAKHFKKNVEEQLNKRVGHVYKKAFMQVVEADMLSKGLLGGEAWSSWHKEDSIHVGVRCIEMLIESTGMVSLHRQNAGVVGQDSETIELAPEYAEAIATRAGALAGISPMFQPCVVPPKPWTGITGGGYWAAGRKPLQLVRTRSLAALRRYEEVSMPEVIKAVNIAQNTAWRVNKKVLDVANAITQWQHCPVADVPAMDRGEMPARPLDIDTNEIALKAWKKEASAFYRKDKARVSRRLSMEFMLSQANKFANVKAIWFPQNMDWRGRVYAVPMFNPQGNDMTKGLLTFAQGKPIGEDGFYWLKIHGANTAGVDKVPFPQRIKFVEDNHTNIMECAKAPLENTWWAEQDSPFCFLAFCFEYAGVINHGLSYNCSLPLAFDGSCSGIQHFSAMLRDEIGGKAVNLLPSAEVQDIYRIVSDKVNEVLKQDLINGTSTTLETVTDKKTGEITERTKYGTKVMAQWWLEHGVNRGVTKRSVMTLVYGSKEFGFRDQVLSDTIQPAIDNGKGDMFLNPNQAAGYMAKLIWNAVSVTVVAAVEAMNWLKSAAKLLAAEVKDKKTDTVLRGRCAVHWVTPDGFPVWQEYKKPIQTRLNLMFLGQFRLQPTINTNKDSEIDAHKQESGIAPNFVHSQDGNHLRMTVVWAHEKYGIESFALIHDSFGTIPADAANLFKAVRETMVSTYESCDVLADFYDQFADQLHESQLDKMPALPAKGNLNLRDILKSDFAFA

SEQ ID NO: 393 - DNA, 2670 bp, synthetic construct
  misc_feature 1..2670: note = Variant of RNA polymerase
  source 1..2670: mol_type = other DNA
atgcaccatcaccatcaccatatgaacacgattaacatcgctaagaacgacttctctgacatcgaactggctgctatcccgttcaacactctggctgaccattacggtgagcgtttagctcgcgaacagttggcccttgagcatgagtcttacgagatgggtgaagcacgcttccgcaagatgtttgagcgtcaacttaaagctggtgaggttgcggataacgctgccgccaagcctctcatcactaccctactccctaagatgattgcacgcatcaacgactggtttgaggaagtgaaagctaagcgcggcaagcgcccgacagccttccagttcctgcaagaaatcaagccggaagccgtagcgtacatcaccattaagaccactctggcttgcctaaccagtgcggacaatacaaccgttcaggctgtagcaagcgcaatcggtcgggccattgaggacgaggctcgcttcggtcgtatccgtgaccttgaagctaagcacttcaagaaaaacgttgaggaacaactcaacaagcgcacggggcacgtctacaagaaagcatttatgcaagttgtcgaggctgacatgctctctaagggtctactcggtggcgaggcgtggtcttcgtggcataaggaagactctattcatgtaggagtacgctgcatcgagatgctcattgagtcaaccggaatggttagcttacaccgccaaaatgctggcgtagtaggtcaagactctgagactatcgaactcgcacctgaatacgctgaggctatcgcaacccgtgcaggtgcgctggctggcatctctccgatgttccaaccttgcgtagttcctcctaagccgtggactggcattactggtggtggctattgggctgcggggcgcaaacccctgcagttagtacgtactcgcagtctggcggcgcttcgccgctatgaagaagtgtcgatgccggaggtcatcaaagcagtcaacattgcgcagaatacagcatggcgtgtgaacaagaaagttctcgacgtagcgaatgcaatcacccaatggcagcactgtccagtcgcggatgtgcctgcgatggatcgtggcgaaatgccagctcgtccgttggacatcgataccaacgagattgcacttaaagcgtggaagaaagaagcttccgcgttctaccgcaaagacaaagcacgcgttagccgtcgtctgtcaatggagtttatgttatctcaggcgaacaagtttgcgaattataaagcaatctggtttccgcaaaacatggattggcgtgggcgcgtgtacgctgtcccgatgttcaatcctcagggcaacgatatgacgaaaggcctgctgacctttgcgcagggtaaacccattggtgaagacggcttctattggctcaagattcatggcgcaaatacagctggagtggataaagtaccgtttccacaacgcatcaaatttgttgaggataaccatacgaatattatggaatgcgcgaaagcaccgctggaaaacacttggtgggcggaacaggactcgccgttctgttttctggcgttctgctttgagtatgctggcgtcatcaatcacggtctgtcgtacaactgtagcttgcctctggcatttgatggtagttgctccggcattcaacatttctcagcgatgttacgcgacgaaattggcggcaaagctgtgaatctcctcccatctgcggaagtgcaggatatttatcgtatcgtcagcgacaaagttaacgaggtactgaaacaagatctgattaacggtacctctaccaccttggaaacggtgactgataagaagacaggcgaaattaccgaacgcacgaaatacgggaccaaagttatggcacagtggtggttagaacacggtgtgaatcgtggcgtcacgaaacgctcggttatgactttggtgtatgggagcaaagagtttggattccgcgatcaagtgctgagtgacaccattcaaccggcgatcgataacggcaaaggtgacatgtttctgaatccgaatcaggctgctggttacatggcgaaactgatctggaacgcagtgtccgtcaccgtagtcgcagcagttgaggcgatgaactggctgaaaagtgcggcgaaattacttgctgctgaagtgaaggataagaagacggatacagttctgcgtggccgctgcgcagtacattgggtgactcccgacggcttccctgtgtggcaggaatacaagaagcctattcagacgcgcttgaacctgatgttcctcggtcagttccgcttacagcctaccattaacaccaacaaagatagcgagattgatgcacacaaacaggagtctggtatcgctcctaactttgtacacagccaagacggtaaccaccttcgtatgactgtagtgtgggcacacgagaagtacggaatcgaatcttttgcactgattcacgactccttcggtaccattccggctgacgctgcgaacctgttcaaagcagtgcgcgaaactatggtttcgacatatgagtcttgtgatgtactggctgatttctacgaccagttcgctgaccagttgcacgagtctcaattggacaaaatgccagcacttccggctaaaggtaacttgaacctccgtgacatcttaaaatcggacttcgcgttcgcg

SEQ ID NO: 394 - protein, 890 aa, synthetic construct
  REGION 1..890: note = Variant of RNA polymerase
MHHHHHHMNTINIAKNDFSDIELAAIPFNTLADHYGERLAREQLALEHESYEMGEARFRKMFERQLKAGEVADNAAAKPLITTLLPKMIARINDWFEEVKAKRGKRPTAFQFLQEIKPEAVAYITIKTTLACLTSADNTTVQAVASAIGRAIEDEARFGRIRDLEAKHFKKNVEEQLNKRTGHVYKKAFMQVVEADMLSKGLLGGEAWSSWHKEDSIHVGVRCIEMLIESTGMVSLHRQNAGVVGQDSETIELAPEYAEAIATRAGALAGISPMFQPCVVPPKPWTGITGGGYWAAGRKPLQLVRTRSLAALRRYEEVSMPEVIKAVNIAQNTAWRVNKKVLDVANAITQWQHCPVADVPAMDRGEMPARPLDIDTNEIALKAWKKEASAFYRKDKARVSRRLSMEFMLSQANKFANYKAIWFPQNMDWRGRVYAVPMFNPQGNDMTKGLLTFAQGKPIGEDGFYWLKIHGANTAGVDKVPFPQRIKFVEDNHTNIMECAKAPLENTWWAEQDSPFCFLAFCFEYAGVINHGLSYNCSLPLAFDGSCSGIQHFSAMLRDEIGGKAVNLLPSAEVQDIYRIVSDKVNEVLKQDLINGTSTTLETVTDKKTGEITERTKYGTKVMAQWWLEHGVNRGVTKRSVMTLVYGSKEFGFRDQVLSDTIQPAIDNGKGDMFLNPNQAAGYMAKLIWNAVSVTVVAAVEAMNWLKSAAKLLAAEVKDKKTDTVLRGRCAVHWVTPDGFPVWQEYKKPIQTRLNLMFLGQFRLQPTINTNKDSEIDAHKQESGIAPNFVHSQDGNHLRMTVVWAHEKYGIESFALIHDSFGTIPADAANLFKAVRETMVSTYESCDVLADFYDQFADQLHESQLDKMPALPAKGNLNLRDILKSDFAFA

SEQ ID NO: 395 - DNA, 2670 bp, synthetic construct
  misc_feature 1..2670: note = Variant of RNA polymerase
  source 1..2670: mol_type = other DNA
atgcaccatcaccatcaccatatgaacacgattaacatcgctaagaacgacttctctgacatcgaactggctgctatcccgttcaacactctggctgacatgtacggtgagcgtttagctcgcgaacagttggcccttgagcatgagtcttacgagatgggtgaagcacgcttccgcaagatgtttgagcgtcaacttaaagctggtgaggttgcggataacgctgccgccaagcctctcatcactaccctactccctaagatgattgcacgcatcaacgactggtttgaggaagtgaaagctaagcgcggcaagcgcccgacagccttccagttcctgcaagaaatcaagccggaagccgtagcgtacatcaccattaagaccactctggcttgcctaaccagtgcggacaatacaaccgttcaggctgtagcaagcgcaatcggtcgggccattgaggacgaggctcgcttcggtcgtatccgtgaccttgaagctaagcacttcaagaaaaacgttgaggaacaactcaacaagcgcgtagggcacgtctacaagaaagcatttatgcaagttgtcgaggctgacatgctctctaagggtctactcggtggcgaggcgtggtcttcgtggcataaggaagactctattcatgtaggagtacgctgcatcgagatgctcattgagtcaaccggaatggttagcttacaccgccaaaatgctggcgtagtaggtcaagactctgagactatcgaactcgcacctgaatacgctgaggctatcgcaacccgtgcaggtgcgctggctggcatctctccgatgttccaaccttgcgtagttcctcctaagccgtggactggcattactggtggtggctattgggctgcggggcgcaaacccctgcagttagtacgtactcgcagtctggcggcgcttcgccgctatgaagaagtgtcgatgccggaggtcatcaaagcagtcaacattgcgcagaatacagcatggcgtgtgaacaagaaagttctcgacgtagcgaatgcaatcacccaatggcagcactgtccagtcgcggatgtgcctgcgatggatcgtggcgaaatgccagctcgtccgttggacatcgataccaacgagattgcacttaaagcgtggaagaaagaagcttccgcgttctaccgcaaagacaaagcacgcgttagccgtcgtctgtcaatggagtttatgttatctcaggcgaacaagtttgcgaattataaagcaatctggtttccgcaaaacatggattggcgtgggcgcgtgtacgctgtcccgatgttcaatcctcagggcaacgatatgacgaaaggcctgctgacctttgcgcagggtaaacccattggtgaagacggcttctattggctcaagattcatggcgcaaatacagctggagtggataaagtaccgtttccacaacgcatcaaatttgttgaggataaccatacgaatattatggaatgcgcgaaagcaccgctggaaaacacttggtgggcggaacaggactcgccgttctgttttctggcgttctgctttgagtatgttggcgtcatcaatcacggtctgtcgtacaactgtagcttgcctctggcatttgatggtagttgctccggcattcaacatttctcagcgatgttacgcgacgaaattggcggcaaagctgtgaatctcctcccatctgcggaagtgcaggatatttatcgtatcgtcagcgacaaagttaacgaggtactgaaacaagatctgattaacggtacctctaccaccttggaaacggtgactgataagaagacaggcgaaattaccgaacgcacgaaatacgggaccaaagttatggcacagtggtggttagaacacggtgtgaatcgtggcgtcacgaaacgctcggttatgactttggtgtatgggagcaaagagtttggattccgcgatcaagtgctgagtgacaccattcaaccggcgatcgataacggcaaaggtgacatgtttctgaatccgaatcaggctgctggttacatggcgaaactgatctggaacgcagtgtccgtcaccgtagtcgcagcagttgaggcgatgaactggctgaaaagtgcggcgaaattacttgctgctgaagtgaaggataagaagacggatacagttctgcgtggccgctgcgcagtacattgggtgactcccgacggcttccctgtgtggcaggaatacaagaagcctattcagacgcgcttgaacctgatgttcctcggtcagttccgcttacagcctaccattaacaccaacaaagatagcgagattgatgcacacaaacaggagtctggtatcgctcctaactttgtacacagccaagacggtaaccaccttcgtatgactgtagtgtgggcacacgagaagtacggaatcgaatcttttgcactgattcacgactccttcggtaccattccggctgacgctgcgaacctgttcaaagcagtgcgcgaaactatggtttcgacatatgagtcttgtgatgtactggctgatttctacgaccagttcgctgaccagttgcacgagtctcaattggacaaaatgccagcacttccggctaaaggtaacttgaacctccgtgacatcttaaaatcggacttcgcgttcgcg

SEQ ID NO: 396 - protein, 890 aa, synthetic construct
  REGION 1..890: note = Variant of RNA polymerase
MHHHHHHMNTINIAKNDFSDIELAAIPFNTLADMYGERLAREQLALEHESYEMGEARFRKMFERQLKAGEVADNAAAKPLITTLLPKMIARINDWFEEVKAKRGKRPTAFQFLQEIKPEAVAYITIKTTLACLTSADNTTVQAVASAIGRAIEDEARFGRIRDLEAKHFKKNVEEQLNKRVGHVYKKAFMQVVEADMLSKGLLGGEAWSSWHKEDSIHVGVRCIEMLIESTGMVSLHRQNAGVVGQDSETIELAPEYAEAIATRAGALAGISPMFQPCVVPPKPWTGITGGGYWAAGRKPLQLVRTRSLAALRRYEEVSMPEVIKAVNIAQNTAWRVNKKVLDVANAITQWQHCPVADVPAMDRGEMPARPLDIDTNEIALKAWKKEASAFYRKDKARVSRRLSMEFMLSQANKFANYKAIWFPQNMDWRGRVYAVPMFNPQGNDMTKGLLTFAQGKPIGEDGFYWLKIHGANTAGVDKVPFPQRIKFVEDNHTNIMECAKAPLENTWWAEQDSPFCFLAFCFEYVGVINHGLSYNCSLPLAFDGSCSGIQHFSAMLRDEIGGKAVNLLPSAEVQDIYRIVSDKVNEVLKQDLINGTSTTLETVTDKKTGEITERTKYGTKVMAQWWLEHGVNRGVTKRSVMTLVYGSKEFGFRDQVLSDTIQPAIDNGKGDMFLNPNQAAGYMAKLIWNAVSVTVVAAVEAMNWLKSAAKLLAAEVKDKKTDTVLRGRCAVHWVTPDGFPVWQEYKKPIQTRLNLMFLGQFRLQPTINTNKDSEIDAHKQESGIAPNFVHSQDGNHLRMTVVWAHEKYGIESFALIHDSFGTIPADAANLFKAVRETMVSTYESCDVLADFYDQFADQLHESQLDKMPALPAKGNLNLRDILKSDFAFA

SEQ ID NO: 397 - DNA, 2670 bp, synthetic construct
  misc_feature 1..2670: note = Variant of RNA polymerase
  source 1..2670: mol_type = other DNA
atgcaccatcaccatcaccatatgaacacgattaacatcgctaagaacgacttctctgacatcgaactggctgctatcccgttcaacactctggctgaccattacggtgagcgtttagctcgcgaacagttggcccttgagcatgagtcttacgagatgggtgaagcacgcttccgcaagatgtttgagcgtcaacttaaagctggtgaggttgcggataacgctgccgccaagcctctcatcactaccctactccctaagatgattgcacgcatcaacgactggtttgaggaagtgaaagctaagcgcggcaagcgcccgacagccttccagttcctgcaagaaatcaagccggaagccgtagcgtacatcaccattaagaccactctggcttgcctaaccagtgcggacaatacaaccgttcaggctgtagcaagcgcaatcggtcgggccattgaggacgaggctcgcttcggtcgtatccgtgaccttgaagctaagcacttcaagaaaaacgttgaggaacaactcaacaagcgcgtagggcacgtctacaagaaagcatttatgcaagttgtcgaggctgacatgctctctaagggtctactcggtggcgaggcgtggtcttcgtggcataaggaagactctattcatgtaggagtacgctgcatcgagatgctcattgagtcaaccggaatggttagcttacaccgccaaaatgctggcgtagtaggtcaagactctgagactatcgaactcgcacctgaatacgctgaggctatcgcaacccgtgcaggtgcgctggctggcatctctccgatgttccaaccttgcgtagttcctcctaagccgtggactggcattactggtggtggctattgggctgcggggcgcaaacccctgcagttagtacgtactcgcagtctggcggcgcttcgccgctatgaagaagtgtcgatgccggaggtcatcaaagcagtcaacattgcgcagaatacagcatggcgtgtgaacaagaaagttctcgacgtagcgaatgcaatcacccaatggcagcactgtccagtcgcggatgtgcctgcgatggatcgtggcgaaatgccagctcgtccgttggacatcgataccaacgagattgcacttaaagcgtggaagaaagaagcttccgcgttctaccgcaaagacaaagcacgcgttagccgtcgtctgtcaatggagtttatgttatctcaggcgaacaagtttgcgaattataaagcaatctggtttccgcaaaacatggattggcgtgggcgcgtgtacgctgtcccgatgttcaatcctcagggcaacgatatgacgaaaggcctgctgacctttgcgcagggtaaacccattggtgaagacggcttctattggctcaagattcatggcgcaaatacagctggagtggataaagtaccgtttccacaacgcatcaaatttgttgaggataaccatacgaatattatggaatgcgcgaaagcaccgctggaaaacacttggtgggcggaacaggactcgccgttctgttttctggcgttctgctttgagtatgctggcgtcatcaatcacggtctgtcgtacaactgtagcttgcctctggcatttgatggtagttgctccggcattcaacatttctcagcgatgttacgcgacgaaattggcggcaaagctgtgaatctcctcccatctgcggaagtgcaggatatttatcgtatcgtcagcgacaaagttaacgaggtactgaaacaagatctgattaacggtacctctaccaccttggaaacggtgactgataagaagacaggcgaaattaccgaacgcacgaaatacgggaccaaagttatggcacagtggtggttagaacacggtgtgaatcgtggcgtcacgaaacgctcggttatgactttggtgtatgggagcaaagagtttggattccgcgatcaagtgctgagtgacaccattcaaccggcgatcgataacggcaaaggtgacatgtttctgaatccgaatcaggctgctggttacatggcgaaactgatctggaacgcagtgtccgtcaccgtagtcgcagcagttcgggcgatgaactggctgaaaagtgcggcgaaattacttgctgctgaagtgaaggataagaagacggatacagttctgcgtggccgctgcgcagtacattgggtgactcccgacggcttccctgtgtggcaggaatacaagaagcctattcagacgcgcttgaacctgatgttcctcggtcagttccgcttacagcctaccattaacaccaacaaagatagcgagattgatgcacacaaacaggagtctggtatcgctcctaactttgtacacagccaagacggtaaccaccttcgtatgactgtagtgtgggcacacgagaagtacggaatcgaatcttttgcactgattcacgactccttcggtaccattccggctgacgctgcgaacctgttcaaagcagtgcgcgaaactatggtttcgacatatgagtcttgtgatgtactggctgatttctacgaccagttcgctgaccagttgcacgagtctcaattggacaaaatgccagcacttccggctaaaggtaacttgaacctccgtgacatcttaaaatcggacttcgcgttcgcg

SEQ ID NO: 398 - protein, 890 aa, synthetic construct
  REGION 1..890: note = Variant of RNA polymerase
MHHHHHHMNTINIAKNDFSDIELAAIPFNTLADHYGERLAREQLALEHESYEMGEARFRKMFERQLKAGEVADNAAAKPLITTLLPKMIARINDWFEEVKAKRGKRPTAFQFLQEIKPEAVAYITIKTTLACLTSADNTTVQAVASAIGRAIEDEARFGRIRDLEAKHFKKNVEEQLNKRVGHVYKKAFMQVVEADMLSKGLLGGEAWSSWHKEDSIHVGVRCIEMLIESTGMVSLHRQNAGVVGQDSETIELAPEYAEAIATRAGALAGISPMFQPCVVPPKPWTGITGGGYWAAGRKPLQLVRTRSLAALRRYEEVSMPEVIKAVNIAQNTAWRVNKKVLDVANAITQWQHCPVADVPAMDRGEMPARPLDIDTNEIALKAWKKEASAFYRKDKARVSRRLSMEFMLSQANKFANYKAIWFPQNMDWRGRVYAVPMFNPQGNDMTKGLLTFAQGKPIGEDGFYWLKIHGANTAGVDKVPFPQRIKFVEDNHTNIMECAKAPLENTWWAEQDSPFCFLAFCFEYAGVINHGLSYNCSLPLAFDGSCSGIQHFSAMLRDEIGGKAVNLLPSAEVQDIYRIVSDKVNEVLKQDLINGTSTTLETVTDKKTGEITERTKYGTKVMAQWWLEHGVNRGVTKRSVMTLVYGSKEFGFRDQVLSDTIQPAIDNGKGDMFLNPNQAAGYMAKLIWNAVSVTVVAAVRAMNWLKSAAKLLAAEVKDKKTDTVLRGRCAVHWVTPDGFPVWQEYKKPIQTRLNLMFLGQFRLQPTINTNKDSEIDAHKQESGIAPNFVHSQDGNHLRMTVVWAHEKYGIESFALIHDSFGTIPADAANLFKAVRETMVSTYESCDVLADFYDQFADQLHESQLDKMPALPAKGNLNLRDILKSDFAFA

SEQ ID NO: 399 - DNA, 2670 bp, synthetic construct
  misc_feature 1..2670: note = Variant of RNA polymerase
  source 1..2670: mol_type = other DNA
atgcaccatcaccatcaccatatgaacacgattaacatcgctaagaacgacttctctgacatcgaactggctgctatcccgttcaacactctggctgaccattacggtgagcgtttagctcgcgaacagttggcccttgagcatgagtcttacgagatgggtgaagcacgcttccgcaagatgtttgagcgtcaacttaaagctggtgaggttgcggataacgctgccgccaagcctctcatcactaccctactccctaagatgattgcacgcatcaacgactggtttgaggaagtgaaagctaagcgcggcaagcgcccgacagccttccagttcctgcaagaaatcaagccggaagccgtagcgtacatcaccattaagaccactctggcttgcctaaccagtgcggacaatacaaccgttcaggctgtagcaagcgcaatcggtcgggccattgaggacgaggctcgcttcggtcgtatccgtgaccttgaagctaagcacttcaagaaaaacgttgaggaacaactcaacaagcgcgtagggcacgtctacaagaaagcatttatgcaagttgtcgaggctgacatgctctctaagggtctactcggtggcgaggcgtggtcttcgtggcataaggaagactctattcatgtaggagtacgctgcatcgagatgctcattgagtcaaccggaatggttagcttacaccgccaaaatgctggcgtagtaggtcaagactctgagactatcgaactcgcacctgaatacgctgaggctatcgcaacccgtgcaggtgcgctggctggcatctctccgatgttccaaccttgcgtagttcctcctaagccgtggactggcattactggtggtggctattgggctgcggggcgcaaacccctgcagttagtacgtactcgcagtctggcggcgcttcgccgctatgaagaagtgtcgatgccggaggtcatcaaagcagtcaacattgcgcagaatacagcatggcgtgtgaacaagaaagttctcgacgtagcgaatgcaatcacccaatggcagcactgtccagtcgcggatgtgcctgcgatggatcgtggcgaaatgccagctcgtccgttggacatcgataccaacgagattgcacttaaagcgtggaagaaagaagcttccgcgttctaccgcaaagacaaagcacgcgttagccgtcgtctgtcaatggagtttatgttatctcaggcgaacaagtttgcgaattataaagcaatctggtttccgcaaaacatggattggcgtgggcgcgtgtacgctgtcccgatgttcaatcctcagggcaacgatatgacgaaaggcctgctgacctttgcgcagggtaaacccattggtgaagacggcttctattggctcaagattcatggcgcaaatacagctggagtggataaagtaccgtttccacaacgcatcaaatttgttgaggataaccatacgaatattatggaatgcgcgaaagcaccgctggaaaacacttggtgggcggaacaggactcgccgttctgttttctggcgttctgctttgagtatgctggcgtcatcactcacggtctgtcgtacaactgtagcttgcctctggcatttgatggtagttgctccggcattcaacatttctcagcgatgttacgcgacgaaattggcggcaaagctgtgaatctcctcccatctgcggaagtgcaggatatttatcgtatcgtcagcgacaaagttaacgaggtactgaaacaagatctgattaacggtacctctaccaccttggaaacggtgactgataagaagacaggcgaaattaccgaacgcacgaaatacgggaccaaagttatggcacagtggtggttagaacacggtgtgaatcgtggcgtcacgaaacgctcggttatgactttggtgtatgggagcaaagagtttggattccgcgatcaagtgctgagtgacaccattcaaccggcgatcgataacggcaaaggtgacatgtttctgaatccgaatcaggctgctggttacatggcgaaactgatctggaacgcagtgtccgtcaccgtagtcgcagcagttgaggcgatgaactggctgaaaagtgcggcgaaattacttgctgctgaagtgaaggataagaagacggatacagttctgcgtggccgctgcgcagtacattgggtgactcccgacggcttccctgtgtggcaggaatacaagaagcctattcagacgcgcttgaacctgatgttcctcggtcagttccgcttacagcctaccattaacaccaacaaagatagcgagattgatgcacacaaacaggagtctggtatcgctcctaactttgtacacagccaagacggtaaccaccttcgtatgactgtagtgtgggcacacgagaagtacggaatcgaatcttttgcactgattcacgactccttcggtaccattccggctgacgctgcgaacctgttcaaagcagtgcgcgaaactatggtttcgacatatgagtcttgtgatgtactggctgatttctacgaccagttcgctgaccagttgcacgagtctcaattggacaaaatgccagcacttccggctaaaggtaacttgaacctccgtgacatcttaaaatcggacttcgcgttcgcg

SEQ ID NO: 400 - protein, 890 aa, synthetic construct
  REGION 1..890: note = Variant of RNA polymerase
MHHHHHHMNTINIAKNDFSDIELAAIPFNTLADHYGERLAREQLALEHESYEMGEARFRKMFERQLKAGEVADNAAAKPLITTLLPKMIARINDWFEEVKAKRGKRPTAFQFLQEIKPEAVAYITIKTTLACLTSADNTTVQAVASAIGRAIEDEARFGRIRDLEAKHFKKNVEEQLNKRVGHVYKKAFMQVVEADMLSKGLLGGEAWSSWHKEDSIHVGVRCIEMLIESTGMVSLHRQNAGVVGQDSETIELAPEYAEAIATRAGALAGISPMFQPCVVPPKPWTGITGGGYWAAGRKPLQLVRTRSLAALRRYEEVSMPEVIKAVNIAQNTAWRVNKKVLDVANAITQWQHCPVADVPAMDRGEMPARPLDIDTNEIALKAWKKEASAFYRKDKARVSRRLSMEFMLSQANKFANYKAIWFPQNMDWRGRVYAVPMFNPQGNDMTKGLLTFAQGKPIGEDGFYWLKIHGANTAGVDKVPFPQRIKFVEDNHTNIMECAKAPLENTWWAEQDSPFCFLAFCFEYAGVITHGLSYNCSLPLAFDGSCSGIQHFSAMLRDEIGGKAVNLLPSAEVQDIYRIVSDKVNEVLKQDLINGTSTTLETVTDKKTGEITERTKYGTKVMAQWWLEHGVNRGVTKRSVMTLVYGSKEFGFRDQVLSDTIQPAIDNGKGDMFLNPNQAAGYMAKLIWNAVSVTVVAAVEAMNWLKSAAKLLAAEVKDKKTDTVLRGRCAVHWVTPDGFPVWQEYKKPIQTRLNLMFLGQFRLQPTINTNKDSEIDAHKQESGIAPNFVHSQDGNHLRMTVVWAHEKYGIESFALIHDSFGTIPADAANLFKAVRETMVSTYESCDVLADFYDQFADQLHESQLDKMPALPAKGNLNLRDILKSDFAFA

SEQ ID NO: 401 - DNA, 2670 bp, synthetic construct
  misc_feature 1..2670: note = Variant of RNA polymerase
  source 1..2670: mol_type = other DNA
atgcaccatcaccatcaccatatgaacacgattaacatcgctaagaacgacttctctgacatcgaactggctgctatcccgttcaacactctggctgaccattacggtgagcgtttagctcgcgaacagttggcccttgagcatgagtcttacgagatgggtgaagcacgcttccgcaagatgtttgagcgtcaacttaaagctggtgaggttgcggataacgctgccgccaagcctctcatcactaccctactccctaagatgattgcacgcatcaacgactggtttgaggaagtgaaagctaagcgcggcaagcgcccgacagccttccagttcctgcaagaaatcaagccggaagccgtagcgtacatcaccattaagaccactctggcttgcctaaccagtgcggacaatacaaccgttcaggctgtagcaagcgcaatcggtcgggccattgaggacgaggctcgcttcggtcgtatccgtgaccttgaagctaagcacttcaagtataacgttgaggaacaactcaacaagcgcgtagggcacgtctacaagaaagcatttatgcaagttgtcgaggctgacatgctctctaagggtctactcggtggcgaggcgtggtcttcgtggcataaggaagactctattcatgtaggagtacgctgcatcgagatgctcattgagtcaaccggaatggttagcttacaccgccaaaatgctggcgtagtaggtcaagactctgagactatcgaactcgcacctgaatacgctgaggctatcgcaacccgtgcaggtgcgctggctggcatctctccgatgttccaaccttgcgtagttcctcctaagccgtggactggcattactggtggtggctattgggctgcggggcgcaaacccctgcagttagtacgtactcgcagtctggcggcgcttcgccgctatgaagaagtgtcgatgccggaggtcatcaaagcagtcaacattgcgcagaatacagcatggcgtgtgaacaagaaagttctcgacgtagcgaatgcaatcacccaatggcagcactgtccagtcgcggatgtgcctgcgatggatcgtggcgaaatgccagctcgtccgttggacatcgataccaacgagattgcacttaaagcgtggaagaaagaagcttccgcgttctaccgcaaagacaaagcacgcgttagccgtcgtctgtcaatggagtttatgttatctcaggcgaacaagtttgcgaattataaagcaatctggtttccgcaaaacatggattggcgtgggcgcgtgtacgctgtcccgatgttcaatcctcagggcaacgatatgacgaaaggcctgctgacctttgcgcagggtaaacccattggtgaagacggcttctattggctcaagattcatggcgcaaatacagctggagtggataaagtaccgtttccacaacgcatcaaatttgttgaggataaccatacgaatattatggaatgcgcgaaagcaccgctggaaaacacttggtgggcggaacaggactcgccgttctgttttctggcgttctgctttgagtatgctggcgtcatcaatcacggtctgtcgtacaactgtagcttgcctctggcatttgatggtagttgctccggcattcaacatttctcagcgatgttacgcgacgaaattggcggcaaagctgtgaatctcctcccatctgcggaagtgcaggatatttatcgtatcgtcagcgacaaagttaacgaggtactgaaacaagatctgattaacggtacctctaccaccttggaaacggtgactgataagaagacaggcgaaattaccgaacgcacgaaatacgggaccaaagttatggcacagtggtggttagaacacggtgtgaatcgtggcgtcacgaaacgctcggttatgactttggtgtatgggagcaaagagtttggattccgcgatcaagtgctgagtgacaccattcaaccggcgatcgataacggcaaaggtgacatgtttctgaatccgaatcaggctgctggttacatggcgaaactgatctggaacgcagtgtccgtcaccgtagtcgcagcagttgaggcgatgaactggctgaaaagtgcggcgaaattacttgctgctgaagtgaaggataagaagacggatacagttctgcgtggccgctgcgcagtacattgggtgactcccgacggcttccctgtgtggcaggaatacaagaagcctattcagacgcgcttgaacctgatgttcctcggtcagttccgcttacagcctaccattaacaccaacaaagatagcgagattgatgcacacaaacaggagtctggtatcgctcctaactttgtacacagccaagacggtaaccaccttcgtatgactgtagtgtgggcacacgagaagtacggaatcgaatcttttgcactgattcacgactccttcggtaccattccggctgacgctgcgaacctgttcaaagcagtgcgcgaaactatggtttcgacatatgagtcttgtgatgtactggctgatttctacgaccagttcgctgaccagttgcacgagtctcaattggacaaaatgccagcacttccggctaaaggtaacttgaacctccgtgacatcttaaaatcggacttcgcgttcgcg

SEQ ID NO: 402 - protein, 890 aa, synthetic construct
  REGION 1..890: note = Variant of RNA polymerase
MHHHHHHMNTINIAKNDFSDIELAAIPFNTLADHYGERLAREQLALEHESYEMGEARFRKMFERQLKAGEVADNAAAKPLITTLLPKMIARINDWFEEVKAKRGKRPTAFQFLQEIKPEAVAYITIKTTLACLTSADNTTVQAVASAIGRAIEDEARFGRIRDLEAKHFKYNVEEQLNKRVGHVYKKAFMQVVEADMLSKGLLGGEAWSSWHKEDSIHVGVRCIEMLIESTGMVSLHRQNAGVVGQDSETIELAPEYAEAIATRAGALAGISPMFQPCVVPPKPWTGITGGGYWAAGRKPLQLVRTRSLAALRRYEEVSMPEVIKAVNIAQNTAWRVNKKVLDVANAITQWQHCPVADVPAMDRGEMPARPLDIDTNEIALKAWKKEASAFYRKDKARVSRRLSMEFMLSQANKFANYKAIWFPQNMDWRGRVYAVPMFNPQGNDMTKGLLTFAQGKPIGEDGFYWLKIHGANTAGVDKVPFPQRIKFVEDNHTNIMECAKAPLENTWWAEQDSPFCFLAFCFEYAGVINHGLSYNCSLPLAFDGSCSGIQHFSAMLRDEIGGKAVNLLPSAEVQDIYRIVSDKVNEVLKQDLINGTSTTLETVTDKKTGEITERTKYGTKVMAQWWLEHGVNRGVTKRSVMTLVYGSKEFGFRDQVLSDTIQPAIDNGKGDMFLNPNQAAGYMAKLIWNAVSVTVVAAVEAMNWLKSAAKLLAAEVKDKKTDTVLRGRCAVHWVTPDGFPVWQEYKKPIQTRLNLMFLGQFRLQPTINTNKDSEIDAHKQESGIAPNFVHSQDGNHLRMTVVWAHEKYGIESFALIHDSFGTIPADAANLFKAVRETMVSTYESCDVLADFYDQFADQLHESQLDKMPALPAKGNLNLRDILKSDFAFA

SEQ ID NO: 403 - DNA, 2670 bp, synthetic construct
  misc_feature 1..2670: note = Variant of RNA polymerase
  source 1..2670: mol_type = other DNA
atgcaccatcaccatcaccatatgaacacgattaacatcgctaagaacgacttctctgacatcgaactggctgctatcccgttcaacactctggctgaccattacggtgagcgtttagctcgcgaacagttggcccttgagcatgagtcttacgagatgggtgaagcacgcttccgcaagatgtttgagcgtcaacttaaagctggtgaggttgcggataacgctgccgccaagcctctcatcactaccctactccctaagatgattgcacgcatcaacgactggtttgaggaagtgaaagctaagcgcggcaagcgcccgacagccttccagttcctgcaagaaatcaagccggaagccgtagcgtacatcaccattaagaccactctggcttgcctaaccagtgcggacaatacaaccgttcaggctgtagcaagcgcaatcggtcgggccattgaggacgaggctcgcttcggtcgtatccgtgaccttgaagctaagcacttcaagaaaaacgttgaggaacaactcaacaagcgcgtagggcacgtctacaagaaagcatttatgcaagttgtctgtgctgacatgctctctaagggtctactcggtggcgaggcgtggtcttcgtggcataaggaagactctattcatgtaggagtacgctgcatcgagatgctcattgagtcaaccggaatggttagcttacaccgccaaaatgctggcgtagtaggtcaagactctgagactatcgaactcgcacctgaatacgctgaggctatcgcaacccgtgcaggtgcgctggctggcatctctccgatgttccaaccttgcgtagttcctcctaagccgtggactggcattactggtggtggctattgggctgcggggcgcaaacccctgcagttagtacgtactcgcagtctggcggcgcttcgccgctatgaagaagtgtcgatgccggaggtcatcaaagcagtcaacattgcgcagaatacagcatggcgtgtgaacaagaaagttctcgacgtagcgaatgcaatcacccaatggcagcactgtccagtcgcggatgtgcctgcgatggatcgtggcgaaatgccagctcgtccgttggacatcgataccaacgagattgcacttaaagcgtggaagaaagaagcttccgcgttctaccgcaaagacaaagcacgcgttagccgtcgtctgtcaatggagtttatgttatctcaggcgaacaagtttgcgaattataaagcaatctggtttccgcaaaacatggattggcgtgggcgcgtgtacgctgtcccgatgttcaatcctcagggcaacgatatgacgaaaggcctgctgacctttgcgcagggtaaacccattggtgaagacggcttctattggctcaagattcatggcgcaaatacagctggagtggataaagtaccgtttccacaacgcatcaaatttgttgaggataaccatacgaatattatggaatgcgcgaaagcaccgctggaaaacacttggtgggcggaacaggactcgccgttctgttttctggcgttctgctttgagtatgctggcgtcatcaatcacggtctgtcgtacaactgtagcttgcctctggcatttgatggtagttgctccggcattcaacatttctcagcgatgttacgcgacgaaattggcggcaaagctgtgaatctcctcccatctgcggaagtgcaggatatttatcgtatcgtcagcgacaaagttaacgaggtactgaaacaagatctgattaacggtacctctaccaccttggaaacggtgactgataagaagacaggcgaaattaccgaacgcacgaaatacgggaccaaagttatggcacagtggtggttagaacacggtgtgaatcgtggcgtcacgaaacgctcggttatgactttggtgtatgggagcaaagagtttggattccgcgatcaagtgctgagtgacaccattcaaccggcgatcgataacggcaaaggtgacatgtttctgaatccgaatcaggctgctggttacatggcgaaactgatctggaacgcagtgtccgtcaccgtagtcgcagcagttgaggcgatgaactggctgaaaagtgcggcgaaattacttgctgctgaagtgaaggataagaagacggatacagttctgcgtggccgctgcgcagtacattgggtgactcccgacggcttccctgtgtggcaggaatacaagaagcctattcagacgcgcttgaacctgatgttcctcggtcagttccgcttacagcctaccattaacaccaacaaagatagcgagattgatgcacacaaacaggagtctggtatcgctcctaactttgtacacagccaagacggtaaccaccttcgtatgactgtagtgtgggcacacgagaagtacggaatcgaatcttttgcactgattcacgactccttcggtaccattccggctgacgctgcgaacctgttcaaagcagtgcgcgaaactatggtttcgacatatgagtcttgtgatgtactggctgatttctacgaccagttcgctgaccagttgcacgagtctcaattggacaaaatgccagcacttccggctaaaggtaacttgaacctccgtgacatcttaaaatcggacttcgcgttcgcg

SEQ ID NO: 404 - protein, 890 aa, synthetic construct
  REGION 1..890: note = Variant of RNA polymerase
MHHHHHHMNTINIAKNDFSDIELAAIPFNTLADHYGERLAREQLALEHESYEMGEARFRKMFERQLKAGEVADNAAAKPLITTLLPKMIARINDWFEEVKAKRGKRPTAFQFLQEIKPEAVAYITIKTTLACLTSADNTTVQAVASAIGRAIEDEARFGRIRDLEAKHFKKNVEEQLNKRVGHVYKKAFMQVVCADMLSKGLLGGEAWSSWHKEDSIHVGVRCIEMLIESTGMVSLHRQNAGVVGQDSETIELAPEYAEAIATRAGALAGISPMFQPCVVPPKPWTGITGGGYWAAGRKPLQLVRTRSLAALRRYEEVSMPEVIKAVNIAQNTAWRVNKKVLDVANAITQWQHCPVADVPAMDRGEMPARPLDIDTNEIALKAWKKEASAFYRKDKARVSRRLSMEFMLSQANKFANYKAIWFPQNMDWRGRVYAVPMFNPQGNDMTKGLLTFAQGKPIGEDGFYWLKIHGANTAGVDKVPFPQRIKFVEDNHTNIMECAKAPLENTWWAEQDSPFCFLAFCFEYAGVINHGLSYNCSLPLAFDGSCSGIQHFSAMLRDEIGGKAVNLLPSAEVQDIYRIVSDKVNEVLKQDLINGTSTTLETVTDKKTGEITERTKYGTKVMAQWWLEHGVNRGVTKRSVMTLVYGSKEFGFRDQVLSDTIQPAIDNGKGDMFLNPNQAAGYMAKLIWNAVSVTVVAAVEAMNWLKSAAKLLAAEVKDKKTDTVLRGRCAVHWVTPDGFPVWQEYKKPIQTRLNLMFLGQFRLQPTINTNKDSEIDAHKQESGIAPNFVHSQDGNHLRMTVVWAHEKYGIESFALIHDSFGTIPADAANLFKAVRETMVSTYESCDVLADFYDQFADQLHESQLDKMPALPAKGNLNLRDILKSDFAFA

SEQ ID NO: 405 - DNA, 2670 bp, synthetic construct
  misc_feature 1..2670: note = Variant of RNA polymerase
  source 1..2670: mol_type = other DNA
atgcaccatcaccatcaccatatgaacacgattaacatcgctaagaacgacttctctgacatcgaactggctgctatcccgttcaacactctggctgaccattacggtgagcgtttagctcgcgaacagttggcccttgagcatgagtcttacgagatgggtgaagcacgcttccataagatgtttgagcgtcaacttaaagctggtgaggttgcggataacgctgccgccaagcctctcatcactaccctactccctaagatgattgcacgcatcaacgactggtttgaggaagtgaaagctaagcgcggcaagcgcccgacagccttccagttcctgcaagaaatcaagccggaagccgtagcgtacatcaccattaagaccactctggcttgcctaaccagtgcggacaatacaaccgttcaggctgtagcaagcgcaatcggtcgggccattgaggacgaggctcgcttcggtcgtatccgtgaccttgaagctaagcacttcaagaaaaacgttgaggaacaactcaacaagcgcgtagggcacgtctacaagaaagcatttatgcaagttgtcgaggctgacatgctctctaagggtctactcggtggcgaggcgtggtcttcgtggcataaggaagactctattcatgtaggagtacgctgcatcgagatgctcattgagtcaaccggaatggttagcttacaccgccaaaatgctggcgtagtaggtcaagactctgagactatcgaactcgcacctgaatacgctgaggctatcgcaacccgtgcaggtgcgctggctggcatctctccgatgttccaaccttgcgtagttcctcctaagccgtggactggcattactggtggtggctattgggctgcggggcgcaaacccctgcagttagtacgtactcgcagtctggcggcgcttcgccgctatgaagaagtgtcgatgccggaggtcatcaaagcagtcaacattgcgcagaatacagcatggcgtgtgaacaagaaagttctcgacgtagcgaatgcaatcacccaatggcagcactgtccagtcgcggatgtgcctgcgatggatcgtggcgaaatgccagctcgtccgttggacatcgataccaacgagattgcacttaaagcgtggaagaaagaagcttccgcgttctaccgcaaagacaaagcacgcgttagccgtcgtctgtcaatggagtttatgttatctcaggcgaacaagtttgcgaattataaagcaatctggtttccgcaaaacatggattggcgtgggcgcgtgtacgctgtcccgatgttcaatcctcagggcaacgatatgacgaaaggcctgctgacctttgcgcagggtaaacccattggtgaagacggcttctattggctcaagattcatggcgcaaatacagctggagtggataaagtaccgtttccacaacgcatcaaatttgttgaggataaccatacgaatattatggaatgcgcgaaagcaccgctggaaaacacttggtgggcggaacaggactcgccgttctgttttctggcgttctgctttgagtatgctggcgtcatcaatcacggtctgtcgtacaactgtagcttgcctctggcatttgatggtagttgctccggcattcaacatttctcagcgatgttacgcgacgaaattggcggcaaagctgtgaatctcctcccatctgcggaagtgcaggatatttatcgtatcgtcagcgacaaagttaacgaggtactgaaacaagatctgattaacggtacctctaccaccttggaaacggtgactgataagaagacaggcgaaattaccgaacgcacgaaatacgggaccaaagttatggcacagtggtggttagaacacggtgtgaatcgtggcgtcacgaaacgctcggttatgactttggtgtatgggagcaaagagtttggattccgcgatcaagtgctgagtgacaccattcaaccggcgatcgataacggcaaaggtgacatgtttctgaatccgaatcaggctgctggttacatggcgaaactgatctggaacgcagtgtccgtcaccgtagtcgcagcagttgaggcgatgaactggctgaaaagtgcggcgaaattacttgctgctgaagtgaaggataagaagacggatacagttctgcgtggccgctgcgcagtacattgggtgactcccgacggcttccctgtgtggcaggaatacaagaagcctattcagacgcgcttgaacctgatgttcctcggtcagttccgcttacagcctaccattaacaccaacaaagatagcgagattgatgcacacaaacaggagtctggtatcgctcctaactttgtacacagccaagacggtaaccaccttcgtatgactgtagtgtgggcacacgagaagtacggaatcgaatcttttgcactgattcacgactccttcggtaccattccggctgacgctgcgaacctgttcaaagcagtgcgcgaaactatggtttcgacatatgagtcttgtgatgtactggctgatttctacgaccagttcgctgaccagttgcacgagtctcaattggacaaaatgccagcacttccggctaaaggtaacttgaacctccgtgacatcttaaaatcggacttcgcgttcgcg

SEQ ID NO: 406 - protein, 890 aa, synthetic construct
  REGION 1..890: note = Variant of RNA polymerase
MHHHHHHMNTINIAKNDFSDIELAAIPFNTLADHYGERLAREQLALEHESYEMGEARFHKMFERQLKAGEVADNAAAKPLITTLLPKMIARINDWFEEVKAKRGKRPTAFQFLQEIKPEAVAYITIKTTLACLTSADNTTVQAVASAIGRAIEDEARFGRIRDLEAKHFKKNVEEQLNKRVGHVYKKAFMQVVEADMLSKGLLGGEAWSSWHKEDSIHVGVRCIEMLIESTGMVSLHRQNAGVVGQDSETIELAPEYAEAIATRAGALAGISPMFQPCVVPPKPWTGITGGGYWAAGRKPLQLVRTRSLAALRRYEEVSMPEVIKAVNIAQNTAWRVNKKVLDVANAITQWQHCPVADVPAMDRGEMPARPLDIDTNEIALKAWKKEASAFYRKDKARVSRRLSMEFMLSQANKFANYKAIWFPQNMDWRGRVYAVPMFNPQGNDMTKGLLTFAQGKPIGEDGFYWLKIHGANTAGVDKVPFPQRIKFVEDNHTNIMECAKAPLENTWWAEQDSPFCFLAFCFEYAGVINHGLSYNCSLPLAFDGSCSGIQHFSAMLRDEIGGKAVNLLPSAEVQDIYRIVSDKVNEVLKQDLINGTSTTLETVTDKKTGEITERTKYGTKVMAQWWLEHGVNRGVTKRSVMTLVYGSKEFGFRDQVLSDTIQPAIDNGKGDMFLNPNQAAGYMAKLIWNAVSVTVVAAVEAMNWLKSAAKLLAAEVKDKKTDTVLRGRCAVHWVTPDGFPVWQEYKKPIQTRLNLMFLGQFRLQPTINTNKDSEIDAHKQESGIAPNFVHSQDGNHLRMTVVWAHEKYGIESFALIHDSFGTIPADAANLFKAVRETMVSTYESCDVLADFYDQFADQLHESQLDKMPALPAKGNLNLRDILKSDFAFA

SEQ ID NO: 407 - DNA, 2670 bp, synthetic construct
  misc_feature 1..2670: note = Variant of RNA polymerase
  source 1..2670: mol_type = other DNA
atgcaccatcaccatcaccatatgaacacgattaacatcgctaagaacgacttctctgacatcgaactggctgctatcccgttcaacactctggctgaccattacggtgagcgtttagctcgcgaacagttggcccttgagcatgagtcttacgagatgggtgaagcacgcttccgcaagatgtttgagcgtcaacttaaagctggtgaggttgcggataacgctgccgccaagcctctcatcactaccctactccctaagatgattgcacgcatcaacgactggtttgaggaagtgaaagctaagcgcggcaagcgcccgacagccttccagttcctgcaagaaatcaagccggaagccgtagcgtacatcaccattaagaccactctggcttgcctaaccagtgcggacaatacaaccgttcaggctgtagcaagcgcaatcggtcgggccattgaggacgaggctcgcttcggtcgtatccgtgaccttgaagctaagcacttcaagaaaaacgttgaggaacaactcaacaagcgcgtagggcacgtctacaagaaagcatttatgcaagttgtcgaggctgacatgctctctaagggtctactcggtggcgaggcgtggtcttcgtggcataaggaagactctattcatgtaggagtacgctgcatcgagatgctcattgagtcaaccggaatggttagcttacaccgccaaaatgctggcgtagtaggtcaagactctgagactatcgaactcgcacctgaatacgctgagtatatcgcaacccgtgcaggtgcgctggctggcatctctccgatgttccaaccttgcgtagttcctcctaagccgtggactggcattactggtggtggctattgggctgcggggcgcaaacccctgcagttagtacgtactcgcagtctggcggcgcttcgccgctatgaagaagtgtcgatgccggaggtcatcaaagcagtcaacattgcgcagaatacagcatggcgtgtgaacaagaaagttctcgacgtagcgaatgcaatcacccaatggcagcactgtccagtcgcggatgtgcctgcgatggatcgtggcgaaatgccagctcgtccgttggacatcgataccaacgagattgcacttaaagcgtggaagaaagaagcttccgcgttctaccgcaaagacaaagcacgcgttagccgtcgtctgtcaatggagtttatgttatctcaggcgaacaagtttgcgaattataaagcaatctggtttccgcaaaacatggattggcgtgggcgcgtgtacgctgtcccgatgttcaatcctcagggcaacgatatgacgaaaggcctgctgacctttgcgcagggtaaacccattggtgaagacggcttctattggctcaagattcatggcgcaaatacagctggagtggataaagtaccgtttccacaacgcatcaaatttgttgaggataaccatacgaatattatggaatgcgcgaaagcaccgctggaaaacacttggtgggcggaacaggactcgccgttctgttttctggcgttctgctttgagtatgctggcgtcatcaatcacggtctgtcgtacaactgtagcttgcctctggcatttgatggtagttgctccggcattcaacatttctcagcgatgttacgcgacgaaattggcggcaaagctgtgaatctcctcccatctgcggaagtgcaggatatttatcgtatcgtcagcgacaaagttaacgaggtactgaaacaagatctgattaacggtacctctaccaccttggaaacggtgactgataagaagacaggcgaaattaccgaacgcacgaaatacgggaccaaagttatggcacagtggtggttagaacacggtgtgaatcgtggcgtcacgaaacgctcggttatgactttggtgtatgggagcaaagagtttggattccgcgatcaagtgctgagtgacaccattcaaccggcgatcgataacggcaaaggtgacatgtttctgaatccgaatcaggctgctggttacatggcgaaactgatctggaacgcagtgtccgtcaccgtagtcgcagcagttgaggcgatgaactggctgaaaagtgcggcgaaattacttgctgctgaagtgaaggataagaagacggatacagttctgcgtggccgctgcgcagtacattgggtgactcccgacggcttccctgtgtggcaggaatacaagaagcctattcagacgcgcttgaacctgatgttcctcggtcagttccgcttacagcctaccattaacaccaacaaagatagcgagattgatgcacacaaacaggagtctggtatcgctcctaactttgtacacagccaagacggtaaccaccttcgtatgactgtagtgtgggcacacgagaagtacggaatcgaatcttttgcactgattcacgactccttcggtaccattccggctgacgctgcgaacctgttcaaagcagtgcgcgaaactatggtttcgacatatgagtcttgtgatgtactggctgatttctacgaccagttcgctgaccagttgcacgagtctcaattggacaaaatgccagcacttccggctaaaggtaacttgaacctccgtgacatcttaaaatcggacttcgcgttcgcg

SEQ ID NO: 408 - protein, 890 aa, synthetic construct
  REGION 1..890: note = Variant of RNA polymerase
MHHHHHHMNTINIAKNDFSDIELAAIPFNTLADHYGERLAREQLALEHESYEMGEARFRKMFERQLKAGEVADNAAAKPLITTLLPKMIARINDWFEEVKAKRGKRPTAFQFLQEIKPEAVAYITIKTTLACLTSADNTTVQAVASAIGRAIEDEARFGRIRDLEAKHFKKNVEEQLNKRVGHVYKKAFMQVVEADMLSKGLLGGEAWSSWHKEDSIHVGVRCIEMLIESTGMVSLHRQNAGVVGQDSETIELAPEYAEYIATRAGALAGISPMFQPCVVPPKPWTGITGGGYWAAGRKPLQLVRTRSLAALRRYEEVSMPEVIKAVNIAQNTAWRVNKKVLDVANAITQWQHCPVADVPAMDRGEMPARPLDIDTNEIALKAWKKEASAFYRKDKARVSRRLSMEFMLSQANKFANYKAIWFPQNMDWRGRVYAVPMFNPQGNDMTKGLLTFAQGKPIGEDGFYWLKIHGANTAGVDKVPFPQRIKFVEDNHTNIMECAKAPLENTWWAEQDSPFCFLAFCFEYAGVINHGLSYNCSLPLAFDGSCSGIQHFSAMLRDEIGGKAVNLLPSAEVQDIYRIVSDKVNEVLKQDLINGTSTTLETVTDKKTGEITERTKYGTKVMAQWWLEHGVNRGVTKRSVMTLVYGSKEFGFRDQVLSDTIQPAIDNGKGDMFLNPNQAAGYMAKLIWNAVSVTVVAAVEAMNWLKSAAKLLAAEVKDKKTDTVLRGRCAVHWVTPDGFPVWQEYKKPIQTRLNLMFLGQFRLQPTINTNKDSEIDAHKQESGIAPNFVHSQDGNHLRMTVVWAHEKYGIESFALIHDSFGTIPADAANLFKAVRETMVSTYESCDVLADFYDQFADQLHESQLDKMPALPAKGNLNLRDILKSDFAFA

SEQ ID NO: 409 - DNA, 2670 bp, synthetic construct
  misc_feature 1..2670: note = Variant of RNA polymerase
  source 1..2670: mol_type = other DNA
atgcaccatcaccatcaccatatgaacacgattaacatcgctaagaacgacttctctgacatcgaactggctgctatcccgttcaacactctggctgaccattacggtgagcgtttagctcgcgaacagttggcccttgagcatgagtcttacgagatgggtgaagcacgcttccgcaagatgtttgagcgtcaacttaaagctggtgaggttgcggataacgctgccgccaagcctctcatctttaccctactccctaagatgattgcacgcatcaacgactggtttgaggaagtgaaagctaagcgcggcaagcgcccgacagccttccagttcctgcaagaaatcaagccggaagccgtagcgtacatcaccattaagaccactctggcttgcctaaccagtgcggacaatacaaccgttcaggctgtagcaagcgcaatcggtcgggccattgaggacgaggctcgcttcggtcgtatccgtgaccttgaagctaagcacttcaagaaaaacgttgaggaacaactcaacaagcgcgtagggcacgtctacaagaaagcatttatgcaagttgtcgaggctgacatgctctctaagggtctactcggtggcgaggcgtggtcttcgtggcataaggaagactctattcatgtaggagtacgctgcatcgagatgctcattgagtcaaccggaatggttagcttacaccgccaaaatgctggcgtagtaggtcaagactctgagactatcgaactcgcacctgaatacgctgaggctatcgcaacccgtgcaggtgcgctggctggcatctctccgatgttccaaccttgcgtagttcctcctaagccgtggactggcattactggtggtggctattgggctgcggggcgcaaacccctgcagttagtacgtactcgcagtctggcggcgcttcgccgctatgaagaagtgtcgatgccggaggtcatcaaagcagtcaacattgcgcagaatacagcatggcgtgtgaacaagaaagttctcgacgtagcgaatgcaatcacccaatggcagcactgtccagtcgcggatgtgcctgcgatggatcgtggcgaaatgccagctcgtccgttggacatcgataccaacgagattgcacttaaagcgtggaagaaagaagcttccgcgttctaccgcaaagacaaagcacgcgttagccgtcgtctgtcaatggagtttatgttatctcaggcgaacaagtttgcgaattataaagcaatctggtttccgcaaaacatggattggcgtgggcgcgtgtacgctgtcccgatgttcaatcctcagggcaacgatatgacgaaaggcctgctgacctttgcgcagggtaaacccattggtgaagacggcttctattggctcaagattcatggcgcaaatacagctggagtggataaagtaccgtttccacaacgcatcaaatttgttgaggataaccatacgaatattatggaatgcgcgaaagcaccgctggaaaacacttggtgggcggaacaggactcgccgttctgttttctggcgttctgctttgagtatgctggcgtcatcaatcacggtctgtcgtacaactgtagcttgcctctggcatttgatggtagttgctccggcattcaacatttctcagcgatgttacgcgacgaaattggcggcaaagctgtgaatctcctcccatctgcggaagtgcaggatatttatcgtatcgtcagcgacaaagttaacgaggtactgaaacaagatctgattaacggtacctctaccaccttggaaacggtgactgataagaagacaggcgaaattaccgaacgcacgaaatacgggaccaaagttatggcacagtggtggttagaacacggtgtgaatcgtggcgtcacgaaacgctcggttatgactttggtgtatgggagcaaagagtttggattccgcgatcaagtgctgagtgacaccattcaaccggcgatcgataacggcaaaggtgacatgtttctgaatccgaatcaggctgctggttacatggcgaaactgatctggaacgcagtgtccgtcaccgtagtcgcagcagttgaggcgatgaactggctgaaaagtgcggcgaaattacttgctgctgaagtgaaggataagaagacggatacagttctgcgtggccgctgcgcagtacattgggtgactcccgacggcttccctgtgtggcaggaatacaagaagcctattcagacgcgcttgaacctgatgttcctcggtcagttccgcttacagcctaccattaacaccaacaaagatagcgagattgatgcacacaaacaggagtctggtatcgctcctaactttgtacacagccaagacggtaaccaccttcgtatgactgtagtgtgggcacacgagaagtacggaatcgaatcttttgcactgattcacgactccttcggtaccattccggctgacgctgcgaacctgttcaaagcagtgcgcgaaactatggtttcgacatatgagtcttgtgatgtactggctgatttctacgaccagttcgctgaccagttgcacgagtctcaattggacaaaatgccagcacttccggctaaaggtaacttgaacctccgtgacatcttaaaatcggacttcgcgttcgcg

SEQ ID NO: 410 - protein, 890 aa, synthetic construct
  REGION 1..890: note = Variant of RNA polymerase
MHHHHHHMNTINIAKNDFSDIELAAIPFNTLADHYGERLAREQLALEHESYEMGEARFRKMFERQLKAGEVADNAAAKPLIFTLLPKMIARINDWFEEVKAKRGKRPTAFQFLQEIKPEAVAYITIKTTLACLTSADNTTVQAVASAIGRAIEDEARFGRIRDLEAKHFKKNVEEQLNKRVGHVYKKAFMQVVEADMLSKGLLGGEAWSSWHKEDSIHVGVRCIEMLIESTGMVSLHRQNAGVVGQDSETIELAPEYAEAIATRAGALAGISPMFQPCVVPPKPWTGITGGGYWAAGRKPLQLVRTRSLAALRRYEEVSMPEVIKAVNIAQNTAWRVNKKVLDVANAITQWQHCPVADVPAMDRGEMPARPLDIDTNEIALKAWKKEASAFYRKDKARVSRRLSMEFMLSQANKFANYKAIWFPQNMDWRGRVYAVPMFNPQGNDMTKGLLTFAQGKPIGEDGFYWLKIHGANTAGVDKVPFPQRIKFVEDNHTNIMECAKAPLENTWWAEQDSPFCFLAFCFEYAGVINHGLSYNCSLPLAFDGSCSGIQHFSAMLRDEIGGKAVNLLPSAEVQDIYRIVSDKVNEVLKQDLINGTSTTLETVTDKKTGEITERTKYGTKVMAQWWLEHGVNRGVTKRSVMTLVYGSKEFGFRDQVLSDTIQPAIDNGKGDMFLNPNQAAGYMAKLIWNAVSVTVVAAVEAMNWLKSAAKLLAAEVKDKKTDTVLRGRCAVHWVTPDGFPVWQEYKKPIQTRLNLMFLGQFRLQPTINTNKDSEIDAHKQESGIAPNFVHSQDGNHLRMTVVWAHEKYGIESFALIHDSFGTIPADAANLFKAVRETMVSTYESCDVLADFYDQFADQLHESQLDKMPALPAKGNLNLRDILKSDFAFA

SEQ ID NO: 411 - DNA, 2670 bp, synthetic construct
  misc_feature 1..2670: note = Variant of RNA polymerase
  source 1..2670: mol_type = other DNA
atgcaccatcaccatcaccatatgaacacgattaacatcgctaagaacgacttctctgacatcgaactggctgctatcccgttcaacactctggctgaccattacggtgagcgtttagctcgcgaacagttggcccttgagcatgagtcttacgagatgggtgaagcacgcttccgcaagatgtttgagcgtcaacttaaagctggtgaggttgcggataacgctgccgccaagcctctcatcactaccctactccctaagatgattgcacgcatcaacgactggtttgaggaagtgaaagctaagcgcggcaagcgcccgacagccttccagttcctgcaagaaatcaagccggaagccgtagcgtacatcaccattaagaccactctggcttgcctaaccagtgcggacaatacaaccgttcaggctgtagcaagcgcaatcggtcgggccattgaggacgaggctcgcttcggtcgtatccgtgaccttgaagctaagcacttcaagaaaaacgttgaggaacaactcaacaagcgcgtagggcacgtctacaagaaagcatttatgcaagttgtcgaggctgacatgctctctaagggtctactcggtggcgaggcgtggtcttcgtggcataaggaagactctattcatgtaggagtacgctgcatcgagatgctcattgagtcaaccggaatggttagcttacaccgccaaaatgctggcgtagtaggtcaagactctgagactatcgaactcgcacctgaatacgctgaggctatcgcaacccgtgcaggtgcgctggctggcatctctccgatgttccaaccttgcgtagttcctcctaagccgtggactggcattactggtggtggctattgggctgcggggcgcaaacccctgcagttagtacgtactcgcagtctggcggcgcttcgccgctatgaagaagtgtcgatgccggaggtcatcaaagcagtcaacattgcgcagaatacagcatggcgtgtgaacaagaaagttctcgacgtagcgaatgcaatcacccaatggcagcactgtccagtcgcggatgtgcctgcgatggatcgtggcgaaatgccagctcgtccgttggacatcgataccaacgagattgcacttaaagcgtggaagaaagaagcttccgcgttctaccgcaaagacaaagcacgcgttagccgtcgtctgtcaatggagtttatgttatctcaggcggataagtttgcgaattataaagcaatctggtttccgcaaaacatggattggcgtgggcgcgtgtacgctgtcccgatgttcaatcctcagggcaacgatatgacgaaaggcctgctgacctttgcgcagggtaaacccattggtgaagacggcttctattggctcaagattcatggcgcaaatacagctggagtggataaagtaccgtttccacaacgcatcaaatttgttgaggataaccatacgaatattatggaatgcgcgaaagcaccgctggaaaacacttggtgggcggaacaggactcgccgttctgttttctggcgttctgctttgagtatgctggcgtcatcaatcacggtctgtcgtacaactgtagcttgcctctggcatttgatggtagttgctccggcattcaacatttctcagcgatgttacgcgacgaaattggcggcaaagctgtgaatctcctcccatctgcggaagtgcaggatatttatcgtatcgtcagcgacaaagttaacgaggtactgaaacaagatctgattaacggtacctctaccaccttggaaacggtgactgataagaagacaggcgaaattaccgaacgcacgaaatacgggaccaaagttatggcacagtggtggttagaacacggtgtgaatcgtggcgtcacgaaacgctcggttatgactttggtgtatgggagcaaagagtttggattccgcgatcaagtgctgagtgacaccattcaaccggcgatcgataacggcaaaggtgacatgtttctgaatccgaatcaggctgctggttacatggcgaaactgatctggaacgcagtgtccgtcaccgtagtcgcagcagttgaggcgatgaactggctgaaaagtgcggcgaaattacttgctgctgaagtgaaggataagaagacggatacagttctgcgtggccgctgcgcagtacattgggtgactcccgacggcttccctgtgtggcaggaatacaagaagcctattcagacgcgcttgaacctgatgttcctcggtcagttccgcttacagcctaccattaacaccaacaaagatagcgagattgatgcacacaaacaggagtctggtatcgctcctaactttgtacacagccaagacggtaaccaccttcgtatgactgtagtgtgggcacacgagaagtacggaatcgaatcttttgcactgattcacgactccttcggtaccattccggctgacgctgcgaacctgttcaaagcagtgcgcgaaactatggtttcgacatatgagtcttgtgatgtactggctgatttctacgaccagttcgctgaccagttgcacgagtctcaattggacaaaatgccagcacttccggctaaaggtaacttgaacctccgtgacatcttaaaatcggacttcgcgttcgcg

SEQ ID NO: 412 - protein, 890 aa, synthetic construct
  REGION 1..890: note = Variant of RNA polymerase
MHHHHHHMNTINIAKNDFSDIELAAIPFNTLADHYGERLAREQLALEHESYEMGEARFRKMFERQLKAGEVADNAAAKPLITTLLPKMIARINDWFEEVKAKRGKRPTAFQFLQEIKPEAVAYITIKTTLACLTSADNTTVQAVASAIGRAIEDEARFGRIRDLEAKHFKKNVEEQLNKRVGHVYKKAFMQVVEADMLSKGLLGGEAWSSWHKEDSIHVGVRCIEMLIESTGMVSLHRQNAGVVGQDSETIELAPEYAEAIATRAGALAGISPMFQPCVVPPKPWTGITGGGYWAAGRKPLQLVRTRSLAALRRYEEVSMPEVIKAVNIAQNTAWRVNKKVLDVANAITQWQHCPVADVPAMDRGEMPARPLDIDTNEIALKAWKKEASAFYRKDKARVSRRLSMEFMLSQADKFANYKAIWFPQNMDWRGRVYAVPMFNPQGNDMTKGLLTFAQGKPIGEDGFYWLKIHGANTAGVDKVPFPQRIKFVEDNHTNIMECAKAPLENTWWAEQDSPFCFLAFCFEYAGVINHGLSYNCSLPLAFDGSCSGIQHFSAMLRDEIGGKAVNLLPSAEVQDIYRIVSDKVNEVLKQDLINGTSTTLETVTDKKTGEITERTKYGTKVMAQWWLEHGVNRGVTKRSVMTLVYGSKEFGFRDQVLSDTIQPAIDNGKGDMFLNPNQAAGYMAKLIWNAVSVTVVAAVEAMNWLKSAAKLLAAEVKDKKTDTVLRGRCAVHWVTPDGFPVWQEYKKPIQTRLNLMFLGQFRLQPTINTNKDSEIDAHKQESGIAPNFVHSQDGNHLRMTVVWAHEKYGIESFALIHDSFGTIPADAANLFKAVRETMVSTYESCDVLADFYDQFADQLHESQLDKMPALPAKGNLNLRDILKSDFAFA

SEQ ID NO: 413 - DNA, 2670 bp, synthetic construct
  misc_feature 1..2670: note = Variant of RNA polymerase
  source 1..2670: mol_type = other DNA
atgcaccatcaccatcaccatatgaacacgattaacatcgctaagaacgacttctctgacatcgaactggctgctatcccgttcaacactctggctgaccattacggtgagcgtttagctcgcgaacagttggcccttgagcatgagtcttacgagatgggtgaagcacgcttccgcaagatgtttgagcgtcaacttaaagctggtgaggttgcggataacgctgccgccaagcctctcatcactaccctactccctaagatgattgcacgcatcaacgactggtttgaggaagtgaaagctaagcgcggcaagcgcccgacagccttccagttcctgcaagaaatcaagccggaagccgtagcgtacatcaccattaagaccactctggcttgcctaaccagtgcggacaatacaaccgttcaggctgtagcaagcgcaatcggtcgggccattgaggacgaggctcgcttcggtcgtatccgtgaccttgaagctaagcacttcaagaaaaacgttgaggaacaactcaacaagcgcgtagggcacgtctacaagaaagcatttatgcaagttgtcgaggctgacatgctctctaagggtctactcggtggcgaggcgtggtcttcgtggcataaggaagactctattcatgtaggagtacgctgcatcgagatgctcattgagtcaaccggaatggttagcttacaccgccaaaatgctggcgtagtaggtcaagactctgagactatcgaactcgcacctgaatacgctgaggctatcgcaacccgtgcaggtgcgctggctggcatctctccgatgttccaaccttgcgtagttcctcctaagccgtggactggcattactggtggtggctattgggctgcggggcgcaaacccctgcagttagtacgtactcgcagtctggcggcgcttcgccgctatgaagaagtgtcgatgccggaggtcatcaaagcagtcaacattgcgcagaatacagcatggcgtgtgaacaagaaagttctcgacgtagcgaatgcaatcacccaatggcagcactgtccagtcgcggatgtgcctgcgatggatcgtggcgaaatgccagctcgtccgttggacatcgataccaacgagattgcacttaaagcgtggaagaaagaagcttccgcgttctaccgcaaagacaaagcacgcgttagccgtcgtctgtcaatggagtttatgttatctcaggcgaacaagtttgcgaattataaagcaatctggtttccgcaaaacatggattggcgtgggcgcgtgtacgctgtcccgatgttcaatcctcagggcaacgatatgacgaaaggcctgctgacctttgcgcagggtaaacccattggtgaagacggcttctattggctcaagattcatggcgcaaatacagctggagtggataaagtaccgtttccacaacgcatcaaatttgttgaggataaccatacgaatattatggaatgcgcgaaagcaccgctggaaaacacttggtgggcggaacaggactcgccgttctgttttctggcgttctgctttgagtatgctggcgtcatcaatcacggtctgtcgtacaactgtagcttgcctctggcatttgatggtagttgctccggcattcaacatttctcagcgatgttacgcgacgaaattggcggcaaagctgtgaatctcctcccatctgcggaagtgcaggatatttatcgtatcgtcagcgacaaagttaacgaggtactgaaacaagatctgattaacggtacctctaccaccttggaaacggtgagggataagaagacaggcgaaattaccgaacgcacgaaatacgggaccaaagttatggcacagtggtggttagaacacggtgtgaatcgtggcgtcacgaaacgctcggttatgactttggtgtatgggagcaaagagtttggattccgcgatcaagtgctgagtgacaccattcaaccggcgatcgataacggcaaaggtgacatgtttctgaatccgaatcaggctgctggttacatggcgaaactgatctggaacgcagtgtccgtcaccgtagtcgcagcagttgaggcgatgaactggctgaaaagtgcggcgaaattacttgctgctgaagtgaaggataagaagacggatacagttctgcgtggccgctgcgcagtacattgggtgactcccgacggcttccctgtgtggcaggaatacaagaagcctattcagacgcgcttgaacctgatgttcctcggtcagttccgcttacagcctaccattaacaccaacaaagatagcgagattgatgcacacaaacaggagtctggtatcgctcctaactttgtacacagccaagacggtaaccaccttcgtatgactgtagtgtgggcacacgagaagtacggaatcgaatcttttgcactgattcacgactccttcggtaccattccggctgacgctgcgaacctgttcaaagcagtgcgcgaaactatggtttcgacatatgagtcttgtgatgtactggctgatttctacgaccagttcgctgaccagttgcacgagtctcaattggacaaaatgccagcacttccggctaaaggtaacttgaacctccgtgacatcttaaaatcggacttcgcgttcgcg

SEQ ID NO: 414 - protein, 890 aa, synthetic construct
  REGION 1..890: note = Variant of RNA polymerase
MHHHHHHMNTINIAKNDFSDIELAAIPFNTLADHYGERLAREQLALEHESYEMGEARFRKMFERQLKAGEVADNAAAKPLITTLLPKMIARINDWFEEVKAKRGKRPTAFQFLQEIKPEAVAYITIKTTLACLTSADNTTVQAVASAIGRAIEDEARFGRIRDLEAKHFKKNVEEQLNKRVGHVYKKAFMQVVEADMLSKGLLGGEAWSSWHKEDSIHVGVRCIEMLIESTGMVSLHRQNAGVVGQDSETIELAPEYAEAIATRAGALAGISPMFQPCVVPPKPWTGITGGGYWAAGRKPLQLVRTRSLAALRRYEEVSMPEVIKAVNIAQNTAWRVNKKVLDVANAITQWQHCPVADVPAMDRGEMPARPLDIDTNEIALKAWKKEASAFYRKDKARVSRRLSMEFMLSQANKFANYKAIWFPQNMDWRGRVYAVPMFNPQGNDMTKGLLTFAQGKPIGEDGFYWLKIHGANTAGVDKVPFPQRIKFVEDNHTNIMECAKAPLENTWWAEQDSPFCFLAFCFEYAGVINHGLSYNCSLPLAFDGSCSGIQHFSAMLRDEIGGKAVNLLPSAEVQDIYRIVSDKVNEVLKQDLINGTSTTLETVRDKKTGEITERTKYGTKVMAQWWLEHGVNRGVTKRSVMTLVYGSKEFGFRDQVLSDTIQPAIDNGKGDMFLNPNQAAGYMAKLIWNAVSVTVVAAVEAMNWLKSAAKLLAAEVKDKKTDTVLRGRCAVHWVTPDGFPVWQEYKKPIQTRLNLMFLGQFRLQPTINTNKDSEIDAHKQESGIAPNFVHSQDGNHLRMTVVWAHEKYGIESFALIHDSFGTIPADAANLFKAVRETMVSTYESCDVLADFYDQFADQLHESQLDKMPALPAKGNLNLRDILKSDFAFA

SEQ ID NO: 415 - DNA, 2670 bp, synthetic construct
  misc_feature 1..2670: note = Variant of RNA polymerase
  source 1..2670: mol_type = other DNA
atgcaccatcaccatcaccatatgaacacgattaacatcgctaagaacgacttctctgacatcgaactggctgctatcccgttcaacactctggctgaccattacggtgagcgtttagctcgcgaacagttggcccttgagcatgagtcttacgagatgggtgaaattcgcttccgcaagatgtttgagcgtcaacttaaagctggtgaggttgcggataacgctgccgccaagcctctcatcactaccctactccctaagatgattgcacgcatcaacgactggtttgaggaagtgaaagctaagcgcggcaagcgcccgacagccttccagttcctgcaagaaatcaagccggaagccgtagcgtacatcaccattaagaccactctggcttgcctaaccagtgcggacaatacaaccgttcaggctgtagcaagcgcaatcggtcgggccattgaggacgaggctcgcttcggtcgtatccgtgaccttgaagctaagcacttcaagaaaaacgttgaggaacaactcaacaagcgcgtagggcacgtctacaagaaagcatttatgcaagttgtcgaggctgacatgctctctaagggtctactcggtggcgaggcgtggtcttcgtggcataaggaagactctattcatgtaggagtacgctgcatcgagatgctcattgagtcaaccggaatggttagcttacaccgccaaaatgctggcgtagtaggtcaagactctgagactatcgaactcgcacctgaatacgctgaggctatcgcaacccgtgcaggtgcgctggctggcatctctccgatgttccaaccttgcgtagttcctcctaagccgtggactggcattactggtggtggctattgggctgcggggcgcaaacccctgcagttagtacgtactcgcagtctggcggcgcttcgccgctatgaagaagtgtcgatgccggaggtcatcaaagcagtcaacattgcgcagaatacagcatggcgtgtgaacaagaaagttctcgacgtagcgaatgcaatcacccaatggcagcactgtccagtcgcggatgtgcctgcgatggatcgtggcgaaatgccagctcgtccgttggacatcgataccaacgagattgcacttaaagcgtggaagaaagaagcttccgcgttctaccgcaaagacaaagcacgcgttagccgtcgtctgtcaatggagtttatgttatctcaggcgaacaagtttgcgaattataaagcaatctggtttccgcaaaacatggattggcgtgggcgcgtgtacgctgtcccgatgttcaatcctcagggcaacgatatgacgaaaggcctgctgacctttgcgcagggtaaacccattggtgaagacggcttctattggctcaagattcatggcgcaaatacagctggagtggataaagtaccgtttccacaacgcatcaaatttgttgaggataaccatacgaatattatggaatgcgcgaaagcaccgctggaaaacacttggtgggcggaacaggactcgccgttctgttttctggcgttctgctttgagtatgctggcgtcatcaatcacggtctgtcgtacaactgtagcttgcctctggcatttgatggtagttgctccggcattcaacatttctcagcgatgttacgcgacgaaattggcggcaaagctgtgaatctcctcccatctgcggaagtgcaggatatttatcgtatcgtcagcgacaaagttaacgaggtactgaaacaagatctgattaacggtacctctaccaccttggaaacggtgactgataagaagacaggcgaaattaccgaacgcacgaaatacgggaccaaagttatggcacagtggtggttagaacacggtgtgaatcgtggcgtcacgaaacgctcggttatgactttggtgtatgggagcaaagagtttggattccgcgatcaagtgctgagtgacaccattcaaccggcgatcgataacggcaaaggtgacatgtttctgaatccgaatcaggctgctggttacatggcgaaactgatctggaacgcagtgtccgtcaccgtagtcgcagcagttgaggcgatgaactggctgaaaagtgcggcgaaattacttgctgctgaagtgaaggataagaagacggatacagttctgcgtggccgctgcgcagtacattgggtgactcccgacggcttccctgtgtggcaggaatacaagaagcctattcagacgcgcttgaacctgatgttcctcggtcagttccgcttacagcctaccattaacaccaacaaagatagcgagattgatgcacacaaacaggagtctggtatcgctcctaactttgtacacagccaagacggtaaccaccttcgtatgactgtagtgtgggcacacgagaagtacggaatcgaatcttttgcactgattcacgactccttcggtaccattccggctgacgctgcgaacctgttcaaagcagtgcgcgaaactatggtttcgacatatgagtcttgtgatgtactggctgatttctacgaccagttcgctgaccagttgcacgagtctcaattggacaaaatgccagcacttccggctaaaggtaacttgaacctccgtgacatcttaaaatcggacttcgcgttcgcg

SEQ ID NO: 416 - protein, 890 aa, synthetic construct
  REGION 1..890: note = Variant of RNA polymerase
MHHHHHHMNTINIAKNDFSDIELAAIPFNTLADHYGERLAREQLALEHESYEMGEIRFRKMFERQLKAGEVADNAAAKPLITTLLPKMIARINDWFEEVKAKRGKRPTAFQFLQEIKPEAVAYITIKTTLACLTSADNTTVQAVASAIGRAIEDEARFGRIRDLEAKHFKKNVEEQLNKRVGHVYKKAFMQVVEADMLSKGLLGGEAWSSWHKEDSIHVGVRCIEMLIESTGMVSLHRQNAGVVGQDSETIELAPEYAEAIATRAGALAGISPMFQPCVVPPKPWTGITGGGYWAAGRKPLQLVRTRSLAALRRYEEVSMPEVIKAVNIAQNTAWRVNKKVLDVANAITQWQHCPVADVPAMDRGEMPARPLDIDTNEIALKAWKKEASAFYRKDKARVSRRLSMEFMLSQANKFANYKAIWFPQNMDWRGRVYAVPMFNPQGNDMTKGLLTFAQGKPIGEDGFYWLKIHGANTAGVDKVPFPQRIKFVEDNHTNIMECAKAPLENTWWAEQDSPFCFLAFCFEYAGVINHGLSYNCSLPLAFDGSCSGIQHFSAMLRDEIGGKAVNLLPSAEVQDIYRIVSDKVNEVLKQDLINGTSTTLETVTDKKTGEITERTKYGTKVMAQWWLEHGVNRGVTKRSVMTLVYGSKEFGFRDQVLSDTIQPAIDNGKGDMFLNPNQAAGYMAKLIWNAVSVTVVAAVEAMNWLKSAAKLLAAEVKDKKTDTVLRGRCAVHWVTPDGFPVWQEYKKPIQTRLNLMFLGQFRLQPTINTNKDSEIDAHKQESGIAPNFVHSQDGNHLRMTVVWAHEKYGIESFALIHDSFGTIPADAANLFKAVRETMVSTYESCDVLADFYDQFADQLHESQLDKMPALPAKGNLNLRDILKSDFAFA

SEQ ID NO: 417 - DNA, 2670 bp, synthetic construct
  misc_feature 1..2670: note = Variant of RNA polymerase
  source 1..2670: mol_type = other DNA
atgcaccatcaccatcaccatatgaacacgattaacatcgctaagaacgacttctctgacatcgaactggctgctatcccgttcaacactctggctgaccattacggtgagcgtttagctcgcgaacagttggcccttgagcatgagtcttacgagatgcaggaagcacgcttccgcaagatgtttgagcgtcaacttaaagctggtgaggttgcggataacgctgccgccaagcctctcatcactaccctactccctaagatgattgcacgcatcaacgactggtttgaggaagtgaaagctaagcgcggcaagcgcccgacagccttccagttcctgcaagaaatcaagccggaagccgtagcgtacatcaccattaagaccactctggcttgcctaaccagtgcggacaatacaaccgttcaggctgtagcaagcgcaatcggtcgggccattgaggacgaggctcgcttcggtcgtatccgtgaccttgaagctaagcacttcaagaaaaacgttgaggaacaactcaacaagcgcgtagggcacgtctacaagaaagcatttatgcaagttgtcgaggctgacatgctctctaagggtctactcggtggcgaggcgtggtcttcgtggcataaggaagactctattcatgtaggagtacgctgcatcgagatgctcattgagtcaaccggaatggttagcttacaccgccaaaatgctggcgtagtaggtcaagactctgagactatcgaactcgcacctgaatacgctgaggctatcgcaacccgtgcaggtgcgctggctggcatctctccgatgttccaaccttgcgtagttcctcctaagccgtggactggcattactggtggtggctattgggctgcggggcgcaaacccctgcagttagtacgtactcgcagtctggcggcgcttcgccgctatgaagaagtgtcgatgccggaggtcatcaaagcagtcaacattgcgcagaatacagcatggcgtgtgaacaagaaagttctcgacgtagcgaatgcaatcacccaatggcagcactgtccagtcgcggatgtgcctgcgatggatcgtggcgaaatgccagctcgtccgttggacatcgataccaacgagattgcacttaaagcgtggaagaaagaagcttccgcgttctaccgcaaagacaaagcacgcgttagccgtcgtctgtcaatggagtttatgttatctcaggcgaacaagtttgcgaattataaagcaatctggtttccgcaaaacatggattggcgtgggcgcgtgtacgctgtcccgatgttcaatcctcagggcaacgatatgacgaaaggcctgctgacctttgcgcagggtaaacccattggtgaagacggcttctattggctcaagattcatggcgcaaatacagctggagtggataaagtaccgtttccacaacgcatcaaatttgttgaggataaccatacgaatattatggaatgcgcgaaagcaccgctggaaaacacttggtgggcggaacaggactcgccgttctgttttctggcgttctgctttgagtatgctggcgtcatcaatcacggtctgtcgtacaactgtagcttgcctctggcatttgatggtagttgctccggcattcaacatttctcagcgatgttacgcgacgaaattggcggcaaagctgtgaatctcctcccatctgcggaagtgcaggatatttatcgtatcgtcagcgacaaagttaacgaggtactgaaacaagatctgattaacggtacctctaccaccttggaaacggtgactgataagaagacaggcgaaattaccgaacgcacgaaatacgggaccaaagttatggcacagtggtggttagaacacggtgtgaatcgtggcgtcacgaaacgctcggttatgactttggtgtatgggagcaaagagtttggattccgcgatcaagtgctgagtgacaccattcaaccggcgatcgataacggcaaaggtgacatgtttctgaatccgaatcaggctgctggttacatggcgaaactgatctggaacgcagtgtccgtcaccgtagtcgcagcagttgaggcgatgaactggctgaaaagtgcggcgaaattacttgctgctgaagtgaaggataagaagacggatacagttctgcgtggccgctgcgcagtacattgggtgactcccgacggcttccctgtgtggcaggaatacaagaagcctattcagacgcgcttgaacctgatgttcctcggtcagttccgcttacagcctaccattaacaccaacaaagatagcgagattgatgcacacaaacaggagtctggtatcgctcctaactttgtacacagccaagacggtaaccaccttcgtatgactgtagtgtgggcacacgagaagtacggaatcgaatcttttgcactgattcacgactccttcggtaccattccggctgacgctgcgaacctgttcaaagcagtgcgcgaaactatggtttcgacatatgagtcttgtgatgtactggctgatttctacgaccagttcgctgaccagttgcacgagtctcaattggacaaaatgccagcacttccggctaaaggtaacttgaacctccgtgacatcttaaaatcggacttcgcgttcgcg

SEQ ID NO: 418 - protein, 890 aa, synthetic construct
  REGION 1..890: note = Variant of RNA polymerase
MHHHHHHMNTINIAKNDFSDIELAAIPFNTLADHYGERLAREQLALEHESYEMQEARFRKMFERQLKAGEVADNAAAKPLITTLLPKMIARINDWFEEVKAKRGKRPTAFQFLQEIKPEAVAYITIKTTLACLTSADNTTVQAVASAIGRAIEDEARFGRIRDLEAKHFKKNVEEQLNKRVGHVYKKAFMQVVEADMLSKGLLGGEAWSSWHKEDSIHVGVRCIEMLIESTGMVSLHRQNAGVVGQDSETIELAPEYAEAIATRAGALAGISPMFQPCVVPPKPWTGITGGGYWAAGRKPLQLVRTRSLAALRRYEEVSMPEVIKAVNIAQNTAWRVNKKVLDVANAITQWQHCPVADVPAMDRGEMPARPLDIDTNEIALKAWKKEASAFYRKDKARVSRRLSMEFMLSQANKFANYKAIWFPQNMDWRGRVYAVPMFNPQGNDMTKGLLTFAQGKPIGEDGFYWLKIHGANTAGVDKVPFPQRIKFVEDNHTNIMECAKAPLENTWWAEQDSPFCFLAFCFEYAGVINHGLSYNCSLPLAFDGSCSGIQHFSAMLRDEIGGKAVNLLPSAEVQDIYRIVSDKVNEVLKQDLINGTSTTLETVTDKKTGEITERTKYGTKVMAQWWLEHGVNRGVTKRSVMTLVYGSKEFGFRDQVLSDTIQPAIDNGKGDMFLNPNQAAGYMAKLIWNAVSVTVVAAVEAMNWLKSAAKLLAAEVKDKKTDTVLRGRCAVHWVTPDGFPVWQEYKKPIQTRLNLMFLGQFRLQPTINTNKDSEIDAHKQESGIAPNFVHSQDGNHLRMTVVWAHEKYGIESFALIHDSFGTIPADAANLFKAVRETMVSTYESCDVLADFYDQFADQLHESQLDKMPALPAKGNLNLRDILKSDFAFA

SEQ ID NO: 419 - DNA, 2670 bp, synthetic construct
  misc_feature 1..2670: note = Variant of RNA polymerase
  source 1..2670: mol_type = other DNA
atgcaccatcaccatcaccatatgaacacgattaacatcgctaagaacgacttctctgacatcgaactggctgctatcccgttcaacactctggctgaccattacggtgagcgtttagctcgcgaacagttggcccttgagcatgagtcttacgagatgggtgaagcacgcttcattaagatgtttgagcgtcaacttaaagctggtgaggttgcggataacgctgccgccaagcctctcatcactaccctactccctaagatgattgcacgcatcaacgactggtttgaggaagtgaaagctaagcgcggcaagcgcccgacagccttccagttcctgcaagaaatcaagccggaagccgtagcgtacatcaccattaagaccactctggcttgcctaaccagtgcggacaatacaaccgttcaggctgtagcaagcgcaatcggtcgggccattgaggacgaggctcgcttcggtcgtatccgtgaccttgaagctaagcacttcaagaaaaacgttgaggaacaactcaacaagcgcgtagggcacgtctacaagaaagcatttatgcaagttgtcgaggctgacatgctctctaagggtctactcggtggcgaggcgtggtcttcgtggcataaggaagactctattcatgtaggagtacgctgcatcgagatgctcattgagtcaaccggaatggttagcttacaccgccaaaatgctggcgtagtaggtcaagactctgagactatcgaactcgcacctgaatacgctgaggctatcgcaacccgtgcaggtgcgctggctggcatctctccgatgttccaaccttgcgtagttcctcctaagccgtggactggcattactggtggtggctattgggctgcggggcgcaaacccctgcagttagtacgtactcgcagtctggcggcgcttcgccgctatgaagaagtgtcgatgccggaggtcatcaaagcagtcaacattgcgcagaatacagcatggcgtgtgaacaagaaagttctcgacgtagcgaatgcaatcacccaatggcagcactgtccagtcgcggatgtgcctgcgatggatcgtggcgaaatgccagctcgtccgttggacatcgataccaacgagattgcacttaaagcgtggaagaaagaagcttccgcgttctaccgcaaagacaaagcacgcgttagccgtcgtctgtcaatggagtttatgttatctcaggcgaacaagtttgcgaattataaagcaatctggtttccgcaaaacatggattggcgtgggcgcgtgtacgctgtcccgatgttcaatcctcagggcaacgatatgacgaaaggcctgctgacctttgcgcagggtaaacccattggtgaagacggcttctattggctcaagattcatggcgcaaatacagctggagtggataaagtaccgtttccacaacgcatcaaatttgttgaggataaccatacgaatattatggaatgcgcgaaagcaccgctggaaaacacttggtgggcggaacaggactcgccgttctgttttctggcgttctgctttgagtatgctggcgtcatcaatcacggtctgtcgtacaactgtagcttgcctctggcatttgatggtagttgctccggcattcaacatttctcagcgatgttacgcgacgaaattggcggcaaagctgtgaatctcctcccatctgcggaagtgcaggatatttatcgtatcgtcagcgacaaagttaacgaggtactgaaacaagatctgattaacggtacctctaccaccttggaaacggtgactgataagaagacaggcgaaattaccgaacgcacgaaatacgggaccaaagttatggcacagtggtggttagaacacggtgtgaatcgtggcgtcacgaaacgctcggttatgactttggtgtatgggagcaaagagtttggattccgcgatcaagtgctgagtgacaccattcaaccggcgatcgataacggcaaaggtgacatgtttctgaatccgaatcaggctgctggttacatggcgaaactgatctggaacgcagtgtccgtcaccgtagtcgcagcagttgaggcgatgaactggctgaaaagtgcggcgaaattacttgctgctgaagtgaaggataagaagacggatacagttctgcgtggccgctgcgcagtacattgggtgactcccgacggcttccctgtgtggcaggaatacaagaagcctattcagacgcgcttgaacctgatgttcctcggtcagttccgcttacagcctaccattaacaccaacaaagatagcgagattgatgcacacaaacaggagtctggtatcgctcctaactttgtacacagccaagacggtaaccaccttcgtatgactgtagtgtgggcacacgagaagtacggaatcgaatcttttgcactgattcacgactccttcggtaccattccggctgacgctgcgaacctgttcaaagcagtgcgcgaaactatggtttcgacatatgagtcttgtgatgtactggctgatttctacgaccagttcgctgaccagttgcacgagtctcaattggacaaaatgccagcacttccggctaaaggtaacttgaacctccgtgacatcttaaaatcggacttcgcgttcgcg

SEQ ID NO: 420 - protein, 890 aa, synthetic construct
  REGION 1..890: note = Variant of RNA polymerase
MHHHHHHMNTINIAKNDFSDIELAAIPFNTLADHYGERLAREQLALEHESYEMGEARFIKMFERQLKAGEVADNAAAKPLITTLLPKMIARINDWFEEVKAKRGKRPTAFQFLQEIKPEAVAYITIKTTLACLTSADNTTVQAVASAIGRAIEDEARFGRIRDLEAKHFKKNVEEQLNKRVGHVYKKAFMQVVEADMLSKGLLGGEAWSSWHKEDSIHVGVRCIEMLIESTGMVSLHRQNAGVVGQDSETIELAPEYAEAIATRAGALAGISPMFQPCVVPPKPWTGITGGGYWAAGRKPLQLVRTRSLAALRRYEEVSMPEVIKAVNIAQNTAWRVNKKVLDVANAITQWQHCPVADVPAMDRGEMPARPLDIDTNEIALKAWKKEASAFYRKDKARVSRRLSMEFMLSQANKFANYKAIWFPQNMDWRGRVYAVPMFNPQGNDMTKGLLTFAQGKPIGEDGFYWLKIHGANTAGVDKVPFPQRIKFVEDNHTNIMECAKAPLENTWWAEQDSPFCFLAFCFEYAGVINHGLSYNCSLPLAFDGSCSGIQHFSAMLRDEIGGKAVNLLPSAEVQDIYRIVSDKVNEVLKQDLINGTSTTLETVTDKKTGEITERTKYGTKVMAQWWLEHGVNRGVTKRSVMTLVYGSKEFGFRDQVLSDTIQPAIDNGKGDMFLNPNQAAGYMAKLIWNAVSVTVVAAVEAMNWLKSAAKLLAAEVKDKKTDTVLRGRCAVHWVTPDGFPVWQEYKKPIQTRLNLMFLGQFRLQPTINTNKDSEIDAHKQESGIAPNFVHSQDGNHLRMTVVWAHEKYGIESFALIHDSFGTIPADAANLFKAVRETMVSTYESCDVLADFYDQFADQLHESQLDKMPALPAKGNLNLRDILKSDFAFA

SEQ ID NO: 421 - DNA, 2670 bp, synthetic construct
  misc_feature 1..2670: note = Variant of RNA polymerase
  source 1..2670: mol_type = other DNA
atgcaccatcaccatcaccatatgaacacgattaacatcgctaagaacgacttctctgacatcgaactggctgctatcccgttcaacactctggctgaccattacggtgagcgtttagctcgcgaacagttggcccttgagcatgagtcttacgagatgggtgaagcacgcttccgcaagatgtttgagcgtcaacttaaagctggtgaggttgcggataacgctgccgccaagcctctcatcactaccctactccctaagatgattgcacgcatcaacgactggtttgaggaagtgaaagctaagcgcggcaagcgcccgacagccttccagttcctgcaagaaatcaagccggaagccgtagcgtacatcaccattaagaccactctggcttgcctaaccagtgcggacaatacaaccgttcaggctgtagcaagcgcaatcggtcgggccattgaggacgaggctcgcttcggtcgtatccgtgaccttgaagctaagcacttcaagaaaaacgttgaggaacaactcaacaagcgcgtagggcacgtctacaagaaagcatttatgcaagttgtcgaggctgacatgctctctaagggtctactcggtggcgaggcgtggtcttcgtggcataaggaagactctattcatgtaggagtacgctgcatcgagatgctcattgagtcaaccggaatggttagcttacaccgccaaaatgctggcgtagtaggtcaagactctgagactatcgaactcgcacctctgtacgctgaggctatcgcaacccgtgcaggtgcgctggctggcatctctccgatgttccaaccttgcgtagttcctcctaagccgtggactggcattactggtggtggctattgggctgcggggcgcaaacccctgcagttagtacgtactcgcagtctggcggcgcttcgccgctatgaagaagtgtcgatgccggaggtcatcaaagcagtcaacattgcgcagaatacagcatggcgtgtgaacaagaaagttctcgacgtagcgaatgcaatcacccaatggcagcactgtccagtcgcggatgtgcctgcgatggatcgtggcgaaatgccagctcgtccgttggacatcgataccaacgagattgcacttaaagcgtggaagaaagaagcttccgcgttctaccgcaaagacaaagcacgcgttagccgtcgtctgtcaatggagtttatgttatctcaggcgaacaagtttgcgaattataaagcaatctggtttccgcaaaacatggattggcgtgggcgcgtgtacgctgtcccgatgttcaatcctcagggcaacgatatgacgaaaggcctgctgacctttgcgcagggtaaacccattggtgaagacggcttctattggctcaagattcatggcgcaaatacagctggagtggataaagtaccgtttccacaacgcatcaaatttgttgaggataaccatacgaatattatggaatgcgcgaaagcaccgctggaaaacacttggtgggcggaacaggactcgccgttctgttttctggcgttctgctttgagtatgctggcgtcatcaatcacggtctgtcgtacaactgtagcttgcctctggcatttgatggtagttgctccggcattcaacatttctcagcgatgttacgcgacgaaattggcggcaaagctgtgaatctcctcccatctgcggaagtgcaggatatttatcgtatcgtcagcgacaaagttaacgaggtactgaaacaagatctgattaacggtacctctaccaccttggaaacggtgactgataagaagacaggcgaaattaccgaacgcacgaaatacgggaccaaagttatggcacagtggtggttagaacacggtgtgaatcgtggcgtcacgaaacgctcggttatgactttggtgtatgggagcaaagagtttggattccgcgatcaagtgctgagtgacaccattcaaccggcgatcgataacggcaaaggtgacatgtttctgaatccgaatcaggctgctggttacatggcgaaactgatctggaacgcagtgtccgtcaccgtagtcgcagcagttgaggcgatgaactggctgaaaagtgcggcgaaattacttgctgctgaagtgaaggataagaagacggatacagttctgcgtggccgctgcgcagtacattgggtgactcccgacggcttccctgtgtggcaggaatacaagaagcctattcagacgcgcttgaacctgatgttcctcggtcagttccgcttacagcctaccattaacaccaacaaagatagcgagattgatgcacacaaacaggagtctggtatcgctcctaactttgtacacagccaagacggtaaccaccttcgtatgactgtagtgtgggcacacgagaagtacggaatcgaatcttttgcactgattcacgactccttcggtaccattccggctgacgctgcgaacctgttcaaagcagtgcgcgaaactatggtttcgacatatgagtcttgtgatgtactggctgatttctacgaccagttcgctgaccagttgcacgagtctcaattggacaaaatgccagcacttccggctaaaggtaacttgaacctccgtgacatcttaaaatcggacttcgcgttcgcg

SEQ ID NO: 422 - protein, 890 aa, synthetic construct
  REGION 1..890: note = Variant of RNA polymerase
MHHHHHHMNTINIAKNDFSDIELAAIPFNTLADHYGERLAREQLALEHESYEMGEARFRKMFERQLKAGEVADNAAAKPLITTLLPKMIARINDWFEEVKAKRGKRPTAFQFLQEIKPEAVAYITIKTTLACLTSADNTTVQAVASAIGRAIEDEARFGRIRDLEAKHFKKNVEEQLNKRVGHVYKKAFMQVVEADMLSKGLLGGEAWSSWHKEDSIHVGVRCIEMLIESTGMVSLHRQNAGVVGQDSETIELAPLYAEAIATRAGALAGISPMFQPCVVPPKPWTGITGGGYWAAGRKPLQLVRTRSLAALRRYEEVSMPEVIKAVNIAQNTAWRVNKKVLDVANAITQWQHCPVADVPAMDRGEMPARPLDIDTNEIALKAWKKEASAFYRKDKARVSRRLSMEFMLSQANKFANYKAIWFPQNMDWRGRVYAVPMFNPQGNDMTKGLLTFAQGKPIGEDGFYWLKIHGANTAGVDKVPFPQRIKFVEDNHTNIMECAKAPLENTWWAEQDSPFCFLAFCFEYAGVINHGLSYNCSLPLAFDGSCSGIQHFSAMLRDEIGGKAVNLLPSAEVQDIYRIVSDKVNEVLKQDLINGTSTTLETVTDKKTGEITERTKYGTKVMAQWWLEHGVNRGVTKRSVMTLVYGSKEFGFRDQVLSDTIQPAIDNGKGDMFLNPNQAAGYMAKLIWNAVSVTVVAAVEAMNWLKSAAKLLAAEVKDKKTDTVLRGRCAVHWVTPDGFPVWQEYKKPIQTRLNLMFLGQFRLQPTINTNKDSEIDAHKQESGIAPNFVHSQDGNHLRMTVVWAHEKYGIESFALIHDSFGTIPADAANLFKAVRETMVSTYESCDVLADFYDQFADQLHESQLDKMPALPAKGNLNLRDILKSDFAFA

SEQ ID NO: 423 - DNA, 2670 bp, synthetic construct
  misc_feature 1..2670: note = Variant of RNA polymerase
  source 1..2670: mol_type = other DNA
atgcaccatcaccatcaccatatgaacacgattaacattgctaagaacgacttctctgacatcgaactggctgctatcccgttcaacactctggctgaccattacggtgagcgtttagctcgcgaacagttggcccttgagcatgagtcttacgagatgggtgaagcacgcttccgcaagatgtttgagcgtcaacttaaagctggtgaggttgcggataacgctgccgccaagcctctcatcactaccctactccctaagatgattgcacgcatcaacgactggtttgaggaagtgaaagctaagcgcggcaagcgcccgacagccttccagttcctgcaagaaatcaagccggaagccgtagcgtacatcaccattaagaccactctggcttgcctaaccagtgcggacaatacaaccgttcaggctgtagcaagcgcaatcggtcgggccattgaggacgaggctcgcttcggtcgtatccgtgaccttgaagctaagcacttcaagaaaaacgttgaggaacaactcaacaagcgcgtagggcacgtctacaagaaagcatttatgcaagttgtcgaggctgacatgctctctaagggtctactcggtggcgaggcgtggtcttcgtggcataaggaagactctattcatgtaggagtacgctgcatcgagatgctcattgagtcaaccggaatggttagcttacaccgccaaaatgctggcgtagtaggtcaagactctgagactatcgaactcgcacctgaatacgctgaggctatcgcaacccgtgcaggtgcgctggctggcatctctccgatgttccaaccttgcgtagttcctcctaagccgtggactggcattactggtggtggctattgggctgcggggcgcaaacccctgcagttagtacgtactcgcagtctggcggcgcttcgccgctatgaagaagtgtcgatgccggaggtcatcaaagcagtcaacattgcgcagaatacagcatggcgtattaacaagaaagttctcgacgtagcgaatgcaatcacccaatggcagcactgtccagtcgcggatgtgcctgcgatggatcgtggcgaaatgccagctcgtccgttggacatcgataccaacgagattgcacttaaagcgtggaagaaagaagcttccgcgttctaccgcaaagacaaagcacgcgttagccgtcgtctgtcaatggagtttatgttatctcaggcgaacaagtttgcgaattataaagcaatctggtttccgcaaaacatggattggcgtgggcgcgtgtacgctgtcccgatgttcaatcctcagggcaacgatatgacgaaaggcctgctgacctttgcgcaggagaaacccattggtgaagacggcttctattggctcaagattcatggcgcaaatacagctggagtggataaagtaccgtttccacaacgcatcaaatttgttgaggataaccatacgaatattatggaatgcgcgaaagcaccgctggaaaacacttggtgggcggaacaggactcgccgttctgttttctggcgttctgctttgagtatgctggcgtcatcaatcacggtctgtcgtacaactgtagcttgcctctggcatttgatggtagttgctccggcattcaacatttctcagcgatgttacgcgacgaaattggcggcaaagctgtgaatctcctcccatctgcggaataccaggatatttatcgtatcgtcagcgacaaagttaacgaggtactgaaacaagatctgattaacggtacctctaccaccgtggaaacggtgactgataagaagacaggcgaaattacccaacgcacgaaatacgggaccaaagttatggcacagtggtggttagaacacggtgtgaatcgtggcgtcacgaaacgctcggttatgactttggtgtatgggagcaaagagtttggattccgcgatcaagtgctgagtgacaccattcaaccggcgatcgataacggcaaaggtgacatgtttctgaatccgaatcaggctgctggttacatggcgaaactgatctggaacgcagtgtccgggaccgtagtcgcagcagttgaggcgatgaactggctgaaaagtgcggcgaaattacttgctgctgaagtgaaggatcctaagacggatacagttctgcgtggccgctgcgcagtacattgggtgactcccgacggcttccctgtgtggcaggaatacaagaagcctattcagacgcgcttgaacctgatgttcctcggtcagttccgcttacagcctaccattaacaccaacaaagatagcgagattgatgcacacaaacaggagtctggtatcgctcctaactttgtacacagccaagacggtaaccaccttcgtatgactgtagtgtgggcacacgagaagtacggaatcgaatcttttgcactgattcacgactccttcggtaccattccggctgacgctgcgaacctgttcaaagcagtgcgcgaaactatggtttcgacatatgagtcttgtgatgtactggctgatttctacgaccagttcgctgaccagttgcacgagtctcaattggacaaaatgccagcacttccggctaaaggtaacttgaacctccgtgacatcttaaaatcggacttcgcgttcgcg

SEQ ID NO: 424 - protein, 890 aa, synthetic construct
  REGION 1..890: note = Variant of RNA polymerase
MHHHHHHMNTINIAKNDFSDIELAAIPFNTLADHYGERLAREQLALEHESYEMGEARFRKMFERQLKAGEVADNAAAKPLITTLLPKMIARINDWFEEVKAKRGKRPTAFQFLQEIKPEAVAYITIKTTLACLTSADNTTVQAVASAIGRAIEDEARFGRIRDLEAKHFKKNVEEQLNKRVGHVYKKAFMQVVEADMLSKGLLGGEAWSSWHKEDSIHVGVRCIEMLIESTGMVSLHRQNAGVVGQDSETIELAPEYAEAIATRAGALAGISPMFQPCVVPPKPWTGITGGGYWAAGRKPLQLVRTRSLAALRRYEEVSMPEVIKAVNIAQNTAWRINKKVLDVANAITQWQHCPVADVPAMDRGEMPARPLDIDTNEIALKAWKKEASAFYRKDKARVSRRLSMEFMLSQANKFANYKAIWFPQNMDWRGRVYAVPMFNPQGNDMTKGLLTFAQEKPIGEDGFYWLKIHGANTAGVDKVPFPQRIKFVEDNHTNIMECAKAPLENTWWAEQDSPFCFLAFCFEYAGVINHGLSYNCSLPLAFDGSCSGIQHFSAMLRDEIGGKAVNLLPSAEYQDIYRIVSDKVNEVLKQDLINGTSTTVETVTDKKTGEITQRTKYGTKVMAQWWLEHGVNRGVTKRSVMTLVYGSKEFGFRDQVLSDTIQPAIDNGKGDMFLNPNQAAGYMAKLIWNAVSGTVVAAVEAMNWLKSAAKLLAAEVKDPKTDTVLRGRCAVHWVTPDGFPVWQEYKKPIQTRLNLMFLGQFRLQPTINTNKDSEIDAHKQESGIAPNFVHSQDGNHLRMTVVWAHEKYGIESFALIHDSFGTIPADAANLFKAVRETMVSTYESCDVLADFYDQFADQLHESQLDKMPALPAKGNLNLRDILKSDFAFA

SEQ ID NO: 425 - DNA, 2670 bp, synthetic construct
  misc_feature 1..2670: note = Variant of RNA polymerase
  source 1..2670: mol_type = other DNA
atgcaccatcaccatcaccatatgaacacgattaacatcgctaagaacgacttctctgacatcgaactggctgctatcccgttcaacactctggctgaccattacggtgagcgtttagctcgcgaacagttggcccttgagcatgagtcttacgagatgggtgaagcacgcttccgcaagatgtttgagcgtcaacttaaagctggtgaggttgcggataacgctgccgccaagcctctcatcactaccctactccctaagatgattgcacgcatcaacgactggtttgaggaagtgaaagctaagcgcggcaagcgcccgacagccttccagttcctgcaagaaatcaagccggaagccgtagcgtacatcaccattaagaccactctggcttgcctaaccagtgcggacaatacaaccgttcaggctgtagcaagcgcaatcggtcgggccattgaggacgaggctcgcttcggtcgtatccgtgaccttgaagctaagcacttcaagaaaaacgttgaggaacaactcaacaagcgcgtagggcacgtctacaagaaagcatttatgcaagttgtcgaggctgacgtgctctctacgggtctactcggtggcgaggcgtggtcttcgtggcataaggaagactctattcatgtaggagtacgctgcatcgagatgctcattgagtcaaccggaatggttagcttacaccgccaaaatgctggcgtagtaggtcaagactctgagactatcgaactcgcacctgaatacgctgaggctatcgcaacccgtgcaggtgcgctggctggcatctctccgatgttccaaccttgcgtagttcctcctaagccgtggactggcattactggtggtggctattgggctgcggggcgcaaacccctgcagttagtacgtactcgcagtctggcggcgcttcgccgctatgaagaagtgtcgatgccggaggtcatcaaagcagtcaacattgcgcagaatacagcatggcgtgtgaacaagaaagttctcgacgtagcgaatgcaatcacccaatggcagcactgtccagtcgcggatgtgcctgcgatggatcgtggcgaaatgccagctcgtccgttggacatcgataccaacgagattgcacttaaagcgtggaagaaagaagcttccgcgttctaccgcaaagacaaagcacgcgttagccgtcgtctgtcaatggagtttatgttatctcaggcgaacaagtttgcgaatgaaaaagcaatctggtttccgcaaaacatggattggcgtgggcgcgtgtacgctgtcccgatgttcaatcctcagggcaacgatatgacgaaaggcctgctgacctttgcgcagggtaaacccattggtgaagacggcttctattggctcaagattcatggcgcaaatacagctggagtggataaagtaccgtttccacaacgcatcaaatttgttgaggataaccatacgaatattatggaatgcgcgaaagcaccgctggaaaacacttggtgggcggaacaggactcgccgttctgttttctggcgttctgctttgagtatgctggcgtcatcaatcacggtctgtcgtacaactgtagcttgcctctggcatttgatggtagttgctccggcctgcaacatttctcagcgatgttacgcgacgaaattggcggcaaagctgtgaatctcctcccatctgcggaacctcaggatatttatcgtatcgtcagcgacaaagttaacgaggtactgaaacaagatctgattaacggtacctctaccaccttggaaacggtgactgataagaagacaggcgaaattacccaacgcacgaaatacgggaccaaagttatggcacagtggtggttagaacacggtgtgaatcgtggcgtcacgaaacgctcggttatgactttggtgtatgggagcaaagagtttggattccgcgatcaagtgctgagtgacaccattcaaccggcgatcgataacggcaaaggtgacatgtttctgaatccgaatcaggctgctggttacatggcgaaactgatctgggatgcagtgtccgggaccgtagtcgcagcagttgaggcgatgaactggctgaaaagtgcggcgaaattacttgctgctgaagtgaaggataaaaagacggatacagttctgcgtggccgctgcgcagtacattgggtgactcccgacggcttccctgtgtggcaggaatacaagaagcctattcagacgcgcttgaacctgatgttcctcggtcagttccgcttacagcctaccattaacaccaacaaagatagcgagattgatgcacacaaacaggagtctggtatcgctcctaactttgtacacagccaagacggtaaccaccttcgtatgactgtagtgtgggcacacgagaagtacggaatcgaatcttttgcactgattcacgactccttcggtaccattccggctgacgctgcgaacctgttcaaagcagtgcgcgaaactatggtttcgacatatgagtcttgtgatgtactggctgatttctacgaccagttcgctgaccagttgcacgagtctcaattggacaaaatgccagcacttccggctaaaggtaacttgaacctccgtgacatcttaaaatcggacttcgcgttcgcg

SEQ ID NO: 426 - protein, 890 aa, synthetic construct
  REGION 1..890: note = Variant of RNA polymerase
MHHHHHHMNTINIAKNDFSDIELAAIPFNTLADHYGERLAREQLALEHESYEMGEARFRKMFERQLKAGEVADNAAAKPLITTLLPKMIARINDWFEEVKAKRGKRPTAFQFLQEIKPEAVAYITIKTTLACLTSADNTTVQAVASAIGRAIEDEARFGRIRDLEAKHFKKNVEEQLNKRVGHVYKKAFMQVVEADVLSTGLLGGEAWSSWHKEDSIHVGVRCIEMLIESTGMVSLHRQNAGVVGQDSETIELAPEYAEAIATRAGALAGISPMFQPCVVPPKPWTGITGGGYWAAGRKPLQLVRTRSLAALRRYEEVSMPEVIKAVNIAQNTAWRVNKKVLDVANAITQWQHCPVADVPAMDRGEMPARPLDIDTNEIALKAWKKEASAFYRKDKARVSRRLSMEFMLSQANKFANEKAIWFPQNMDWRGRVYAVPMFNPQGNDMTKGLLTFAQGKPIGEDGFYWLKIHGANTAGVDKVPFPQRIKFVEDNHTNIMECAKAPLENTWWAEQDSPFCFLAFCFEYAGVINHGLSYNCSLPLAFDGSCSGLQHFSAMLRDEIGGKAVNLLPSAEPQDIYRIVSDKVNEVLKQDLINGTSTTLETVTDKKTGEITQRTKYGTKVMAQWWLEHGVNRGVTKRSVMTLVYGSKEFGFRDQVLSDTIQPAIDNGKGDMFLNPNQAAGYMAKLIWDAVSGTVVAAVEAMNWLKSAAKLLAAEVKDKKTDTVLRGRCAVHWVTPDGFPVWQEYKKPIQTRLNLMFLGQFRLQPTINTNKDSEIDAHKQESGIAPNFVHSQDGNHLRMTVVWAHEKYGIESFALIHDSFGTIPADAANLFKAVRETMVSTYESCDVLADFYDQFADQLHESQLDKMPALPAKGNLNLRDILKSDFAFA

SEQ ID NO: 427 - DNA, 2670 bp, synthetic construct
  misc_feature 1..2670: note = Variant of RNA polymerase
  source 1..2670: mol_type = other DNA
atgcaccatcaccatcaccatatgaacacgattaacatcgctaagaacgacttctctgacatcgaactggctgctatcccgttcaacactctggctgaccattacggtgagcgtttagctcgcgaacagttggcccttgagcatgagtcttacgagatgggtgaagcacgcttccgcaagatgtttgagcgtcaacttaaagctggtgaggttgcggataacgctgccgccaagcctctcatcactaccctactccctaagatgattgcacgcatcaacgactggtttgaggaagtgaaagctaagcgcggcaagcgcccgacagccttccagttcctgcaagaaatcaagccggaagccgtagcgtacatcaccattaagaccactctggcttgcctaaccagtgcggacaatacaaccgttcaggctgtagcaagcgcaatcggtcgggccattgaggacgaggctcgcttcggtcgtatccgtgaccttgaagctaagcacttcaagaagaacgttgaggaacaactcaacaagcgcgtagggcacgtctacaagaaagcatttatgcaagttgtcgaggctgacgtgctctctacgggtctactcggtggcgaggcgtggtcttcgtggcataaggaagactctattcatgtaggagtacgctgcatcgagatgctcattgagtcaaccggaatggttagcttacaccgccaaaatgctggcgtagtaggtcaagactctgagactatcgaactcgcacctgaatacgctgaggctatcgcaacccgtgcaggtgcgctggctggcatctctccgatgttccaaccttgcgtagttcctcctaagccgtggactggcattactggtggtggctattgggctgcggggcgcaaacccctgcagttagtacgtactcgcagtctggcggcgcttcgccgctatgaagaagtgtcgatgccggaggtcatcaaagcagtcaacattgcgcagaatacagcatggcgtattaacaagaaagttctcgacgtagcgaatacgatcacccaatggcagcactgtccagtcgcggatgtgcctgcgatggatcgtggcgaaatgccagctcgtccgttggacatcgataccaacgagattgcacttaaagcgtggaagaaagaagcttccgcgttctaccgcaaagacaaagcacgcgttagccgtcgtctgtcaatggagtttatgttatctcaggcgaacaagtttgcgaattacaaagcaatctggtttccgcaaaacatggattggcgtgggcgcgtgtacgctgtcccgatgttcaatcctcagggcaacgatatgacgaaaggcctgctgacctttgcgcaggagaaacccattggtgaagacggcttctattggctcaagattcatggcgcaaatacagctggagtggataaagtaccgtttccacaacgcatcaaatttgttgaggataaccatacgaatattatggaatgcgcgaaagcaccgctggaaaacacttggtgggcggaacaggactcgccgttctgttttctggcgttctgctttgagtatgctggcgtcatcaatcacggtctgtcgtacaactgtagcttgcctctggcatttgatggtagttgctccggcctgcaacatttctcagcgatgttacgcgacgaaattggcgccaaagctgtgaatctcctcccatctgcggaagtgcaggatatttatcgtatcgtcagcgacaaagttaacgaggtactgaaacaagatctgattaacggtacctctaccaccttggaaacggtgactgataagaagacaggcgaaattaccgaacgcacgaaatacgggaccaaagttatggcacagtggtggttagaacacggtgtgaatcgtggcgtcacgaaacgctcggttatgactttggtgtatgggagcaaagagtttggattccgcgatcaagtgctgagtgacaccattcaaccggcgatcgataacggcaaaggtgacatgtttctgaatccgaatcaggctgctggttacatggcgaaactgatctggaacgcagtgtccgtcaccgtagtcgcagcagttgaggcgatgaactggctgaaaagtgcggcgaaattacttgctgctgaagtgaaggatcctaagacggatacagttctgcgtggccgctgcgcagtacattgggtgactcccgacggcttccctgtgtggcaggaatacaagaagcctattcagacgcgcttgaacctgatgttcctcggtcagttccgcttacagcctaccattaacaccaacaaagatagcgagattgatgcacacaaacaggagtctggtatcgctcctaactttgtacacagccaagacggtaaccaccttcgtatgactgtagtgtgggcacacgagaagtacggaatcgaatcttttgcactgattcacgactccttcggtaccattccggctgacgctgcgaacctgttcaaagcagtgcgcgaaactatggtttcgacatatgagtcttgtgatgtactggctgatttctacgaccagttcgctgaccagttgcacgagtctcaattggacaaaatgccagcacttccggctaaaggtaacttgaacctccgtgacatcttaaaatcggacttcgcgttcgcg

SEQ ID NO: 428 - protein, 890 aa, synthetic construct
  REGION 1..890: note = Variant of RNA polymerase
MHHHHHHMNTINIAKNDFSDIELAAIPFNTLADHYGERLAREQLALEHESYEMGEARFRKMFERQLKAGEVADNAAAKPLITTLLPKMIARINDWFEEVKAKRGKRPTAFQFLQEIKPEAVAYITIKTTLACLTSADNTTVQAVASAIGRAIEDEARFGRIRDLEAKHFKKNVEEQLNKRVGHVYKKAFMQVVEADVLSTGLLGGEAWSSWHKEDSIHVGVRCIEMLIESTGMVSLHRQNAGVVGQDSETIELAPEYAEAIATRAGALAGISPMFQPCVVPPKPWTGITGGGYWAAGRKPLQLVRTRSLAALRRYEEVSMPEVIKAVNIAQNTAWRINKKVLDVANTITQWQHCPVADVPAMDRGEMPARPLDIDTNEIALKAWKKEASAFYRKDKARVSRRLSMEFMLSQANKFANYKAIWFPQNMDWRGRVYAVPMFNPQGNDMTKGLLTFAQEKPIGEDGFYWLKIHGANTAGVDKVPFPQRIKFVEDNHTNIMECAKAPLENTWWAEQDSPFCFLAFCFEYAGVINHGLSYNCSLPLAFDGSCSGLQHFSAMLRDEIGAKAVNLLPSAEVQDIYRIVSDKVNEVLKQDLINGTSTTLETVTDKKTGEITERTKYGTKVMAQWWLEHGVNRGVTKRSVMTLVYGSKEFGFRDQVLSDTIQPAIDNGKGDMFLNPNQAAGYMAKLIWNAVSVTVVAAVEAMNWLKSAAKLLAAEVKDPKTDTVLRGRCAVHWVTPDGFPVWQEYKKPIQTRLNLMFLGQFRLQPTINTNKDSEIDAHKQESGIAPNFVHSQDGNHLRMTVVWAHEKYGIESFALIHDSFGTIPADAANLFKAVRETMVSTYESCDVLADFYDQFADQLHESQLDKMPALPAKGNLNLRDILKSDFAFA

SEQ ID NO: 429 - DNA, 2670 bp, synthetic construct
  misc_feature 1..2670: note = Variant of RNA polymerase
  source 1..2670: mol_type = other DNA
atgcaccatcaccatcaccatatgaacacgattaacattgctaagaacgacttctctgacatcgaactggctgctatcccgttcaacactctggctgaccattacggtgagcgtttagctcgcgaacagttggcccttgagcatgagtcttacgagatgggtgaagcacgcttccgcaagatgtttgagcgtcaacttaaagctggtgaggttgcggataacgctgccgccaagcctctcatcactaccctactccctaagatgattgcacgcatcaacgactggtttgaggaagtgaaagctaagcgcggcaagcgcccgacagccttccagttcctgcaagaaatcaagccggaagccgtagcgtacatcaccattaagaccactctggcttgcctaaccagtgcggacaatacaaccgttcaggctgtagcaagcgcaatcggtcgggccattgaggacgaggctcgcttcggtcgtatccgtgaccttgaagctaagcacttcaagaaaaacgttgaggaacaactcaacaagcgcgtagggcacgtctacaagaaagcatttatgcaagttgtcgaggctgacatgctctctaagggtctactcggtggcgaggcgtggtcttcgtggcataaggaagactctattcatgtaggagtacgctgcatcgagatgctcattgagtcaaccggaatggttagcttacaccgccaaaatgctggcgtagtaggtcaagactctgagactatcgaactcgcacctgaatacgctgaggctatcgcaacccgtgcaggtgcgctggctggcatctctccgatgttccaaccttgcgtagttcctcctaagccgtggactggcattactggtggtggctattgggctgcggggcgcaaacccctgcagttagtacgtactcgcagtctggcggcgcttcgccgctatgaagaagtgtcgatgccggaggtcatcaaagcagtcaacattgcgcagaatacagcatggcgtgtgaacaagaaagttctcgacgtagcgaatgcgatcacccaatggcagcactgtccagtcgcggatgtgcctgcgatggatcgtggcgaaatgccagctcgtccgttggacatcgataccaacgagattgcacttaaagcgtggaagaaagaagcttccgcgttctaccgcaaagacaaagcacgcgttagccgtcgtctgtcaatggagtttatgttatctcaggcgaacaagtttgcgaattacaaagcaatctggtttccgcaaaacatggattggcgtgggcgcgtgtacgctgtcccgatgttcaatcctcagggcaacgatatgacgaaaggcctgctgacctttgcgcaggagaaacccattggtgaagacggcttctattggctcaagattcatggcgcaaatacagctggagtggataaagtaccgtttccacaacgcatcaaatttgttgaggataaccatacgaatattatggaatgcgcgaaagcaccgctggaaaacacttggtgggcggaacaggactcgccgttctgttttctggcgttctgctttgagtatgctggcgtcatcaatcacggtctgtcgtacaactgtagcttgcctctggcatttgatggtagttgctccggcatccaacatttctcagcgatgttacgcgacgaaattggcgccaaagctgtgaatctcctcccatctgcggaacctcaggatatttatcgtatcgtcagcgacaaagttaacgaggtactgaaacaagatctgattaacggtacctctaccaccttggaaacggtgactgataagaagacaggcgaaattaccgaacgcacgaaatacgggaccaaagttatggcacagtggtggttagaacacggtgtgaatcgtggcgtcacgaaacgctcggttatgactttggtgtatgggagcaaagagtttggattccgcgatcaagtgctgagtgacaccattcaaccggcgatcgataacggcaaaggtgacatgtttctgaatccgaatcaggctgctggttacatggcgaaactgatctggaacgcagtgtccgggaccgtagtcgcagcagttgaggcgatgaactggctgaaaagtgcggcgaaattacttgctgctgaagtgaaggatcctaagacggatacagttctgcgtggccgctgcgcagtacattgggtgactcccgacggcttccctgtgtggcaggaatacaagaagcctattcagacgcgcttgaacctgatgttcctcggtcagttccgcttacagcctaccattaacaccaacaaagatagcgagattgatgcacacaaacaggagtctggtatcgctcctaactttgtacacagccaagacggtaaccaccttcgtatgactgtagtgtgggcacacgagaagtacggaatcgaatcttttgcactgattcacgactccttcggtaccattccggctgacgctgcgaacctgttcaaagcagtgcgcgaaactatggtttcgacatatgagtcttgtgatgtactggctgatttctacgaccagttcgctgaccagttgcacgagtctcaattggacaaaatgccagcacttccggctaaaggtaacttgaacctccgtgacatcttaaaatcggacttcgcgttcgcg

SEQ ID NO: 430 - protein, 890 aa, synthetic construct
  REGION 1..890: note = Variant of RNA polymerase
MHHHHHHMNTINIAKNDFSDIELAAIPFNTLADHYGERLAREQLALEHESYEMGEARFRKMFERQLKAGEVADNAAAKPLITTLLPKMIARINDWFEEVKAKRGKRPTAFQFLQEIKPEAVAYITIKTTLACLTSADNTTVQAVASAIGRAIEDEARFGRIRDLEAKHFKKNVEEQLNKRVGHVYKKAFMQVVEADMLSKGLLGGEAWSSWHKEDSIHVGVRCIEMLIESTGMVSLHRQNAGVVGQDSETIELAPEYAEAIATRAGALAGISPMFQPCVVPPKPWTGITGGGYWAAGRKPLQLVRTRSLAALRRYEEVSMPEVIKAVNIAQNTAWRVNKKVLDVANAITQWQHCPVADVPAMDRGEMPARPLDIDTNEIALKAWKKEASAFYRKDKARVSRRLSMEFMLSQANKFANYKAIWFPQNMDWRGRVYAVPMFNPQGNDMTKGLLTFAQEKPIGEDGFYWLKIHGANTAGVDKVPFPQRIKFVEDNHTNIMECAKAPLENTWWAEQDSPFCFLAFCFEYAGVINHGLSYNCSLPLAFDGSCSGIQHFSAMLRDEIGAKAVNLLPSAEPQDIYRIVSDKVNEVLKQDLINGTSTTLETVTDKKTGEITERTKYGTKVMAQWWLEHGVNRGVTKRSVMTLVYGSKEFGFRDQVLSDTIQPAIDNGKGDMFLNPNQAAGYMAKLIWNAVSGTVVAAVEAMNWLKSAAKLLAAEVKDPKTDTVLRGRCAVHWVTPDGFPVWQEYKKPIQTRLNLMFLGQFRLQPTINTNKDSEIDAHKQESGIAPNFVHSQDGNHLRMTVVWAHEKYGIESFALIHDSFGTIPADAANLFKAVRETMVSTYESCDVLADFYDQFADQLHESQLDKMPALPAKGNLNLRDILKSDFAFA

SEQ ID NO: 431 - DNA, 2670 bp, synthetic construct
  misc_feature 1..2670: note = Variant of RNA polymerase
  source 1..2670: mol_type = other DNA
atgcaccatcaccatcaccatatgaacacgattaacatcgctaagaacgacttctctgacatcgaactggctgctatcccgttcaacactctggctgaccattacggtgagcgtttagctcgcgaacagttggcccttgagcatgagtcttacgagatgggtgaagcacgcttccgcaagatgtttgagcgtcaacttaaagctggtgaggttgcggataacgctgccgctaagcctctcatcactaccctactccctaagatgattgcacgcatcaacgactggtttgaggaagtgaaagctaagcgcggcaagcgcccgacagccttccagttcctgcaagaaatcaagccggaagccgtagcgtacatcaccattaagaccactctggcttgcctaaccagtgcggacaatacaaccgttcaggctgtagcaagcgcaatcggtcgggccattgaggacgaggctcgcttcggtcgtatccgtgaccttgaagctaagcacttcaaggagaacgttgaggaacaactcaacaagcgcgtagggcacgtctacaagaaagcatttatgcaagttgtcgaggctgacgtgctctctacgggtctactcggtggcgaggcgtggtcttcgtggcataaggaagactctattcatgtaggagtacgctgcatcgagatgctcattgagtcaaccggaatggttagcttacaccgccaaaatgctggcgtagtaggtcaagactctgagactatcgaactcgcacctgaatacgctgaggctatcgcaacccgtgcaggtgcgctggctggcatctctccgatgttccaaccttgcgtagttcctcctaagccgtggactggcattactggtggtggctattgggctgcggggcgcaaacccctgcagttagtacgtactcgcagtctggcggcgcttcgccgctatgaagaagtgtcgatgccggaggtcatcaaagcagtcaacattgcgcagaatacagcatggcgtgttaacaagaaagttctcgacgtagcgaatgcgatcacccaatggcagcactgtccagtcgcggatgtgcctgcgatggatcgtggcgaaatgccagctcgtccgttggacatcgataccaacgagattgcacttaaagcgtggaagaaagaagcttccgcgttctaccgcaaagacaaagcacgcgttagccgtcgtctgtcaatggagtttatgttatctcaggcgaacaagtttgcgaattataaagcaatctggtttccgcaaaacatggattggcgtgggcgcgtgtacgctgtcccgatgttcaatcctcagggcaacgatatgacgaaaggcctgctgacctttgcgcagaccaaacccattggtgaagacggcttctattggctcaagattcatggcgcaaatacagctggagtggataaagtaccgtttccacaacgcatcaaatttgttgaggataaccatacgaatattatggaatgcgcgaaagcaccgctggaaaacacttggtgggcggaacaggactcgccgttctgttttctggcgttctgctttgagtatgctggcgttatcaatcacggtctgtcgtacaactgtagcttgcctctggcatttgatggtagttgctccggcatccaacatttctcagcgatgttacgcgacgaaattggcggcaaagctgtgaatctcctcccatctgcggaataccaggatatttatcgtatcgtcagcgacaaagttaacgaggtactgaaacaagatctgattaacggtacctctaccaccctggaaacggtgactgataagaagacaggcgaaattaccgaacgcacgaaatacgggaccaaagttatggcacagtggtggttagaacacggtgtgaatcgtggcgtcacgaaacgctcggttatgactttggtgtatgggagcaaagagtttggattccgcgatcaagtgctgagtgacaccattcaaccggcgatcgataacggcaaaggtgacatgtttctgaatccgaatcaggctgctggttacatggcgaaactgatctggaacgcagtgtccgggaccgtagtcgcagcagttgaggcgatgaactggctgaaaagtgcggcgaaattacttgctgctgaagtgaaggataaaaagacggatacagttctgcgtggccgctgcgcagtacattgggtgactcccgacggcttccctgtgtggcaggaatacaagaagcctattcagacgcgcttgaacctgatgttcctcggtcagttccgcttacagcctaccattaacaccaacaaagatagcgagattgatgcacacaaacaggagtctggtatcgctcctaactttgtacacagccaagacggtaaccaccttcgtatgactgtagtgtgggcacacgagaagtacggaatcgaatcttttgcactgattcacgactccttcggtaccattccggctgacgctgcgaacctgttcaaagcagtgcgcgaaactatggtttcgacatatgagtcttgtgatgtactggctgatttctacgaccagttcgctgaccagttgcacgagtctcaattggacaaaatgccagcacttccggctaaaggtaacttgaacctccgtgacatcttaaaatcggacttcgcgttcgcg

SEQ ID NO: 432 - protein, 890 aa, synthetic construct
  REGION 1..890: note = Variant of RNA polymerase
MHHHHHHMNTINIAKNDFSDIELAAIPFNTLADHYGERLAREQLALEHESYEMGEARFRKMFERQLKAGEVADNAAAKPLITTLLPKMIARINDWFEEVKAKRGKRPTAFQFLQEIKPEAVAYITIKTTLACLTSADNTTVQAVASAIGRAIEDEARFGRIRDLEAKHFKENVEEQLNKRVGHVYKKAFMQVVEADVLSTGLLGGEAWSSWHKEDSIHVGVRCIEMLIESTGMVSLHRQNAGVVGQDSETIELAPEYAEAIATRAGALAGISPMFQPCVVPPKPWTGITGGGYWAAGRKPLQLVRTRSLAALRRYEEVSMPEVIKAVNIAQNTAWRVNKKVLDVANAITQWQHCPVADVPAMDRGEMPARPLDIDTNEIALKAWKKEASAFYRKDKARVSRRLSMEFMLSQANKFANYKAIWFPQNMDWRGRVYAVPMFNPQGNDMTKGLLTFAQTKPIGEDGFYWLKIHGANTAGVDKVPFPQRIKFVEDNHTNIMECAKAPLENTWWAEQDSPFCFLAFCFEYAGVINHGLSYNCSLPLAFDGSCSGIQHFSAMLRDEIGGKAVNLLPSAEYQDIYRIVSDKVNEVLKQDLINGTSTTLETVTDKKTGEITERTKYGTKVMAQWWLEHGVNRGVTKRSVMTLVYGSKEFGFRDQVLSDTIQPAIDNGKGDMFLNPNQAAGYMAKLIWNAVSGTVVAAVEAMNWLKSAAKLLAAEVKDKKTDTVLRGRCAVHWVTPDGFPVWQEYKKPIQTRLNLMFLGQFRLQPTINTNKDSEIDAHKQESGIAPNFVHSQDGNHLRMTVVWAHEKYGIESFALIHDSFGTIPADAANLFKAVRETMVSTYESCDVLADFYDQFADQLHESQLDKMPALPAKGNLNLRDILKSDFAFA

SEQ ID NO: 433 - DNA, 2670 bp, synthetic construct
  misc_feature 1..2670: note = Variant of RNA polymerase
  source 1..2670: mol_type = other DNA
atgcaccatcaccatcaccatatgaacacgattaacatcgctaagaacgacttctctgacatcgaactggctgctatcccgttcaacactctggctgaccattacggtgagcgtttagctcgcgaacagttggcccttgagcatgagtcttacgagatgggtgaagcacgcttccgcaagatgtttgagcgtcaacttaaagctggtgaggttgcggataacgctgccgctaagcctctcatcactaccctactccctaagatgattgcacgcatcaacgactggtttgaggaagtgaaagctaagcgcggcaagcgcccgacagccttccagttcctgcaagaaatcaagccggaagccgtagcgtacatcaccattaagaccactctggcttgcctaaccagtgcggacaatacaaccgttcaggctgtagcaagcgcaatcggtcgggccattgaggacgaggctcgcttcggtcgtatccgtgaccttgaagctaagcacttcaagaaaaacgttgaggaacaactcaacaagcgcgtagggcacgtctacaagaaagcatttatgcaagttgtcgaggctgacgtgctctctaagggtctactcggtggcgaggcgtggtcttcgtggcataaggaagactctattcatgtaggagtacgctgcatcgagatgctcattgagtcaaccggaatggttagcttacaccgccaaaatgctggcgtagtaggtcaagactctgagactatcgaactcgcacctgaatacgctgaggctatcgcaacccgtgcaggtgcgctggctggcatctctccgatgttccaaccttgcgtagttcctcctaagccgtggactggcattactggtggtggctattgggctgcggggcgcaaacccctgcagttagtacgtactcgcagtctggcggcgcttcgccgctatgaagaagtgtcgatgccggaggtcatcaaagcagtcaacattgcgcagaatacagcatggcgtgtgaacaagaaagttctcgacgtagcgaatacgatcacccaatggcagcactgtccagtcgcggatgtgcctgcgatggatcgtggcgaaatgccagctcgtccgttggacatcgataccaacgagattgcacttaaagcgtggaagaaagaagcttccgcgttctaccgcaaagacaaagcacgcgttagccgtcgtctgtcaatggagtttatgttatctcaggcgaacaagtttgcgaatgaaaaagcaatctggtttccgcaaaacatggattggcgtgggcgcgtgtacgctgtcccgatgttcaatcctcagggcaacgatatgacgaaaggcctgctgacctttgcgcaggagaaacccattggtgaagacggcttctattggctcaagattcatggcgcaaatacagctggagtggataaagtaccgtttccacaacgcatcaaatttgttgaggataaccatacgaatattatggaatgcgcgaaagcaccgctggaaaacacttggtgggcggaacaggactcgccgttctgttttctggcgttctgctttgagtatgctggcgtcatcaatcacggtctgtcgtacaactgtagcttgcctctggcatttgatggtagttgctccggcattcaacatttctcagcgatgttacgcgacgaaattggcggcaaagctgtgaatctcctcccatctgcggaataccaggatatttatcgtatcgtcagcgacaaagttaacgaggtactgaaacaagatctgattaacggtacctctaccaccttggaaacggtgactgataagaagacaggcgaaattaccgaacgcacgaaatacgggaccaaagttatggcacagtggtggttagaacacggtgtgaatcgtggcgtcacgaaacgctcggttatgactttggtgtatgggagcaaagagtttggattccgcgatcaagtgctgagtgacaccattcaaccggcgatcgataacggcaaaggtgacatgtttctgaatccgaatcaggctgctggttacatggcgaaactgatctgggatgcagtgtccgtcaccgtagtcgcagcagttgaggcgatgaactggctgaaaagtgcggcgaaattacttgctgctgaagtgaaggataagaagacggatacagttctgcgtggccgctgcgcagtacattgggtgactcccgacggcttccctgtgtggcaggaatacaagaagcctattcagacgcgcttgaacctgatgttcctcggtcagttccgcttacagcctaccattaacaccaacaaagatagcgagattgatgcacacaaacaggagtctggtatcgctcctaactttgtacacagccaagacggtaaccaccttcgtatgactgtagtgtgggcacacgagaagtacggaatcgaatcttttgcactgattcacgactccttcggtaccattccggctgacgctgcgaacctgttcaaagcagtgcgcgaaactatggtttcgacatatgagtcttgtgatgtactggctgatttctacgaccagttcgctgaccagttgcacgagtctcaattggacaaaatgccagcacttccggctaaaggtaacttgaacctccgtgacatcttaaaatcggacttcgcgttcgcg

SEQ ID NO: 434 - protein, 890 aa, synthetic construct
  REGION 1..890: note = Variant of RNA polymerase
MHHHHHHMNTINIAKNDFSDIELAAIPFNTLADHYGERLAREQLALEHESYEMGEARFRKMFERQLKAGEVADNAAAKPLITTLLPKMIARINDWFEEVKAKRGKRPTAFQFLQEIKPEAVAYITIKTTLACLTSADNTTVQAVASAIGRAIEDEARFGRIRDLEAKHFKKNVEEQLNKRVGHVYKKAFMQVVEADVLSKGLLGGEAWSSWHKEDSIHVGVRCIEMLIESTGMVSLHRQNAGVVGQDSETIELAPEYAEAIATRAGALAGISPMFQPCVVPPKPWTGITGGGYWAAGRKPLQLVRTRSLAALRRYEEVSMPEVIKAVNIAQNTAWRVNKKVLDVANTITQWQHCPVADVPAMDRGEMPARPLDIDTNEIALKAWKKEASAFYRKDKARVSRRLSMEFMLSQANKFANEKAIWFPQNMDWRGRVYAVPMFNPQGNDMTKGLLTFAQEKPIGEDGFYWLKIHGANTAGVDKVPFPQRIKFVEDNHTNIMECAKAPLENTWWAEQDSPFCFLAFCFEYAGVINHGLSYNCSLPLAFDGSCSGIQHFSAMLRDEIGGKAVNLLPSAEYQDIYRIVSDKVNEVLKQDLINGTSTTLETVTDKKTGEITERTKYGTKVMAQWWLEHGVNRGVTKRSVMTLVYGSKEFGFRDQVLSDTIQPAIDNGKGDMFLNPNQAAGYMAKLIWDAVSVTVVAAVEAMNWLKSAAKLLAAEVKDKKTDTVLRGRCAVHWVTPDGFPVWQEYKKPIQTRLNLMFLGQFRLQPTINTNKDSEIDAHKQESGIAPNFVHSQDGNHLRMTVVWAHEKYGIESFALIHDSFGTIPADAANLFKAVRETMVSTYESCDVLADFYDQFADQLHESQLDKMPALPAKGNLNLRDILKSDFAFA

SEQ ID NO: 435 - DNA, 2670 bp, synthetic construct
  misc_feature 1..2670: note = Variant of RNA polymerase
  source 1..2670: mol_type = other DNA
atgcaccatcaccatcaccatatgaacacgattaacattgctaagaacgacttctctgacatcgaactggctgctatcccgttcaacactctggctgaccattacggtgagcgtttagctcgcgaacagttggcccttgagcatgagtcttacgagatgggtgaagcacgcttccgcaagatgtttgagcgtcaacttaaagctggtgaggttgcggataacgctgccgccaagcctctcatcactaccctactccctaagatgattgcacgcatcaacgactggtttgaggaagtgaaagctaagcgcggcaagcgcccgacagccttccagttcctgcaagaaatcaagccggaagccgtagcgtacatcaccattaagaccactctggcttgcctaaccagtgcggacaatacaaccgttcaggctgtagcaagcgcaatcggtcgggccattgaggacgaggctcgcttcggtcgtatccgtgaccttgaagctaagcacttcaagaaaaacgttgaggaacaactcaacaagcgcgtagggcacgtctacaagaaagcatttatgcaagttgtcgaggctgacatgctctctacgggtctactcggtggcgaggcgtggtcttcgtggcataaggaagactctattcatgtaggagtacgctgcatcgagatgctcattgagtcaaccggaatggttagcttacaccgccaaaatgctggcgtagtaggtcaagactctgagactatcgaactcgcacctgaatacgctgaggctatcgcaacccgtgcaggtgcgctggctggcatctctccgatgttccaaccttgcgtagttcctcctaagccgtggactggcattactggtggtggctattgggctgcggggcgcaaacccctgcagttagtacgtactcgcagtctggcggcgcttcgccgctatgaagaagtgtcgatgccggaggtcatcaaagcagtcaacattgcgcagaatacagcatggcgtgttaacaagaaagttctcgacgtagcgaatgcgatcacccaatggcagcactgtccagtcgcggatgtgcctgcgatggatcgtggcgaaatgccagctcgtccgttggacatcgataccaacgagattgcacttaaagcgtggaagaaagaagcttccgcgttctaccgcaaagacaaagcacgcgttagccgtcgtctgtcaatggagtttatgttatctcaggcgaacaagtttgcgaatgaaaaagcaatctggtttccgcaaaacatggattggcgtgggcgcgtgtacgctgtcccgatgttcaatcctcagggcaacgatatgacgaaaggcctgctgacctttgcgcaggagaaacccattggtgaagacggcttctattggctcaagattcatggcgcaaatacagctggagtggataaagtaccgtttccacaacgcatcaaatttgttgaggataaccatacgaatattatggaatgcgcgaaagcaccgctggaaaacacttggtgggcggaacaggactcgccgttctgttttctggcgttctgctttgagtatgctggcgtcatcaatagtggtctgtcgtacaactgtagcttgcctctggcatttgatggtagttgctccggcattcaacatttctcagcgatgttacgcgacgaaattggcggcaaagctgtgaatctcctcccatctgcggaataccaggatatttatcgtatcgtcagcgacaaagttaacgaggtactgaaacaagatctgattaacggtacctctaccaccttggaaacggtgactgataagaagacaggcgaaattacccaacgcacgaaatacgggaccaaagttatggcacagtggtggttagaacacggtgtgaatcgtggcgtcacgaaacgctcggttatgactttggtgtatgggagcaaagagtttggattccgcgatcaagtgctgagtgacaccattcaaccggcgatcgataacggcaaaggtgacatgtttctgaatccgaatcaggctgctggttacatggcgaaactgatctggaatgcagtgtccgtcaccgtagtcgcagcagttgaggcgatgaactggctgaaaagtgcggcgaaattacttgctgctgaagtgaaggataaaaagacggatacagttctgcgtggccgctgcgcagtacattgggtgactcccgacggcttccctgtgtggcaggaatacaagaagcctattcagacgcgcttgaacctgatgttcctcggtcagttccgcttacagcctaccattaacaccaacaaagatagcgagattgatgcacacaaacaggagtctggtatcgctcctaactttgtacacagccaagacggtaaccaccttcgtatgactgtagtgtgggcacacgagaagtacggaatcgaatcttttgcactgattcacgactccttcggtaccattccggctgacgctgcgaacctgttcaaagcagtgcgcgaaactatggtttcgacatatgagtcttgtgatgtactggctgatttctacgaccagttcgctgaccagttgcacgagtctcaattggacaaaatgccagcacttccggctaaaggtaacttgaacctccgtgacatcttaaaatcggacttcgcgttcgcg

SEQ ID NO: 436 - protein, 890 aa, synthetic construct
  REGION 1..890: note = Variant of RNA polymerase
MHHHHHHMNTINIAKNDFSDIELAAIPFNTLADHYGERLAREQLALEHESYEMGEARFRKMFERQLKAGEVADNAAAKPLITTLLPKMIARINDWFEEVKAKRGKRPTAFQFLQEIKPEAVAYITIKTTLACLTSADNTTVQAVASAIGRAIEDEARFGRIRDLEAKHFKKNVEEQLNKRVGHVYKKAFMQVVEADMLSTGLLGGEAWSSWHKEDSIHVGVRCIEMLIESTGMVSLHRQNAGVVGQDSETIELAPEYAEAIATRAGALAGISPMFQPCVVPPKPWTGITGGGYWAAGRKPLQLVRTRSLAALRRYEEVSMPEVIKAVNIAQNTAWRVNKKVLDVANAITQWQHCPVADVPAMDRGEMPARPLDIDTNEIALKAWKKEASAFYRKDKARVSRRLSMEFMLSQANKFANEKAIWFPQNMDWRGRVYAVPMFNPQGNDMTKGLLTFAQEKPIGEDGFYWLKIHGANTAGVDKVPFPQRIKFVEDNHTNIMECAKAPLENTWWAEQDSPFCFLAFCFEYAGVINSGLSYNCSLPLAFDGSCSGIQHFSAMLRDEIGGKAVNLLPSAEYQDIYRIVSDKVNEVLKQDLINGTSTTLETVTDKKTGEITQRTKYGTKVMAQWWLEHGVNRGVTKRSVMTLVYGSKEFGFRDQVLSDTIQPAIDNGKGDMFLNPNQAAGYMAKLIWNAVSVTVVAAVEAMNWLKSAAKLLAAEVKDKKTDTVLRGRCAVHWVTPDGFPVWQEYKKPIQTRLNLMFLGQFRLQPTINTNKDSEIDAHKQESGIAPNFVHSQDGNHLRMTVVWAHEKYGIESFALIHDSFGTIPADAANLFKAVRETMVSTYESCDVLADFYDQFADQLHESQLDKMPALPAKGNLNLRDILKSDFAFA

SEQ ID NO: 437 - DNA, 2670 bp, synthetic construct
  misc_feature 1..2670: note = Variant of RNA polymerase
  source 1..2670: mol_type = other DNA
atgcaccatcaccatcaccatatgaacacgattaacatcgctaagaacgacttctctgacatcgaactggctgctatcccgttcaacactctggctgaccattacggtgagcgtttagctcgcgaacagttggcccttgagcatgagtcttacgagatgggtgaagcacgcttccgcaagatgtttgagcgtcaacttaaagctggtgaggttgcggataacgctgccgccaagcctctcatcactaccctactccctaagatgattgcacgcatcaacgactggtttgaggaagtgaaagctaagcgcggcaagcgcccgacagccttccagttcctgcaagaaatcaagccggaagccgtagcgtacatcaccattaagaccactctggcttgcctaaccagtgcggacaatacaaccgttcaggctgtagcaagcgcaatcggtcgggccattgaggacgaggctcgcttcggtcgtatccgtgaccttgaagctaagcacttcaagaaaaacgttgaggaacaactcaacaagcgcgtagggcacgtctacaagaaagcatttatgcaagttgtcgaggctgacatgctctctaagggtctactcggtggcgaggcgtggtcttcgtggcataaggaagactctattcatgtaggagtacgctgcatcgagatgctcattgagtcaaccggaatggttagcttacaccgccaaaatgctggcgtagtaggtcaagactctgagactatcgaactcgcacctgaatacgctgaggctatcgcaacccgtgcaggtgcgctggctggcatctctccgatgttccaaccttgcgtagttcctcctaagccgtggactggcattactggtggtggctattgggctgcggggcgcaaacccctgcagttagtacgtactcgcagtctggcggcgcttcgccgctatgaagaagtgtcgatgccggaggtcatcaaagcagtcaacattgcgcagaatacagcatggcgtgtgaacaagaaagttctcgacgtagcgaatgcaatcacccaatggcagcactgtccagtcgcggatgtgcctgcgatggatcgtggcgaaatgccagctcgtccgttggacatcgataccaacgagattgcacttaaagcgtggaagaaagaagcttccgcgttctaccgcaaagacaaagcacgcgttagccgtcgtctgtcaatggagtttatgttatctcaggcgaacaagtttgcgaatgaaaaagcaatctggtttccgcaaaacatggattggcgtgggcgcgtgtacgctgtcccgatgttcaatcctcagggcaacgatatgacgaaaggcctgctgacctttgcgcagggtaaacccattggtgaagacggcttctattggctcaagattcatggcgcaaatacagctggagtggataaagtaccgtttccacaacgcatcaaatttgttgaggataaccatacgaatattatggaatgcgcgaaagcaccgctggaaaacacttggtgggcggaacaggactcgccgttctgttttctggcgttctgctttgagtatgctggcgtcatcaatcacggtctgtcgtacaactgtagcttgcctctggcatttgatggtagttgctccggcattcaacatttctcagcgatgttacgcgacgaaattggcggcaaagctgtgaatctcctcccatctgcggaacctcaggatatttatcgtatcgtcagcgacaaagttaacgaggtactgaaacaagatctgattaacggtacctctaccaccttggaaacggtgactgataagaagacaggcgaaattaccgaacgcacgaaatacgggaccaaagttatggcacagtggtggttagaacacggtgtgaatcgtggcgtcacgaaacgctcggttatgactttggtgtatgggagcaaagagtttggattccgcgatcaagtgctgagtgacaccattcaaccggcgatcgataacggcaaaggtgacatgtttctgaatccgaatcaggctgctggttacatggcgaaactgatctggaacgcagtgtccgtcaccgtagtcgcagcagttgaggcgatgaactggctgaaaagtgcggcgaaattacttgctgctgaagtgaaggataagaagacggatacagttctgcgtggccgctgcgcagtacattgggtgactcccgacggcttccctgtgtggcaggaatacaagaagcctattcagacgcgcttgaacctgatgttcctcggtcagttccgcttacagcctaccattaacaccaacaaagatagcgagattgatgcacacaaacaggagtctggtatcgctcctaactttgtacacagccaagacggtaaccaccttcgtatgactgtagtgtgggcacacgagaagtacggaatcgaatcttttgcactgattcacgactccttcggtaccattccggctgacgctgcgaacctgttcaaagcagtgcgcgaaactatggtttcgacatatgagtcttgtgatgtactggctgatttctacgaccagttcgctgaccagttgcacgagtctcaattggacaaaatgccagcacttccggctaaaggtaacttgaacctccgtgacatcttaaaatcggacttcgcgttcgcg

SEQ ID NO: 438 - protein, 890 aa, synthetic construct
  REGION 1..890: note = Variant of RNA polymerase
MHHHHHHMNTINIAKNDFSDIELAAIPFNTLADHYGERLAREQLALEHESYEMGEARFRKMFERQLKAGEVADNAAAKPLITTLLPKMIARINDWFEEVKAKRGKRPTAFQFLQEIKPEAVAYITIKTTLACLTSADNTTVQAVASAIGRAIEDEARFGRIRDLEAKHFKKNVEEQLNKRVGHVYKKAFMQVVEADMLSKGLLGGEAWSSWHKEDSIHVGVRCIEMLIESTGMVSLHRQNAGVVGQDSETIELAPEYAEAIATRAGALAGISPMFQPCVVPPKPWTGITGGGYWAAGRKPLQLVRTRSLAALRRYEEVSMPEVIKAVNIAQNTAWRVNKKVLDVANAITQWQHCPVADVPAMDRGEMPARPLDIDTNEIALKAWKKEASAFYRKDKARVSRRLSMEFMLSQANKFANEKAIWFPQNMDWRGRVYAVPMFNPQGNDMTKGLLTFAQGKPIGEDGFYWLKIHGANTAGVDKVPFPQRIKFVEDNHTNIMECAKAPLENTWWAEQDSPFCFLAFCFEYAGVINHGLSYNCSLPLAFDGSCSGIQHFSAMLRDEIGGKAVNLLPSAEPQDIYRIVSDKVNEVLKQDLINGTSTTLETVTDKKTGEITERTKYGTKVMAQWWLEHGVNRGVTKRSVMTLVYGSKEFGFRDQVLSDTIQPAIDNGKGDMFLNPNQAAGYMAKLIWNAVSVTVVAAVEAMNWLKSAAKLLAAEVKDKKTDTVLRGRCAVHWVTPDGFPVWQEYKKPIQTRLNLMFLGQFRLQPTINTNKDSEIDAHKQESGIAPNFVHSQDGNHLRMTVVWAHEKYGIESFALIHDSFGTIPADAANLFKAVRETMVSTYESCDVLADFYDQFADQLHESQLDKMPALPAKGNLNLRDILKSDFAFA

SEQ ID NO: 439 - DNA, 2670 bp, synthetic construct
  misc_feature 1..2670: note = Variant of RNA polymerase
  source 1..2670: mol_type = other DNA
atgcaccatcaccatcaccatatgaacacggagaacatcgctaagaacgacttctctgacatcgaactggctgctatcccgttcaacactctggctgaccattacggtgagcgtttagctcgcgaacagttggcccttgagcatgagtcttacgagatgggtgaagcacgcttccgcaagatgtttgagcgtcaacttaaagctggtgaggttgcggataacgctgccactaagcctctcatcactaccctactccctaagatgattgcacgcatcaacgactggtttgaggaagtgaaagctaagcgcggcaagcgcccgacagccttccagttcctgcaagaaatcaagccggaagccgtagcgtacatcaccattaagaccactctggcttgcctaaccagtgcggacaatacaaccgttcaggctgtagcaagcgcaatcggtcgggccattgaggacgaggctcgcttcggtcgtatccgtgaccttgaagctaagcacttcaagaaaaacgttgaggaacaactcaacaagcgcgtagggcacgtctacaagaaagcatttatgcaagttgtcgaggctgacatgctctctacgggtctactcggtggcgaggcgtggtcttcgtggcataaggaagactctattcatgtaggagtacgctgcatcgagatgctcattgagtcaaccggaatggttagcttacaccgccaaaatgctggcgtagtaggtcaagactctgagactatcgaactcgcacctgaatacgctgaggctatcgcaacccgtgcaggtgcgctggctggcatctctccgatgttccaaccttgcgtagttcctcctaagccgtggactggcattactggtggtggctattgggctgcggggcgcaaacccctgcagttagtacgtactcgcagtctggcggcgcttcgccgctatgaagaagtgtcgatgccggaggtcatcaaagcagtcaacattgcgcagaatacagcatggcgtgtgaacaagaaagttctcgacgtagcgaatgcaatcacccaatggcagcactgtccagtcgcggatgtgcctgcgatggatcgtggcgaaatgccagctcgtccgttggacatcgataccaacgagattgcacttaaagcgtggaagaaagaagcttccgcgttctaccgcaaagacaaagcacgcgttagccgtcgtctgtcaatggagtttatgttatctcaggcgaacaagtttgcgaattacaaagcaatctggtttccgcaaaacatggattggcgtgggcgcgtgtacgctgtcccgatgttcaatcctcagggcaacgatatgacgaaaggcctgctgacctttgcgcagggtaaacccattggtgaagacggcttctattggctcaagattcatggcgcaaatacagctggagtggataaagtaccgtttccacaacgcatcaaatttgttgaggataaccatacgaatattatggaatgcgcgaaagcaccgctggaaaacacttggtgggcggaacaggactcgccgttctgttttctggcgttctgctttgagtatgctggcgttatcaatcacggtctgtcgtacaactgtagcttgcctctggcatttgatggtagttgctccggcattcaacatttctcagcgatgttacgcgacgaaattggcggcaaagctgtgaatctcctcccatctgcggaacctcaggatatttatcgtatcgtcagcgacaaagttaacgaggtactgaaacaagatctgattaacggtacctctaccaccttggaaacggtgactgataagaagacaggcgaaattaccgaacgcacgaaatacgggaccaaagttatggcacagtggtggttagaacacggtgtgaatcgtggcgtcacgaaacgctcggttatgactttggtgtatgggagcaaagagtttggattccgcgatcaagtgctgagtgacaccattcaaccggcgatcgataacggcaaaggtgacatgtttctgaatccgaatcaggctgctggttacatggcgaaactgatctggaacgcagtgtccgtgaccgtagtcgcagcagttgaggcgatgaactggctgaaaagtgcggcgaaattacttgctgctgaagtgaaggataagaagacggatacagttctgcgtggccgctgcgcagtacattgggtgactcccgacggcttccctgtgtggcaggaatacaagaagcctattcagacgcgcttgaacctgatgttcctcggtcagttccgcttacagcctaccattaacaccaacaaagatagcgagattgatgcacacaaacaggagtctggtatcgctcctaactttgtacacagccaagacggtaaccaccttcgtatgactgtagtgtgggcacacgagaagtacggaatcgaatcttttgcactgattcacgactccttcggtaccattccggctgacgctgcgaacctgttcaaagcagtgcgcgaaactatggtttcgacatatgagtcttgtgatgtactggctgatttctacgaccagttcgctgaccagttgcacgagtctcaattggacaaaatgccagcacttccggctaaaggtaacttgaacctccgtgacatcttaaaatcggacttcgcgttcgcg

SEQ ID NO: 440 - protein, 890 aa, synthetic construct
  REGION 1..890: note = Variant of RNA polymerase
MHHHHHHMNTENIAKNDFSDIELAAIPFNTLADHYGERLAREQLALEHESYEMGEARFRKMFERQLKAGEVADNAATKPLITTLLPKMIARINDWFEEVKAKRGKRPTAFQFLQEIKPEAVAYITIKTTLACLTSADNTTVQAVASAIGRAIEDEARFGRIRDLEAKHFKKNVEEQLNKRVGHVYKKAFMQVVEADMLSTGLLGGEAWSSWHKEDSIHVGVRCIEMLIESTGMVSLHRQNAGVVGQDSETIELAPEYAEAIATRAGALAGISPMFQPCVVPPKPWTGITGGGYWAAGRKPLQLVRTRSLAALRRYEEVSMPEVIKAVNIAQNTAWRVNKKVLDVANAITQWQHCPVADVPAMDRGEMPARPLDIDTNEIALKAWKKEASAFYRKDKARVSRRLSMEFMLSQANKFANYKAIWFPQNMDWRGRVYAVPMFNPQGNDMTKGLLTFAQGKPIGEDGFYWLKIHGANTAGVDKVPFPQRIKFVEDNHTNIMECAKAPLENTWWAEQDSPFCFLAFCFEYAGVINHGLSYNCSLPLAFDGSCSGIQHFSAMLRDEIGGKAVNLLPSAEPQDIYRIVSDKVNEVLKQDLINGTSTTLETVTDKKTGEITERTKYGTKVMAQWWLEHGVNRGVTKRSVMTLVYGSKEFGFRDQVLSDTIQPAIDNGKGDMFLNPNQAAGYMAKLIWNAVSVTVVAAVEAMNWLKSAAKLLAAEVKDKKTDTVLRGRCAVHWVTPDGFPVWQEYKKPIQTRLNLMFLGQFRLQPTINTNKDSEIDAHKQESGIAPNFVHSQDGNHLRMTVVWAHEKYGIESFALIHDSFGTIPADAANLFKAVRETMVSTYESCDVLADFYDQFADQLHESQLDKMPALPAKGNLNLRDILKSDFAFA

SEQ ID NO: 441 - DNA, 2670 bp, synthetic construct
  misc_feature 1..2670: note = Variant of RNA polymerase
  source 1..2670: mol_type = other DNA
atgcaccatcaccatcaccatatgaacacggagaacatcgctaagaacgacttctctgacatcgaactggctgctatcccgttcaacactctggctgaccattacggtgagcgtttagctcgcgaacagttggcccttgagcatgagtcttacgagatgggtgaagcacgcttccgcaagatgtttgagcgtcaacttaaagctggtgaggttgcggataacgctgccgctaagcctctcatcactaccctactccctaagatgattgcacgcatcaacgactggtttgaggaagtgaaagctaagcgcggcaagcgcccgacagccttccagttcctgcaagaaatcaagccggaagccgtagcgtacatcaccattaagaccactctggcttgcctaaccagtgcggacaatacaaccgttcaggctgtagcaagcgcaatcggtcgggccattgaggacgaggctcgcttcggtcgtatccgtgaccttgaagctaagcacttcaagaaaaacgttgaggaacaactcaacaagcgcgtagggcacgtctacaagaaagcatttatgcaagttgtcgaggctgacatgctctctacgggtctactcggtggcgaggcgtggtcttcgtggcataaggaagactctattcatgtaggagtacgctgcatcgagatgctcattgagtcaaccggaatggttagcttacaccgccaaaatgctggcgtagtaggtcaagactctgagactatcgaactcgcacctgaatacgctgaggctatcgcaacccgtgcaggtgcgctggctggcatctctccgatgttccaaccttgcgtagttcctcctaagccgtggactggcattactggtggtggctattgggctgcggggcgcaaacccctgcagttagtacgtactcgcagtctggcggcgcttcgccgctatgaagaagtgtcgatgccggaggtcatcaaagcagtcaacattgcgcagaatacagcatggcgtgtgaacaagaaagttctcgacgtagcgaatacgatcacccaatggcagcactgtccagtcgcggatgtgcctgcgatggatcgtggcgaaatgccagctcgtccgttggacatcgataccaacgagattgcacttaaagcgtggaagaaagaagcttccgcgttctaccgcaaagacaaagcacgcgttagccgtcgtctgtcaatggagtttatgttatctcaggcgaacaagtttgcgaattacaaagcaatctggtttccgcaaaacatggattggcgtgggcgcgtgtacgctgtcccgatgttcaatcctcagggcaacgatatgacgaaaggcctgctgacctttgcgcagaccaaacccattggtgaagacggcttctattggctcaagattcatggcgcaaatacagctggagtggataaagtaccgtttccacaacgcatcaaatttgttgaggataaccatacgaatattatggaatgcgcgaaagcaccgctggaaaacacttggtgggcggaacaggactcgccgttctgttttctggcgttctgctttgagtatgctggcgtcatcaatcacggtctgtcgtacaactgtagcttgcctctggcatttgatggtagttgctccggcatccaacatttctcagcgatgttacgcgacgaaattggcggcaaagctgtgaatctcctcccatctgcggaagtgcaggatatttatcgtatcgtcagcgacaaagttaacgaggtactgaaacaagatctgattaacggtacctctaccaccttggaaacggtgactgataagaagacaggcgaaattaccgaacgcacgaaatacgggaccaaagttatggcacagtggtggttagaacacggtgtgaatcgtggcgtcacgaaacgctcggttatgactttggtgtatgggagcaaagagtttggattccgcgatcaagtgctgagtgacaccattcaaccggcgatcgataacggcaaaggtgacatgtttctgaatccgaatcaggctgctggttacatggcgaaactgatctggaacgcagtgtccgggaccgtagtcgcagcagttgaggcgatgaactggctgaaaagtgcggcgaaattacttgctgctgaagtgaaggatcctaagacggatacagttctgcgtggccgctgcgcagtacattgggtgactcccgacggcttccctgtgtggcaggaatacaagaagcctattcagacgcgcttgaacctgatgttcctcggtcagttccgcttacagcctaccattaacaccaacaaagatagcgagattgatgcacacaaacaggagtctggtatcgctcctaactttgtacacagccaagacggtaaccaccttcgtatgactgtagtgtgggcacacgagaagtacggaatcgaatcttttgcactgattcacgactccttcggtaccattccggctgacgctgcgaacctgttcaaagcagtgcgcgaaactatggtttcgacatatgagtcttgtgatgtactggctgatttctacgaccagttcgctgaccagttgcacgagtctcaattggacaaaatgccagcacttccggctaaaggtaacttgaacctccgtgacatcttaaaatcggacttcgcgttcgcg

SEQ ID NO: 442 - protein, 890 aa, synthetic construct
  REGION 1..890: note = Variant of RNA polymerase
MHHHHHHMNTENIAKNDFSDIELAAIPFNTLADHYGERLAREQLALEHESYEMGEARFRKMFERQLKAGEVADNAAAKPLITTLLPKMIARINDWFEEVKAKRGKRPTAFQFLQEIKPEAVAYITIKTTLACLTSADNTTVQAVASAIGRAIEDEARFGRIRDLEAKHFKKNVEEQLNKRVGHVYKKAFMQVVEADMLSTGLLGGEAWSSWHKEDSIHVGVRCIEMLIESTGMVSLHRQNAGVVGQDSETIELAPEYAEAIATRAGALAGISPMFQPCVVPPKPWTGITGGGYWAAGRKPLQLVRTRSLAALRRYEEVSMPEVIKAVNIAQNTAWRVNKKVLDVANTITQWQHCPVADVPAMDRGEMPARPLDIDTNEIALKAWKKEASAFYRKDKARVSRRLSMEFMLSQANKFANYKAIWFPQNMDWRGRVYAVPMFNPQGNDMTKGLLTFAQTKPIGEDGFYWLKIHGANTAGVDKVPFPQRIKFVEDNHTNIMECAKAPLENTWWAEQDSPFCFLAFCFEYAGVINHGLSYNCSLPLAFDGSCSGIQHFSAMLRDEIGGKAVNLLPSAEVQDIYRIVSDKVNEVLKQDLINGTSTTLETVTDKKTGEITERTKYGTKVMAQWWLEHGVNRGVTKRSVMTLVYGSKEFGFRDQVLSDTIQPAIDNGKGDMFLNPNQAAGYMAKLIWNAVSGTVVAAVEAMNWLKSAAKLLAAEVKDPKTDTVLRGRCAVHWVTPDGFPVWQEYKKPIQTRLNLMFLGQFRLQPTINTNKDSEIDAHKQESGIAPNFVHSQDGNHLRMTVVWAHEKYGIESFALIHDSFGTIPADAANLFKAVRETMVSTYESCDVLADFYDQFADQLHESQLDKMPALPAKGNLNLRDILKSDFAFA

SEQ ID NO: 443 - DNA, 2670 bp, synthetic construct
  misc_feature 1..2670: note = Variant of RNA polymerase
  source 1..2670: mol_type = other DNA
atgcaccatcaccatcaccatatgaacacggagaacatcgctaagaacgacttctctgacatcgaactggctgctatcccgttcaacactctggctgaccattacggtgagcgtttagctcgcgaacagttggcccttgagcatgagtcttacgagatgggtgaagcacgcttccgcaagatgtttgagcgtcaacttaaagctggtgaggttgcggataacgctgccgccaagcctctcatcactaccctactccctaagatgattgcacgcatcaacgactggtttgaggaagtgaaagctaagcgcggcaagcgcccgacagccttccagttcctgcaagaaatcaagccggaagccgtagcgtacatcaccattaagaccactctggcttgcctaaccagtgcggacaatacaaccgttcaggctgtagcaagcgcaatcggtcgggccattgaggacgaggctcgcttcggtcgtatccgtgaccttgaagctaagcacttcaagaaaaacgttgaggaacaactcaacaagcgcgtagggcacgtctacaagaaagcatttatgcaagttgtcgaggctgacatgctctctacgggtctactcggtggcgaggcgtggtcttcgtggcataaggaagactctattcatgtaggagtacgctgcatcgagatgctcattgagtcaaccggaatggttagcttacaccgccaaaatgctggcgtagtaggtcaagactctgagactatcgaactcgcacctgaatacgctgaggctatcgcaacccgtgcaggtgcgctggctggcatctctccgatgttccaaccttgcgtagttcctcctaagccgtggactggcattactggtggtggctattgggctgcggggcgcaaacccctgcagttagtacgtactcgcagtctggcggcgcttcgccgctatgaagaagtgtcgatgccggaggtcatcaaagcagtcaacattgcgcagaatacagcatggcgtgttaacaagaaagttctcgacgtagcgaatgcaatcacccaatggcagcactgtccagtcgcggatgtgcctgcgatggatcgtggcgaaatgccagctcgtccgttggacatcgataccaacgagattgcacttaaagcgtggaagaaagaagcttccgcgttctaccgcaaagacaaagcacgcgttagccgtcgtctgtcaatggagtttatgttatctcaggcgaacaagtttgcgaattataaagcaatctggtttccgcaaaacatggattggcgtgggcgcgtgtacgctgtcccgatgttcaatcctcagggcaacgatatgacgaaaggcctgctgacctttgcgcaggagaaacccattggtgaagacggcttctattggctcaagattcatggcgcaaatacagctggagtggataaagtaccgtttccacaacgcatcaaatttgttgaggataaccatacgaatattatggaatgcgcgaaagcaccgctggaaaacacttggtgggcggaacaggactcgccgttctgttttctggcgttctgctttgagtatgctggcgtcatcaatcacggtctgtcgtacaactgtagcttgcctctggcatttgatggtagttgctccggcattcaacatttctcagcgatgttacgcgacgaaattggcggcaaagctgtgaatctcctcccatctgcggaataccaggatatttatcgtatcgtcagcgacaaagttaacgaggtactgaaacaagatctgattaacggtacctctaccaccttggaaacggtgactgataagaagacaggcgaaattaccgaacgcacgaaatacgggaccaaagttatggcacagtggtggttagaacacggtgtgaatcgtggcgtcacgaaacgctcggttatgactttggtgtatgggagcaaagagtttggattccgcgatcaagtgctgagtgacaccattcaaccggcgatcgataacggcaaaggtgacatgtttctgaatccgaatcaggctgctggttacatggcgaaactgatctggaacgcagtgtccgtcaccgtagtcgcagcagttgaggcgatgaactggctgaaaagtgcggcgaaattacttgctgctgaagtgaaggataagaagacggatacagttctgcgtggccgctgcgcagtacattgggtgactcccgacggcttccctgtgtggcaggaatacaagaagcctattcagacgcgcttgaacctgatgttcctcggtcagttccgcttacagcctaccattaacaccaacaaagatagcgagattgatgcacacaaacaggagtctggtatcgctcctaactttgtacacagccaagacggtaaccaccttcgtatgactgtagtgtgggcacacgagaagtacggaatcgaatcttttgcactgattcacgactccttcggtaccattccggctgacgctgcgaacctgttcaaagcagtgcgcgaaactatggtttcgacatatgagtcttgtgatgtactggctgatttctacgaccagttcgctgaccagttgcacgagtctcaattggacaaaatgccagcacttccggctaaaggtaacttgaacctccgtgacatcttaaaatcggacttcgcgttcgcg

SEQ ID NO: 444 - protein, 890 aa, synthetic construct
  REGION 1..890: note = Variant of RNA polymerase
MHHHHHHMNTENIAKNDFSDIELAAIPFNTLADHYGERLAREQLALEHESYEMGEARFRKMFERQLKAGEVADNAAAKPLITTLLPKMIARINDWFEEVKAKRGKRPTAFQFLQEIKPEAVAYITIKTTLACLTSADNTTVQAVASAIGRAIEDEARFGRIRDLEAKHFKKNVEEQLNKRVGHVYKKAFMQVVEADMLSTGLLGGEAWSSWHKEDSIHVGVRCIEMLIESTGMVSLHRQNAGVVGQDSETIELAPEYAEAIATRAGALAGISPMFQPCVVPPKPWTGITGGGYWAAGRKPLQLVRTRSLAALRRYEEVSMPEVIKAVNIAQNTAWRVNKKVLDVANAITQWQHCPVADVPAMDRGEMPARPLDIDTNEIALKAWKKEASAFYRKDKARVSRRLSMEFMLSQANKFANYKAIWFPQNMDWRGRVYAVPMFNPQGNDMTKGLLTFAQEKPIGEDGFYWLKIHGANTAGVDKVPFPQRIKFVEDNHTNIMECAKAPLENTWWAEQDSPFCFLAFCFEYAGVINHGLSYNCSLPLAFDGSCSGIQHFSAMLRDEIGGKAVNLLPSAEYQDIYRIVSDKVNEVLKQDLINGTSTTLETVTDKKTGEITERTKYGTKVMAQWWLEHGVNRGVTKRSVMTLVYGSKEFGFRDQVLSDTIQPAIDNGKGDMFLNPNQAAGYMAKLIWNAVSVTVVAAVEAMNWLKSAAKLLAAEVKDKKTDTVLRGRCAVHWVTPDGFPVWQEYKKPIQTRLNLMFLGQFRLQPTINTNKDSEIDAHKQESGIAPNFVHSQDGNHLRMTVVWAHEKYGIESFALIHDSFGTIPADAANLFKAVRETMVSTYESCDVLADFYDQFADQLHESQLDKMPALPAKGNLNLRDILKSDFAFA

SEQ ID NO: 445 - DNA, 2670 bp, synthetic construct
  misc_feature 1..2670: note = Variant of RNA polymerase
  source 1..2670: mol_type = other DNA
atgcaccatcaccatcaccatatgaacacgattaacatcgctaagaacgacttctctgacatcgaactggctgctatcccgttcaacactctggctgaccattacggtgagcgtttagctcgcgaacagttggcccttgagcatgagtcttacgagatgggtgaagcacgcttccgcaagatgtttgagcgtcaacttaaagctggtgaggttgcggataacgctgccgccaagcctctcatcactaccctactccctaagatgattgcacgcatcaacgactggtttgaggaagtgaaagctaagcgcggcaagcgcccgacagccttccagttcctgcaagaaatcaagccggaagccgtagcgtacatcaccattaagaccactctggcttgcctaaccagtgcggacaatacaaccgttcaggctgtagcaagcgcaatcggtcgggccattgaggacgaggctcgcttcggtcgtatccgtgaccttgaagctaagcacttcaaggagaacgttgaggaacaactcaacaagcgcgtagggcacgtctacaagaaagcatttatgcaagttgtcgaggctgacatgctctctacgggtctactcggtggcgaggcgtggtcttcgtggcataaggaagactctattcatgtaggagtacgctgcatcgagatgctcattgagtcaaccggaatggttagcttacaccgccaaaatgctggcgtagtaggtcaagactctgagactatcgaactcgcacctgaatacgctgaggctatcgcaacccgtgcaggtgcgctggctggcatctctccgatgttccaaccttgcgtagttcctcctaagccgtggactggcattactggtggtggctattgggctgcggggcgcaaacccctgcagttagtacgtactcgcagtctggcggcgcttcgccgctatgaagaagtgtcgatgccggaggtcatcaaagcagtcaacattgcgcagaatacagcatggcgtgtgaacaagaaagttctcgacgtagcgaatgcaatcacccaatggcagcactgtccagtcgcggatgtgcctgcgatggatcgtggcgaaatgccagctcgtccgttggacatcgataccaacgagattgcacttaaagcgtggaagaaagaagcttccgcgttctaccgcaaagacaaagcacgcgttagccgtcgtctgtcaatggagtttatgttatctcaggcgaacaagtttgcgaattataaagcaatctggtttccgcaaaacatggattggcgtgggcgcgtgtacgctgtcccgatgttcaatcctcagggcaacgatatgacgaaaggcctgctgacctttgcgcagggtaaacccattggtgaagacggcttctattggctcaagattcatggcgcaaatacagctggagtggataaagtaccgtttccacaacgcatcaaatttgttgaggataaccatacgaatattatggaatgcgcgaaagcaccgctggaaaacacttggtgggcggaacaggactcgccgttctgttttctggcgttctgctttgagtatgctggcgtcatcaatagtggtctgtcgtacaactgtagcttgcctctggcatttgatggtagttgctccggcattcaacatttctcagcgatgttacgcgacgaaattggcggcaaagctgtgaatctcctcccatctgcggaagtacaggatatttatcgtatcgtcgcggacaaagttaacgaggtactgaaacaagatctgattaacggtacctctaccaccgtggaaacggtgactgataagaagacaggcgaaattacccaacgcacgaaatacgggaccaaagttatggcacagtggtggttagaacacggtgtgaatcgtggcgtcacgaaacgctcggttatgactttggtgtatgggagcaaagagtttggattccgcgatcaagtgctgagtgacaccattcaaccggcgatcgataacggcaaaggtgacatgtttctgaatccgaatcaggctgctggttacatggcgaaactgatctggaacgcagtgtccgtgaccgtagtcgcagcagttgaggcgatgaactggctgaaaagtgcggcgaaattacttgctgctgaagtgaaggatcctaagacggatacagttctgcgtggccgctgcgcagtacattgggtgactcccgacggcttccctgtgtggcaggaatacaagaagcctattcagacgcgcttgaacctgatgttcctcggtcagttccgcttacagcctaccattaacaccaacaaagatagcgagattgatgcacacaaacaggagtctggtatcgctcctaactttgtacacagccaagacggtaaccaccttcgtatgactgtagtgtgggcacacgagaagtacggaatcgaatcttttgcactgattcacgactccttcggtaccattccggctgacgctgcgaacctgttcaaagcagtgcgcgaaactatggtttcgacatatgagtcttgtgatgtactggctgatttctacgaccagttcgctgaccagttgcacgagtctcaattggacaaaatgccagcacttccggctaaaggtaacttgaacctccgtgacatcttaaaatcggacttcgcgttcgcg

SEQ ID NO: 446 - protein, 890 aa, synthetic construct
  REGION 1..890: note = Variant of RNA polymerase
MHHHHHHMNTINIAKNDFSDIELAAIPFNTLADHYGERLAREQLALEHESYEMGEARFRKMFERQLKAGEVADNAAAKPLITTLLPKMIARINDWFEEVKAKRGKRPTAFQFLQEIKPEAVAYITIKTTLACLTSADNTTVQAVASAIGRAIEDEARFGRIRDLEAKHFKENVEEQLNKRVGHVYKKAFMQVVEADMLSTGLLGGEAWSSWHKEDSIHVGVRCIEMLIESTGMVSLHRQNAGVVGQDSETIELAPEYAEAIATRAGALAGISPMFQPCVVPPKPWTGITGGGYWAAGRKPLQLVRTRSLAALRRYEEVSMPEVIKAVNIAQNTAWRVNKKVLDVANAITQWQHCPVADVPAMDRGEMPARPLDIDTNEIALKAWKKEASAFYRKDKARVSRRLSMEFMLSQANKFANYKAIWFPQNMDWRGRVYAVPMFNPQGNDMTKGLLTFAQGKPIGEDGFYWLKIHGANTAGVDKVPFPQRIKFVEDNHTNIMECAKAPLENTWWAEQDSPFCFLAFCFEYAGVINSGLSYNCSLPLAFDGSCSGIQHFSAMLRDEIGGKAVNLLPSAEVQDIYRIVADKVNEVLKQDLINGTSTTVETVTDKKTGEITQRTKYGTKVMAQWWLEHGVNRGVTKRSVMTLVYGSKEFGFRDQVLSDTIQPAIDNGKGDMFLNPNQAAGYMAKLIWNAVSVTVVAAVEAMNWLKSAAKLLAAEVKDPKTDTVLRGRCAVHWVTPDGFPVWQEYKKPIQTRLNLMFLGQFRLQPTINTNKDSEIDAHKQESGIAPNFVHSQDGNHLRMTVVWAHEKYGIESFALIHDSFGTIPADAANLFKAVRETMVSTYESCDVLADFYDQFADQLHESQLDKMPALPAKGNLNLRDILKSDFAFA

SEQ ID NO: 447 - DNA, 2670 bp, synthetic construct
  misc_feature 1..2670: note = Variant of RNA polymerase
  source 1..2670: mol_type = other DNA
atgcaccatcaccatcaccatatgaacacgattaacatcgctaagaacgacttctctgacatcgaactggctgctatcccgttcaacactctggctgaccattacggtgagcgtttagctcgcgaacagttggcccttgagcatgagtcttacgagatgggtgaagcacgcttccgcaagatgtttgagcgtcaacttaaagctggtgaggttgcggataacgctgccgctaagcctctcatcactaccctactccctaagatgattgcacgcatcaacgactggtttgaggaagtgaaagctaagcgcggcaagcgcccgacagccttccagttcctgcaagaaatcaagccggaagccgtagcgtacatcaccattaagaccactctggcttgcctaaccagtgcggacaatacaaccgttcaggctgtagcaagcgcaatcggtcgggccattgaggacgaggctcgcttcggtcgtatccgtgaccttgaagctaagcacttcaagaaaaacgttgaggaacaactcaacaagcgcgtagggcacgtctacaagaaagcatttatgcaagttgtcgaggctgacatgctctctaagggtctactcggtggcgaggcgtggtcttcgtggcataaggaagactctattcatgtaggagtacgctgcatcgagatgctcattgagtcaaccggaatggttagcttacaccgccaaaatgctggcgtagtaggtcaagactctgagactatcgaactcgcacctgaatacgctgaggctatcgcaacccgtgcaggtgcgctggctggcatctctccgatgttccaaccttgcgtagttcctcctaagccgtggactggcattactggtggtggctattgggctgcggggcgcaaacccctgcagttagtacgtactcgcagtctggcggcgcttcgccgctatgaagaagtgtcgatgccggaggtcatcaaagcagtcaacattgcgcagaatacagcatggcgtgtgaacaagaaagttctcgacgtagcgaatgcaatcacccaatggcagcactgtccagtcgcggatgtgcctgcgatggatcgtggcgaaatgccagctcgtccgttggacatcgataccaacgagattgcacttaaagcgtggaagaaagaagcttccgcgttctaccgcaaagacaaagcacgcgttagccgtcgtctgtcaatggagtttatgttatctcaggcgaacaagtttgcgaattataaagcaatctggtttccgcaaaacatggattggcgtgggcgcgtgtacgctgtcccgatgttcaatcctcagggcaacgatatgacgaaaggcctgctgacctttgcgcaggagaaacccattggtgaagacggcttctattggctcaagattcatggcgcaaatacagctggagtggataaagtaccgtttccacaacgcatcaaatttgttgaggataaccatacgaatattatggaatgcgcgaaagcaccgctggaaaacacttggtgggcggaacaggactcgccgttctgttttctggcgttctgctttgagtatgctggcgtcatcaatagtggtctgtcgtacaactgtagcttgcctctggcatttgatggtagttgctccggcatccaacatttctcagcgatgttacgcgacgaaattggcggcaaagctgtgaatctcctcccatctgcggaacctcaggatatttatcgtatcgtcagcgacaaagttaacgaggtactgaaacaagatctgattaacggtacctctaccaccttggaaacggtgactgataagaagacaggcgaaattaccgaacgcacgaaatacgggaccaaagttatggcacagtggtggttagaacacggtgtgaatcgtggcgtcacgaaacgctcggttatgactttggtgtatgggagcaaagagtttggattccgcgatcaagtgctgagtgacaccattcaaccggcgatcgataacggcaaaggtgacatgtttctgaatccgaatcaggctgctggttacatggcgaaactgatctgggatgcagtgtccgtcaccgtagtcgcagcagttgaggcgatgaactggctgaaaagtgcggcgaaattacttgctgctgaagtgaaggataagaagacggatacagttctgcgtggccgctgcgcagtacattgggtgactcccgacggcttccctgtgtggcaggaatacaagaagcctattcagacgcgcttgaacctgatgttcctcggtcagttccgcttacagcctaccattaacaccaacaaagatagcgagattgatgcacacaaacaggagtctggtatcgctcctaactttgtacacagccaagacggtaaccaccttcgtatgactgtagtgtgggcacacgagaagtacggaatcgaatcttttgcactgattcacgactccttcggtaccattccggctgacgctgcgaacctgttcaaagcagtgcgcgaaactatggtttcgacatatgagtcttgtgatgtactggctgatttctacgaccagttcgctgaccagttgcacgagtctcaattggacaaaatgccagcacttccggctaaaggtaacttgaacctccgtgacatcttaaaatcggacttcgcgttcgcg

SEQ ID NO: 448 - protein, 890 aa, synthetic construct
  REGION 1..890: note = Variant of RNA polymerase
MHHHHHHMNTINIAKNDFSDIELAAIPFNTLADHYGERLAREQLALEHESYEMGEARFRKMFERQLKAGEVADNAAAKPLITTLLPKMIARINDWFEEVKAKRGKRPTAFQFLQEIKPEAVAYITIKTTLACLTSADNTTVQAVASAIGRAIEDEARFGRIRDLEAKHFKKNVEEQLNKRVGHVYKKAFMQVVEADMLSKGLLGGEAWSSWHKEDSIHVGVRCIEMLIESTGMVSLHRQNAGVVGQDSETIELAPEYAEAIATRAGALAGISPMFQPCVVPPKPWTGITGGGYWAAGRKPLQLVRTRSLAALRRYEEVSMPEVIKAVNIAQNTAWRVNKKVLDVANAITQWQHCPVADVPAMDRGEMPARPLDIDTNEIALKAWKKEASAFYRKDKARVSRRLSMEFMLSQANKFANYKAIWFPQNMDWRGRVYAVPMFNPQGNDMTKGLLTFAQEKPIGEDGFYWLKIHGANTAGVDKVPFPQRIKFVEDNHTNIMECAKAPLENTWWAEQDSPFCFLAFCFEYAGVINSGLSYNCSLPLAFDGSCSGIQHFSAMLRDEIGGKAVNLLPSAEPQDIYRIVSDKVNEVLKQDLINGTSTTLETVTDKKTGEITERTKYGTKVMAQWWLEHGVNRGVTKRSVMTLVYGSKEFGFRDQVLSDTIQPAIDNGKGDMFLNPNQAAGYMAKLIWDAVSVTVVAAVEAMNWLKSAAKLLAAEVKDKKTDTVLRGRCAVHWVTPDGFPVWQEYKKPIQTRLNLMFLGQFRLQPTINTNKDSEIDAHKQESGIAPNFVHSQDGNHLRMTVVWAHEKYGIESFALIHDSFGTIPADAANLFKAVRETMVSTYESCDVLADFYDQFADQLHESQLDKMPALPAKGNLNLRDILKSDFAFA

SEQ ID NO: 449 - DNA, 2670 bp, synthetic construct
  misc_feature 1..2670: note = Variant of RNA polymerase
  source 1..2670: mol_type = other DNA
atgcaccatcaccatcaccatatgaacacgattaacggtgctaagaacgacttctctgacatcgaactggctgctatcccgttcaacactctggctgaccattacggtgagcgtttagctcgcgaacagttggcccttgagcatgagtcttacgagatgggtgaagcacgcttccgcaagatgtttgagcgtcaacttaaagctggtgaggttgcggataacgctgccgccaagcctctcatcactaccctactccctaagatgattgcacgcatcaacgactggtttgaggaagtgaaagctaagcgcggcaagcgcccgacagccttccagttcctgcaagaaatcaagccggaagccgtagcgtacatcaccattaagaccactctggcttgcctaaccagtgcggacaatacaaccgttcaggctgtagcaagcgcaatcggtcgggccattgaggacgaggctcgcttcggtcgtatccgtgaccttgaagctaagcacttcaagaaaaacgttgaggaacaactcaacaagcgcgtagggcacgtctacaagaaagcatttatgcaagttgtcgaggctgacatgctctctaagggtctactcggtggcgaggcgtggtcttcgtggcataaggaagactctattcatgtaggagtacgctgcatcgagatgctcattgagtcaaccggaatggttagcttacaccgccaaaatgctggcgtagtaggtcaagactctgagactatcgaactcgcacctgaatacgctgaggctatcgcaacccgtgcaggtgcgctggctggcatctctccgatgttccaaccttgcgtagttcctcctaagccgtggactggcattactggtggtggctattgggctgcggggcgcaaacccctgcagttagtacgtactcgcagtctggcggcgcttcgccgctatgaagaagtgtcgatgccggaggtcatcaaagcagtcaacattgcgcagaatacagcatggcgtattaacaagaaagttctcgacgtagcgaatgcaatcacccaatggcagcactgtccagtcgcggatgtgcctgcgatggatcgtggcgaaatgccagctcgtccgttggacatcgataccaacgagattgcacttaaagcgtggaagaaagaagcttccgcgttctaccgcaaagacaaagcacgcgttagccgtcgtctgtcaatggagtttatgttatctcaggcgaacaagtttgcgaattacaaagcaatctggtttccgcaaaacatggattggcgtgggcgcgtgtacgctgtcccgatgttcaatcctcagggcaacgatatgacgaaaggcctgctgacctttgcgcagaccaaacccattggtgaagacggcttctattggctcaagattcatggcgcaaatacagctggagtggataaagtaccgtttccacaacgcatcaaatttgttgaggataaccatacgaatattatggaatgcgcgaaagcaccgctggaaaacacttggtgggcggaacaggactcgccgttctgttttctggcgttctgctttgagtatgctggtgtcatcaatcacggtctgtcgtacaactgtagcttgcctctggcatttgatggtagttgctccggcctgcaacatttctcagcgatgttacgcgacgaaattggcggcaaagctgtgaatctcctcccatctgcggaagtgcaggatatttatcgtatcgtcagcgacaaagttaacgaggtactgaaacaagatctgattaacggtacctctaccaccttggaaacggtgactgataagaagacaggcgaaattaccgaacgcacgaaatacgggaccaaagttatggcacagtggtggttagaacacggtgtgaatcgtggcgtcacgaaacgctcggttatgactttggtgtatgggagcaaagagtttggattccgcgatcaagtgctgagtgacaccattcaaccggcgatcgataacggcaaaggtgacatgtttctgaatccgaatcaggctgctggttacatggcgaaactgatctggaacgcagtgtccgtgaccgtagtcgcagcagttgaggcgatgaactggctgaaaagtgcggcgaaattacttgctgctgaagtgaaggataagaagacggatacagttctgcgtggccgctgcgcagtacattgggtgactcccgacggcttccctgtgtggcaggaatacaagaagcctattcagacgcgcttgaacctgatgttcctcggtcagttccgcttacagcctaccattaacaccaacaaagatagcgagattgatgcacacaaacaggagtctggtatcgctcctaactttgtacacagccaagacggtaaccaccttcgtatgactgtagtgtgggcacacgagaagtacggaatcgaatcttttgcactgattcacgactccttcggtaccattccggctgacgctgcgaacctgttcaaagcagtgcgcgaaactatggtttcgacatatgagtcttgtgatgtactggctgatttctacgaccagttcgctgaccagttgcacgagtctcaattggacaaaatgccagcacttccggctaaaggtaacttgaacctccgtgacatcttaaaatcggacttcgcgttcgcg

SEQ ID NO: 450 - protein, 890 aa, synthetic construct
  REGION 1..890: note = Variant of RNA polymerase
MHHHHHHMNTINGAKNDFSDIELAAIPFNTLADHYGERLAREQLALEHESYEMGEARFRKMFERQLKAGEVADNAAAKPLITTLLPKMIARINDWFEEVKAKRGKRPTAFQFLQEIKPEAVAYITIKTTLACLTSADNTTVQAVASAIGRAIEDEARFGRIRDLEAKHFKKNVEEQLNKRVGHVYKKAFMQVVEADMLSKGLLGGEAWSSWHKEDSIHVGVRCIEMLIESTGMVSLHRQNAGVVGQDSETIELAPEYAEAIATRAGALAGISPMFQPCVVPPKPWTGITGGGYWAAGRKPLQLVRTRSLAALRRYEEVSMPEVIKAVNIAQNTAWRINKKVLDVANAITQWQHCPVADVPAMDRGEMPARPLDIDTNEIALKAWKKEASAFYRKDKARVSRRLSMEFMLSQANKFANYKAIWFPQNMDWRGRVYAVPMFNPQGNDMTKGLLTFAQTKPIGEDGFYWLKIHGANTAGVDKVPFPQRIKFVEDNHTNIMECAKAPLENTWWAEQDSPFCFLAFCFEYAGVINHGLSYNCSLPLAFDGSCSGLQHFSAMLRDEIGGKAVNLLPSAEVQDIYRIVSDKVNEVLKQDLINGTSTTLETVTDKKTGEITERTKYGTKVMAQWWLEHGVNRGVTKRSVMTLVYGSKEFGFRDQVLSDTIQPAIDNGKGDMFLNPNQAAGYMAKLIWNAVSVTVVAAVEAMNWLKSAAKLLAAEVKDKKTDTVLRGRCAVHWVTPDGFPVWQEYKKPIQTRLNLMFLGQFRLQPTINTNKDSEIDAHKQESGIAPNFVHSQDGNHLRMTVVWAHEKYGIESFALIHDSFGTIPADAANLFKAVRETMVSTYESCDVLADFYDQFADQLHESQLDKMPALPAKGNLNLRDILKSDFAFA

SEQ ID NO: 451 - DNA, 2670 bp, synthetic construct
  misc_feature 1..2670: note = Variant of RNA polymerase
  source 1..2670: mol_type = other DNA
atgcaccatcaccatcaccatatgaacacggagaacatcgctaagaacgacttctctgacatcgaactggctgctatcccgttcaacactctggctgaccattacggtgagcgtttagctcgcgaacagttggcccttgagcatgagtcttacgagatgggtgaagcacgcttccgcaagatgtttgagcgtcaacttaaagctggtgaggttgcggataacgctgccgctaagcctctcatcactaccctactccctaagatgattgcacgcatcaacgactggtttgaggaagtgaaagctaagcgcggcaagcgcccgacagccttccagttcctgcaagaaatcaagccggaagccgtagcgtacatcaccattaagaccactctggcttgcctaaccagtgcggacaatacaaccgttcaggctgtagcaagcgcaatcggtcgggccattgaggacgaggctcgcttcggtcgtatccgtgaccttgaagctaagcacttcaagaagaacgttgaggaacaactcaacaagcgcgtagggcacgtctacaagaaagcatttatgcaagttgtcgaggctgacatgctctctacgggtctactcggtggcgaggcgtggtcttcgtggcataaggaagactctattcatgtaggagtacgctgcatcgagatgctcattgagtcaaccggaatggttagcttacaccgccaaaatgctggcgtagtaggtcaagactctgagactatcgaactcgcacctgaatacgctgaggctatcgcaacccgtgcaggtgcgctggctggcatctctccgatgttccaaccttgcgtagttcctcctaagccgtggactggcattactggtggtggctattgggctgcggggcgcaaacccctgcagttagtacgtactcgcagtctggcggcgcttcgccgctatgaagaagtgtcgatgccggaggtcatcaaagcagtcaacattgcgcagaatacagcatggcgtattaacaagaaagttctcgacgtagcgaatgcaatcacccaatggcagcactgtccagtcgcggatgtgcctgcgatggatcgtggcgaaatgccagctcgtccgttggacatcgataccaacgagattgcacttaaagcgtggaagaaagaagcttccgcgttctaccgcaaagacaaagcacgcgttagccgtcgtctgtcaatggagtttatgttatctcaggcgaacaagtttgcgaattacaaagcaatctggtttccgcaaaacatggattggcgtgggcgcgtgtacgctgtcccgatgttcaatcctcagggcaacgatatgacgaaaggcctgctgacctttgcgcaggagaaacccattggtgaagacggcttctattggctcaagattcatggcgcaaatacagctggagtggataaagtaccgtttccacaacgcatcaaatttgttgaggataaccatacgaatattatggaatgcgcgaaagcaccgctggaaaacacttggtgggcggaacaggactcgccgttctgttttctggcgttctgctttgagtatgctggtgtcatcaatcacggtctgtcgtacaactgtagcttgcctctggcatttgatggtagttgctccggcatccaacatttctcagcgatgttacgcgacgaaattggcggcaaagctgtgaatctcctcccatctgcggaagtacaggatatttatcgtatcgtcagcgacaaagttaacgaggtactgaaacaagatctgattaacggtacctctaccaccttggaaacggtgactgataagaagacaggcgaaattaccgaacgcacgaaatacgggaccaaagttatggcacagtggtggttagaacacggtgtgaatcgtggcgtcacgaaacgctcggttatgactttggtgtatgggagcaaagagtttggattccgcgatcaagtgctgagtgacaccattcaaccggcgatcgataacggcaaaggtgacatgtttctgaatccgaatcaggctgctggttacatggcgaaactgatctggaatgcagtgtccgtcaccgtagtcgcagcagttgaggcgatgaactggctgaaaagtgcggcgaaattacttgctgctgaagtgaaggataaaaagacggatacagttctgcgtggccgctgcgcagtacattgggtgactcccgacggcttccctgtgtggcaggaatacaagaagcctattcagacgcgcttgaacctgatgttcctcggtcagttccgcttacagcctaccattaacaccaacaaagatagcgagattgatgcacacaaacaggagtctggtatcgctcctaactttgtacacagccaagacggtaaccaccttcgtatgactgtagtgtgggcacacgagaagtacggaatcgaatcttttgcactgattcacgactccttcggtaccattccggctgacgctgcgaacctgttcaaagcagtgcgcgaaactatggtttcgacatatgagtcttgtgatgtactggctgatttctacgaccagttcgctgaccagttgcacgagtctcaattggacaaaatgccagcacttccggctaaaggtaacttgaacctccgtgacatcttaaaatcggacttcgcgttcgcg

SEQ ID NO: 452 - protein, 890 aa, synthetic construct
  REGION 1..890: note = Variant of RNA polymerase
MHHHHHHMNTENIAKNDFSDIELAAIPFNTLADHYGERLAREQLALEHESYEMGEARFRKMFERQLKAGEVADNAAAKPLITTLLPKMIARINDWFEEVKAKRGKRPTAFQFLQEIKPEAVAYITIKTTLACLTSADNTTVQAVASAIGRAIEDEARFGRIRDLEAKHFKKNVEEQLNKRVGHVYKKAFMQVVEADMLSTGLLGGEAWSSWHKEDSIHVGVRCIEMLIESTGMVSLHRQNAGVVGQDSETIELAPEYAEAIATRAGALAGISPMFQPCVVPPKPWTGITGGGYWAAGRKPLQLVRTRSLAALRRYEEVSMPEVIKAVNIAQNTAWRINKKVLDVANAITQWQHCPVADVPAMDRGEMPARPLDIDTNEIALKAWKKEASAFYRKDKARVSRRLSMEFMLSQANKFANYKAIWFPQNMDWRGRVYAVPMFNPQGNDMTKGLLTFAQEKPIGEDGFYWLKIHGANTAGVDKVPFPQRIKFVEDNHTNIMECAKAPLENTWWAEQDSPFCFLAFCFEYAGVINHGLSYNCSLPLAFDGSCSGIQHFSAMLRDEIGGKAVNLLPSAEVQDIYRIVSDKVNEVLKQDLINGTSTTLETVTDKKTGEITERTKYGTKVMAQWWLEHGVNRGVTKRSVMTLVYGSKEFGFRDQVLSDTIQPAIDNGKGDMFLNPNQAAGYMAKLIWNAVSVTVVAAVEAMNWLKSAAKLLAAEVKDKKTDTVLRGRCAVHWVTPDGFPVWQEYKKPIQTRLNLMFLGQFRLQPTINTNKDSEIDAHKQESGIAPNFVHSQDGNHLRMTVVWAHEKYGIESFALIHDSFGTIPADAANLFKAVRETMVSTYESCDVLADFYDQFADQLHESQLDKMPALPAKGNLNLRDILKSDFAFA

SEQ ID NO: 453 - DNA, 2670 bp, synthetic construct
  misc_feature 1..2670: note = Variant of RNA polymerase
  source 1..2670: mol_type = other DNA
atgcaccatcaccatcaccatatgaacacgattaacatcgctaagaacgacttctctgacatcgaactggctgctatcccgttcaacactctggctgaccattacggtgagcgtttagctcgcgaacagttggcccttgagcatgagtcttacgagatgggtgaagcacgcttccgcaagatgtttgagcgtcaacttaaagctggtgaggttgcggataacgctgccactaagcctctcatcactaccctactccctaagatgattgcacgcatcaacgactggtttgaggaagtgaaagctaagcgcggcaagcgcccgacagccttccagttcctgcaagaaatcaagccggaagccgtagcgtacatcaccattaagaccactctggcttgcctaaccagtgcggacaatacaaccgttcaggctgtagcaagcgcaatcggtcgggccattgaggacgaggctcgcttcggtcgtatccgtgaccttgaagctaagcacttcaaggagaacgttgaggaacaactcaacaagcgcgtagggcacgtctacaagaaagcatttatgcaagttgtcgaggctgacatgctctctaagggtctactcggtggcgaggcgtggtcttcgtggcataaggaagactctattcatgtaggagtacgctgcatcgagatgctcattgagtcaaccggaatggttagcttacaccgccaaaatgctggcgtagtaggtcaagactctgagactatcgaactcgcacctgaatacgctgaggctatcgcaacccgtgcaggtgcgctggctggcatctctccgatgttccaaccttgcgtagttcctcctaagccgtggactggcattactggtggtggctattgggctgcggggcgcaaacccctgcagttagtacgtactcgcagtctggcggcgcttcgccgctatgaagaagtgtcgatgccggaggtcatcaaagcagtcaacattgcgcagaatacagcatggcgtgtgaacaagaaagttctcgacgtagcgaatacgatcacccaatggcagcactgtccagtcgcggatgtgcctgcgatggatcgtggcgaaatgccagctcgtccgttggacatcgataccaacgagattgcacttaaagcgtggaagaaagaagcttccgcgttctaccgcaaagacaaagcacgcgttagccgtcgtctgtcaatggagtttatgttatctcaggcgaacaagtttgcgaattataaagcaatctggtttccgcaaaacatggattggcgtgggcgcgtgtacgctgtcccgatgttcaatcctcagggcaacgatatgacgaaaggcctgctgacctttgcgcagaccaaacccattggtgaagacggcttctattggctcaagattcatggcgcaaatacagctggagtggataaagtaccgtttccacaacgcatcaaatttgttgaggataaccatacgaatattatggaatgcgcgaaagcaccgctggaaaacacttggtgggcggaacaggactcgccgttctgttttctggcgttctgctttgagtatgctggcgtcatcaatcacggtctgtcgtacaactgtagcttgcctctggcatttgatggtagttgctccggcattcaacatttctcagcgatgttacgcgacgaaattggcggcaaagctgtgaatctcctcccatctgcggaagtgcaggatatttatcgtatcgtctcggacaaagttaacgaggtactgaaacaagatctgattaacggtacctctaccaccttggaaacggtgactgataagaagacaggcgaaattaccgaacgcacgaaatacgggaccaaagttatggcacagtggtggttagaacacggtgtgaatcgtggcgtcacgaaacgctcggttatgactttggtgtatgggagcaaagagtttggattccgcgatcaagtgctgagtgacaccattcaaccggcgatcgataacggcaaaggtgacatgtttctgaatccgaatcaggctgctggttacatggcgaaactgatctggaacgcagtgtccgtcaccgtagtcgcagcagttgaggcgatgaactggctgaaaagtgcggcgaaattacttgctgctgaagtgaaggataagaagacggatacagttctgcgtggccgctgcgcagtacattgggtgactcccgacggcttccctgtgtggcaggaatacaagaagcctattcagacgcgcttgaacctgatgttcctcggtcagttccgcttacagcctaccattaacaccaacaaagatagcgagattgatgcacacaaacaggagtctggtatcgctcctaactttgtacacagccaagacggtaaccaccttcgtatgactgtagtgtgggcacacgagaagtacggaatcgaatcttttgcactgattcacgactccttcggtaccattccggctgacgctgcgaacctgttcaaagcagtgcgcgaaactatggtttcgacatatgagtcttgtgatgtactggctgatttctacgaccagttcgctgaccagttgcacgagtctcaattggacaaaatgccagcacttccggctaaaggtaacttgaacctccgtgacatcttaaaatcggacttcgcgttcgcg

SEQ ID NO: 454 - protein, 890 aa, synthetic construct
  REGION 1..890: note = Variant of RNA polymerase
MHHHHHHMNTINIAKNDFSDIELAAIPFNTLADHYGERLAREQLALEHESYEMGEARFRKMFERQLKAGEVADNAATKPLITTLLPKMIARINDWFEEVKAKRGKRPTAFQFLQEIKPEAVAYITIKTTLACLTSADNTTVQAVASAIGRAIEDEARFGRIRDLEAKHFKENVEEQLNKRVGHVYKKAFMQVVEADMLSKGLLGGEAWSSWHKEDSIHVGVRCIEMLIESTGMVSLHRQNAGVVGQDSETIELAPEYAEAIATRAGALAGISPMFQPCVVPPKPWTGITGGGYWAAGRKPLQLVRTRSLAALRRYEEVSMPEVIKAVNIAQNTAWRVNKKVLDVANTITQWQHCPVADVPAMDRGEMPARPLDIDTNEIALKAWKKEASAFYRKDKARVSRRLSMEFMLSQANKFANYKAIWFPQNMDWRGRVYAVPMFNPQGNDMTKGLLTFAQTKPIGEDGFYWLKIHGANTAGVDKVPFPQRIKFVEDNHTNIMECAKAPLENTWWAEQDSPFCFLAFCFEYAGVINHGLSYNCSLPLAFDGSCSGIQHFSAMLRDEIGGKAVNLLPSAEVQDIYRIVSDKVNEVLKQDLINGTSTTLETVTDKKTGEITERTKYGTKVMAQWWLEHGVNRGVTKRSVMTLVYGSKEFGFRDQVLSDTIQPAIDNGKGDMFLNPNQAAGYMAKLIWNAVSVTVVAAVEAMNWLKSAAKLLAAEVKDKKTDTVLRGRCAVHWVTPDGFPVWQEYKKPIQTRLNLMFLGQFRLQPTINTNKDSEIDAHKQESGIAPNFVHSQDGNHLRMTVVWAHEKYGIESFALIHDSFGTIPADAANLFKAVRETMVSTYESCDVLADFYDQFADQLHESQLDKMPALPAKGNLNLRDILKSDFAFA

SEQ ID NO: 455 - DNA, 2670 bp, synthetic construct
  misc_feature 1..2670: note = Variant of RNA polymerase
  source 1..2670: mol_type = other DNA
atgcaccatcaccatcaccatatgaacacgattaacggtgctaagaacgacttctctgacatcgaactggctgctatcccgttcaacactctggctgaccattacggtgagcgtttagctcgcgaacagttggcccttgagcatgagtcttacgagatgggtgaagcacgcttccgcaagatgtttgagcgtcaacttaaagctggtgaggttgcggataacgctgccgccaagcctctcatcactaccctactccctaagatgattgcacgcatcaacgactggtttgaggaagtgaaagctaagcgcggcaagcgcccgacagccttccagttcctgcaagaaatcaagccggaagccgtagcgtacatcaccattaagaccactctggcttgcctaaccagtgcggacaatacaaccgttcaggctgtagcaagcgcaatcggtcgggccattgaggacgaggctcgcttcggtcgtatccgtgaccttgaagctaagcacttcaagaaaaacgttgaggaacaactcaacaagcgcgtagggcacgtctacaagaaagcatttatgcaagttgtcgaggctgacatgctctctaagggtctactcggtggcgaggcgtggtcttcgtggcataaggaagactctattcatgtaggagtacgctgcatcgagatgctcattgagtcaaccggaatggttagcttacaccgccaaaatgctggcgtagtaggtcaagactctgagactatcgaactcgcacctgaatacgctgaggctatcgcaacccgtgcaggtgcgctggctggcatctctccgatgttccaaccttgcgtagttcctcctaagccgtggactggcattactggtggtggctattgggctgcggggcgcaaacccctgcagttagtacgtactcgcagtctggcggcgcttcgccgctatgaagaagtgtcgatgccggaggtcatcaaagcagtcaacattgcgcagaatacagcatggcgtattaacaagaaagttctcgacgtagcgaatgcaatcacccaatggcagcactgtccagtcgcggatgtgcctgcgatggatcgtggcgaaatgccagctcgtccgttggacatcgataccaacgagattgcacttaaagcgtggaagaaagaagcttccgcgttctaccgcaaagacaaagcacgcgttagccgtcgtctgtcaatggagtttatgttatctcaggcgaacaagtttgcgaattataaagcaatctggtttccgcaaaacatggattggcgtgggcgcgtgtacgctgtcccgatgttcaatcctcagggcaacgatatgacgaaaggcctgctgacctttgcgcagggtaaacccattggtgaagacggcttctattggctcaagattcatggcgcaaatacagctggagtggataaagtaccgtttccacaacgcatcaaatttgttgaggataaccatacgaatattatggaatgcgcgaaagcaccgctggaaaacacttggtgggcggaacaggactcgccgttctgttttctggcgttctgctttgagtatgctcgtgtcatcaatcacggtctgtcgtacaactgtagcttgcctctggcatttgatggtagttgctccggcctgcaacatttctcagcgatgttacgcgacgaaattggcgccaaagctgtgaatctcctcccatctgcggaacctcaggatatttatcgtatcgtcagcgacaaagttaacgaggtactgaaacaagatctgattaacggtacctctaccaccgtggaaacggtgactgataagaagacaggcgaaattaccgaacgcacgaaatacgggaccaaagttatggcacagtggtggttagaacacggtgtgaatcgtggcgtcacgaaacgctcggttatgactttggtgtatgggagcaaagagtttggattccgcgatcaagtgctgagtgacaccattcaaccggcgatcgataacggcaaaggtgacatgtttctgaatccgaatcaggctgctggttacatggcgaaactgatctggaatgcagtgtccgtcaccgtagtcgcagcagttgaggcgatgaactggctgaaaagtgcggcgaaattacttgctgctgaagtgaaggataagaagacggatacagttctgcgtggccgctgcgcagtacattgggtgactcccgacggcttccctgtgtggcaggaatacaagaagcctattcagacgcgcttgaacctgatgttcctcggtcagttccgcttacagcctaccattaacaccaacaaagatagcgagattgatgcacacaaacaggagtctggtatcgctcctaactttgtacacagccaagacggtaaccaccttcgtatgactgtagtgtgggcacacgagaagtacggaatcgaatcttttgcactgattcacgactccttcggtaccattccggctgacgctgcgaacctgttcaaagcagtgcgcgaaactatggtttcgacatatgagtcttgtgatgtactggctgatttctacgaccagttcgctgaccagttgcacgagtctcaattggacaaaatgccagcacttccggctaaaggtaacttgaacctccgtgacatcttaaaatcggacttcgcgttcgcg

SEQ ID NO: 456 - protein, 890 aa, synthetic construct
  REGION 1..890: note = Variant of RNA polymerase
MHHHHHHMNTINGAKNDFSDIELAAIPFNTLADHYGERLAREQLALEHESYEMGEARFRKMFERQLKAGEVADNAAAKPLITTLLPKMIARINDWFEEVKAKRGKRPTAFQFLQEIKPEAVAYITIKTTLACLTSADNTTVQAVASAIGRAIEDEARFGRIRDLEAKHFKKNVEEQLNKRVGHVYKKAFMQVVEADMLSKGLLGGEAWSSWHKEDSIHVGVRCIEMLIESTGMVSLHRQNAGVVGQDSETIELAPEYAEAIATRAGALAGISPMFQPCVVPPKPWTGITGGGYWAAGRKPLQLVRTRSLAALRRYEEVSMPEVIKAVNIAQNTAWRINKKVLDVANAITQWQHCPVADVPAMDRGEMPARPLDIDTNEIALKAWKKEASAFYRKDKARVSRRLSMEFMLSQANKFANYKAIWFPQNMDWRGRVYAVPMFNPQGNDMTKGLLTFAQGKPIGEDGFYWLKIHGANTAGVDKVPFPQRIKFVEDNHTNIMECAKAPLENTWWAEQDSPFCFLAFCFEYARVINHGLSYNCSLPLAFDGSCSGLQHFSAMLRDEIGAKAVNLLPSAEPQDIYRIVSDKVNEVLKQDLINGTSTTVETVTDKKTGEITERTKYGTKVMAQWWLEHGVNRGVTKRSVMTLVYGSKEFGFRDQVLSDTIQPAIDNGKGDMFLNPNQAAGYMAKLIWNAVSVTVVAAVEAMNWLKSAAKLLAAEVKDKKTDTVLRGRCAVHWVTPDGFPVWQEYKKPIQTRLNLMFLGQFRLQPTINTNKDSEIDAHKQESGIAPNFVHSQDGNHLRMTVVWAHEKYGIESFALIHDSFGTIPADAANLFKAVRETMVSTYESCDVLADFYDQFADQLHESQLDKMPALPAKGNLNLRDILKSDFAFA

SEQ ID NO: 457 - DNA, 2670 bp, synthetic construct
  misc_feature 1..2670: note = Variant of RNA polymerase
  source 1..2670: mol_type = other DNA
atgcaccatcaccatcaccatatgaacacgattaacatcgctaagaacgacttctctgacatcgaactggctgctatcccgttcaacactctggctgaccattacggtgagcgtttagctcgcgaacagttggcccttgagcatgagtcttacgagatgggtgaagcacgcttccgcaagatgtttgagcgtcaacttaaagctggtgaggttgcggataacgctgccgctaagcctctcatcactaccctactccctaagatgattgcacgcatcaacgactggtttgaggaagtgaaagctaagcgcggcaagcgcccgacagccttccagttcctgcaagaaatcaagccggaagccgtagcgtacatcaccattaagaccactctggcttgcctaaccagtgcggacaatacaaccgttcaggctgtagcaagcgcaatcggtcgggccattgaggacgaggctcgcttcggtcgtatccgtgaccttgaagctaagcacttcaagaaaaacgttgaggaacaactcaacaagcgcgtagggcacgtctacaagaaagcatttatgcaagttgtcgaggctgacgtgctctctacgggtctactcggtggcgaggcgtggtcttcgtggcataaggaagactctattcatgtaggagtacgctgcatcgagatgctcattgagtcaaccggaatggttagcttacaccgccaaaatgctggcgtagtaggtcaagactctgagactatcgaactcgcacctgaatacgctgaggctatcgcaacccgtgcaggtgcgctggctggcatctctccgatgttccaaccttgcgtagttcctcctaagccgtggactggcattactggtggtggctattgggctgcggggcgcaaacccctgcagttagtacgtactcgcagtctggcggcgcttcgccgctatgaagaagtgtcgatgccggaggtcatcaaagcagtcaacattgcgcagaatacagcatggcgtgtgaacaagaaagttctcgacgtagcgaatgcaatcacccaatggcagcactgtccagtcgcggatgtgcctgcgatggatcgtggcgaaatgccagctcgtccgttggacatcgataccaacgagattgcacttaaagcgtggaagaaagaagcttccgcgttctaccgcaaagacaaagcacgcgttagccgtcgtctgtcaatggagtttatgttatctcaggcgaacaagtttgcgaattacaaagcaatctggtttccgcaaaacatggattggcgtgggcgcgtgtacgctgtcccgatgttcaatcctcagggcaacgatatgacgaaaggcctgctgacctttgcgcagggtaaacccattggtgaagacggcttctattggctcaagattcatggcgcaaatacagctggagtggataaagtaccgtttccacaacgcatcaaatttgttgaggataaccatacgaatattatggaatgcgcgaaagcaccgctggaaaacacttggtgggcggaacaggactcgccgttctgttttctggcgttctgctttgagtatgctggcgtcatcaatagtggtctgtcgtacaactgtagcttgcctctggcatttgatggtagttgctccggcctgcaacatttctcagcgatgttacgcgacgaaattggcggcaaagctgtgaatctcctcccatctgcggaagtgcaggatatttatcgtatcgtcagcgacaaagttaacgaggtactgaaacaagatctgattaacggtacctctaccaccttggaaacggtgactgataagaagacaggcgaaattaccgaacgcacgaaatacgggaccaaagttatggcacagtggtggttagaacacggtgtgaatcgtggcgtcacgaaacgctcggttatgactttggtgtatgggagcaaagagtttggattccgcgatcaagtgctgagtgacaccattcaaccggcgatcgataacggcaaaggtgacatgtttctgaatccgaatcaggctgctggttacatggcgaaactgatctggaacgcagtgtccgggaccgtagtcgcagcagttgaggcgatgaactggctgaaaagtgcggcgaaattacttgctgctgaagtgaaggataagaagacggatacagttctgcgtggccgctgcgcagtacattgggtgactcccgacggcttccctgtgtggcaggaatacaagaagcctattcagacgcgcttgaacctgatgttcctcggtcagttccgcttacagcctaccattaacaccaacaaagatagcgagattgatgcacacaaacaggagtctggtatcgctcctaactttgtacacagccaagacggtaaccaccttcgtatgactgtagtgtgggcacacgagaagtacggaatcgaatcttttgcactgattcacgactccttcggtaccattccggctgacgctgcgaacctgttcaaagcagtgcgcgaaactatggtttcgacatatgagtcttgtgatgtactggctgatttctacgaccagttcgctgaccagttgcacgagtctcaattggacaaaatgccagcacttccggctaaaggtaacttgaacctccgtgacatcttaaaatcggacttcgcgttcgcg

SEQ ID NO: 458 - protein, 890 aa, synthetic construct
  REGION 1..890: note = Variant of RNA polymerase
MHHHHHHMNTINIAKNDFSDIELAAIPFNTLADHYGERLAREQLALEHESYEMGEARFRKMFERQLKAGEVADNAAAKPLITTLLPKMIARINDWFEEVKAKRGKRPTAFQFLQEIKPEAVAYITIKTTLACLTSADNTTVQAVASAIGRAIEDEARFGRIRDLEAKHFKKNVEEQLNKRVGHVYKKAFMQVVEADVLSTGLLGGEAWSSWHKEDSIHVGVRCIEMLIESTGMVSLHRQNAGVVGQDSETIELAPEYAEAIATRAGALAGISPMFQPCVVPPKPWTGITGGGYWAAGRKPLQLVRTRSLAALRRYEEVSMPEVIKAVNIAQNTAWRVNKKVLDVANAITQWQHCPVADVPAMDRGEMPARPLDIDTNEIALKAWKKEASAFYRKDKARVSRRLSMEFMLSQANKFANYKAIWFPQNMDWRGRVYAVPMFNPQGNDMTKGLLTFAQGKPIGEDGFYWLKIHGANTAGVDKVPFPQRIKFVEDNHTNIMECAKAPLENTWWAEQDSPFCFLAFCFEYAGVINSGLSYNCSLPLAFDGSCSGLQHFSAMLRDEIGGKAVNLLPSAEVQDIYRIVSDKVNEVLKQDLINGTSTTLETVTDKKTGEITERTKYGTKVMAQWWLEHGVNRGVTKRSVMTLVYGSKEFGFRDQVLSDTIQPAIDNGKGDMFLNPNQAAGYMAKLIWNAVSGTVVAAVEAMNWLKSAAKLLAAEVKDKKTDTVLRGRCAVHWVTPDGFPVWQEYKKPIQTRLNLMFLGQFRLQPTINTNKDSEIDAHKQESGIAPNFVHSQDGNHLRMTVVWAHEKYGIESFALIHDSFGTIPADAANLFKAVRETMVSTYESCDVLADFYDQFADQLHESQLDKMPALPAKGNLNLRDILKSDFAFA

SEQ ID NO: 459 - DNA, 2670 bp, synthetic construct
  misc_feature 1..2670: note = Variant of RNA polymerase
  source 1..2670: mol_type = other DNA
atgcaccatcaccatcaccatatgaacacgattaacatcgctaagaacgacttctctgacatcgaactggctgctatcccgttcaacactctggctgaccattacggtgagcgtttagctcgcgaacagttggcccttgagcatgagtcttacgagatgggtgaagcacgcttccgcaagatgtttgagcgtcaacttaaagctggtgaggttgcggataacgctgccactaagcctctcatcactaccctactccctaagatgattgcacgcatcaacgactggtttgaggaagtgaaagctaagcgcggcaagcgcccgacagccttccagttcctgcaagaaatcaagccggaagccgtagcgtacatcaccattaagaccactctggcttgcctaaccagtgcggacaatacaaccgttcaggctgtagcaagcgcaatcggtcgggccattgaggacgaggctcgcttcggtcgtatccgtgaccttgaagctaagcacttcaagaagaacgttgaggaacaactcaacaagcgcgtagggcacgtctacaagaaagcatttatgcaagttgtcgaggctgacgtgctctctacgggtctactcggtggcgaggcgtggtcttcgtggcataaggaagactctattcatgtaggagtacgctgcatcgagatgctcattgagtcaaccggaatggttagcttacaccgccaaaatgctggcgtagtaggtcaagactctgagactatcgaactcgcacctgaatacgctgaggctatcgcaacccgtgcaggtgcgctggctggcatctctccgatgttccaaccttgcgtagttcctcctaagccgtggactggcattactggtggtggctattgggctgcggggcgcaaacccctgcagttagtacgtactcgcagtctggcggcgcttcgccgctatgaagaagtgtcgatgccggaggtcatcaaagcagtcaacattgcgcagaatacagcatggcgtgttaacaagaaagttctcgacgtagcgaatgcgatcacccaatggcagcactgtccagtcgcggatgtgcctgcgatggatcgtggcgaaatgccagctcgtccgttggacatcgataccaacgagattgcacttaaagcgtggaagaaagaagcttccgcgttctaccgcaaagacaaagcacgcgttagccgtcgtctgtcaatggagtttatgttatctcaggcgaacaagtttgcgaattacaaagcaatctggtttccgcaaaacatggattggcgtgggcgcgtgtacgctgtcccgatgttcaatcctcagggcaacgatatgacgaaaggcctgctgacctttgcgcaggagaaacccattggtgaagacggcttctattggctcaagattcatggcgcaaatacagctggagtggataaagtaccgtttccacaacgcatcaaatttgttgaggataaccatacgaatattatggaatgcgcgaaagcaccgctggaaaacacttggtgggcggaacaggactcgccgttctgttttctggcgttctgctttgagtatgctggcgttatcaatcacggtctgtcgtacaactgtagcttgcctctggcatttgatggtagttgctccggcctgcaacatttctcagcgatgttacgcgacgaaattggcggcaaagctgtgaatctcctcccatctgcggaagtacaggatatttatcgtatcgtcagcgacaaagttaacgaggtactgaaacaagatctgattaacggtacctctaccaccttggaaacggtgactgataagaagacaggcgaaattaccgaacgcacgaaatacgggaccaaagttatggcacagtggtggttagaacacggtgtgaatcgtggcgtcacgaaacgctcggttatgactttggtgtatgggagcaaagagtttggattccgcgatcaagtgctgagtgacaccattcaaccggcgatcgataacggcaaaggtgacatgtttctgaatccgaatcaggctgctggttacatggcgaaactgatctggaacgcagtgtccgtcaccgtagtcgcagcagttgaggcgatgaactggctgaaaagtgcggcgaaattacttgctgctgaagtgaaggataaaaagacggatacagttctgcgtggccgctgcgcagtacattgggtgactcccgacggcttccctgtgtggcaggaatacaagaagcctattcagacgcgcttgaacctgatgttcctcggtcagttccgcttacagcctaccattaacaccaacaaagatagcgagattgatgcacacaaacaggagtctggtatcgctcctaactttgtacacagccaagacggtaaccaccttcgtatgactgtagtgtgggcacacgagaagtacggaatcgaatcttttgcactgattcacgactccttcggtaccattccggctgacgctgcgaacctgttcaaagcagtgcgcgaaactatggtttcgacatatgagtcttgtgatgtactggctgatttctacgaccagttcgctgaccagttgcacgagtctcaattggacaaaatgccagcacttccggctaaaggtaacttgaacctccgtgacatcttaaaatcggacttcgcgttcgcg

SEQ ID NO: 460 - protein, 890 aa, synthetic construct
  REGION 1..890: note = Variant of RNA polymerase
MHHHHHHMNTINIAKNDFSDIELAAIPFNTLADHYGERLAREQLALEHESYEMGEARFRKMFERQLKAGEVADNAATKPLITTLLPKMIARINDWFEEVKAKRGKRPTAFQFLQEIKPEAVAYITIKTTLACLTSADNTTVQAVASAIGRAIEDEARFGRIRDLEAKHFKKNVEEQLNKRVGHVYKKAFMQVVEADVLSTGLLGGEAWSSWHKEDSIHVGVRCIEMLIESTGMVSLHRQNAGVVGQDSETIELAPEYAEAIATRAGALAGISPMFQPCVVPPKPWTGITGGGYWAAGRKPLQLVRTRSLAALRRYEEVSMPEVIKAVNIAQNTAWRVNKKVLDVANAITQWQHCPVADVPAMDRGEMPARPLDIDTNEIALKAWKKEASAFYRKDKARVSRRLSMEFMLSQANKFANYKAIWFPQNMDWRGRVYAVPMFNPQGNDMTKGLLTFAQEKPIGEDGFYWLKIHGANTAGVDKVPFPQRIKFVEDNHTNIMECAKAPLENTWWAEQDSPFCFLAFCFEYAGVINHGLSYNCSLPLAFDGSCSGLQHFSAMLRDEIGGKAVNLLPSAEVQDIYRIVSDKVNEVLKQDLINGTSTTLETVTDKKTGEITERTKYGTKVMAQWWLEHGVNRGVTKRSVMTLVYGSKEFGFRDQVLSDTIQPAIDNGKGDMFLNPNQAAGYMAKLIWNAVSVTVVAAVEAMNWLKSAAKLLAAEVKDKKTDTVLRGRCAVHWVTPDGFPVWQEYKKPIQTRLNLMFLGQFRLQPTINTNKDSEIDAHKQESGIAPNFVHSQDGNHLRMTVVWAHEKYGIESFALIHDSFGTIPADAANLFKAVRETMVSTYESCDVLADFYDQFADQLHESQLDKMPALPAKGNLNLRDILKSDFAFA

SEQ ID NO: 461 - DNA, 2670 bp, synthetic construct
  misc_feature 1..2670: note = Variant of RNA polymerase
  source 1..2670: mol_type = other DNA
atgcaccatcaccatcaccatatgaacacgattaacattgctaagaacgacttctctgacatcgaactggctgctatcccgttcaacactctggctgaccattacggtgagcgtttagctcgcgaacagttggcccttgagcatgagtcttacgagatgggtgaagcacgcttccgcaagatgtttgagcgtcaacttaaagctggtgaggttgcggataacgctgccactaagcctctcatcactaccctactccctaagatgattgcacgcatcaacgactggtttgaggaagtgaaagctaagcgcggcaagcgcccgacagccttccagttcctgcaagaaatcaagccggaagccgtagcgtacatcaccattaagaccactctggcttgcctaaccagtgcggacaatacaaccgttcaggctgtagcaagcgcaatcggtcgggccattgaggacgaggctcgcttcggtcgtatccgtgaccttgaagctaagcacttcaagaaaaacgttgaggaacaactcaacaagcgcgtagggcacgtctacaagaaagcatttatgcaagttgtcgaggctgacgtgctctctaagggtctactcggtggcgaggcgtggtcttcgtggcataaggaagactctattcatgtaggagtacgctgcatcgagatgctcattgagtcaaccggaatggttagcttacaccgccaaaatgctggcgtagtaggtcaagactctgagactatcgaactcgcacctgaatacgctgaggctatcgcaacccgtgcaggtgcgctggctggcatctctccgatgttccaaccttgcgtagttcctcctaagccgtggactggcattactggtggtggctattgggctgcggggcgcaaacccctgcagttagtacgtactcgcagtctggcggcgcttcgccgctatgaagaagtgtcgatgccggaggtcatcaaagcagtcaacattgcgcagaatacagcatggcgtgttaacaagaaagttctcgacgtagcgaatgcgatcacccaatggcagcactgtccagtcgcggatgtgcctgcgatggatcgtggcgaaatgccagctcgtccgttggacatcgataccaacgagattgcacttaaagcgtggaagaaagaagcttccgcgttctaccgcaaagacaaagcacgcgttagccgtcgtctgtcaatggagtttatgttatctcaggcgaacaagtttgcgaattacaaagcaatctggtttccgcaaaacatggattggcgtgggcgcgtgtacgctgtcccgatgttcaatcctcagggcaacgatatgacgaaaggcctgctgacctttgcgcagaccaaacccattggtgaagacggcttctattggctcaagattcatggcgcaaatacagctggagtggataaagtaccgtttccacaacgcatcaaatttgttgaggataaccatacgaatattatggaatgcgcgaaagcaccgctggaaaacacttggtgggcggaacaggactcgccgttctgttttctggcgttctgctttgagtatgctggcgtcatcaatagtggtctgtcgtacaactgtagcttgcctctggcatttgatggtagttgctccggcatccaacatttctcagcgatgttacgcgacgaaattggcggcaaagctgtgaatctcctcccatctgcggaataccaggatatttatcgtatcgtcagcgacaaagttaacgaggtactgaaacaagatctgattaacggtacctctaccaccttggaaacggtgactgataagaagacaggcgaaattacccaacgcacgaaatacgggaccaaagttatggcacagtggtggttagaacacggtgtgaatcgtggcgtcacgaaacgctcggttatgactttggtgtatgggagcaaagagtttggattccgcgatcaagtgctgagtgacaccattcaaccggcgatcgataacggcaaaggtgacatgtttctgaatccgaatcaggctgctggttacatggcgaaactgatctgggatgcagtgtccgtcaccgtagtcgcagcagttgaggcgatgaactggctgaaaagtgcggcgaaattacttgctgctgaagtgaaggataaaaagacggatacagttctgcgtggccgctgcgcagtacattgggtgactcccgacggcttccctgtgtggcaggaatacaagaagcctattcagacgcgcttgaacctgatgttcctcggtcagttccgcttacagcctaccattaacaccaacaaagatagcgagattgatgcacacaaacaggagtctggtatcgctcctaactttgtacacagccaagacggtaaccaccttcgtatgactgtagtgtgggcacacgagaagtacggaatcgaatcttttgcactgattcacgactccttcggtaccattccggctgacgctgcgaacctgttcaaagcagtgcgcgaaactatggtttcgacatatgagtcttgtgatgtactggctgatttctacgaccagttcgctgaccagttgcacgagtctcaattggacaaaatgccagcacttccggctaaaggtaacttgaacctccgtgacatcttaaaatcggacttcgcgttcgcg

SEQ ID NO: 462 - protein, 890 aa, synthetic construct
  REGION 1..890: note = Variant of RNA polymerase
MHHHHHHMNTINIAKNDFSDIELAAIPFNTLADHYGERLAREQLALEHESYEMGEARFRKMFERQLKAGEVADNAATKPLITTLLPKMIARINDWFEEVKAKRGKRPTAFQFLQEIKPEAVAYITIKTTLACLTSADNTTVQAVASAIGRAIEDEARFGRIRDLEAKHFKKNVEEQLNKRVGHVYKKAFMQVVEADVLSKGLLGGEAWSSWHKEDSIHVGVRCIEMLIESTGMVSLHRQNAGVVGQDSETIELAPEYAEAIATRAGALAGISPMFQPCVVPPKPWTGITGGGYWAAGRKPLQLVRTRSLAALRRYEEVSMPEVIKAVNIAQNTAWRVNKKVLDVANAITQWQHCPVADVPAMDRGEMPARPLDIDTNEIALKAWKKEASAFYRKDKARVSRRLSMEFMLSQANKFANYKAIWFPQNMDWRGRVYAVPMFNPQGNDMTKGLLTFAQTKPIGEDGFYWLKIHGANTAGVDKVPFPQRIKFVEDNHTNIMECAKAPLENTWWAEQDSPFCFLAFCFEYAGVINSGLSYNCSLPLAFDGSCSGIQHFSAMLRDEIGGKAVNLLPSAEYQDIYRIVSDKVNEVLKQDLINGTSTTLETVTDKKTGEITQRTKYGTKVMAQWWLEHGVNRGVTKRSVMTLVYGSKEFGFRDQVLSDTIQPAIDNGKGDMFLNPNQAAGYMAKLIWDAVSVTVVAAVEAMNWLKSAAKLLAAEVKDKKTDTVLRGRCAVHWVTPDGFPVWQEYKKPIQTRLNLMFLGQFRLQPTINTNKDSEIDAHKQESGIAPNFVHSQDGNHLRMTVVWAHEKYGIESFALIHDSFGTIPADAANLFKAVRETMVSTYESCDVLADFYDQFADQLHESQLDKMPALPAKGNLNLRDILKSDFAFA

SEQ ID NO: 463 - DNA, 2670 bp, synthetic construct
  misc_feature 1..2670: note = Variant of RNA polymerase
  source 1..2670: mol_type = other DNA
atgcaccatcaccatcaccatatgaacacgattaacatcgctaagaacgacttctctgacatcgaactggctgctatcccgttcaacactctggctgaccattacggtgagcgtttagctcgcgaacagttggcccttgagcatgagtcttacgagatgggtgaagcacgcttccgcaagatgtttgagcgtcaacttaaagctggtgaggttgcggataacgctgccactaagcctctcatcactaccctactccctaagatgattgcacgcatcaacgactggtttgaggaagtgaaagctaagcgcggcaagcgcccgacagccttccagttcctgcaagaaatcaagccggaagccgtagcgtacatcaccattaagaccactctggcttgcctaaccagtgcggacaatacaaccgttcaggctgtagcaagcgcaatcggtcgggccattgaggacgaggctcgcttcggtcgtatccgtgaccttgaagctaagcacttcaagaaaaacgttgaggaacaactcaacaagcgcgtagggcacgtctacaagaaagcatttatgcaagttgtcgaggctgacatgctctctacgggtctactcggtggcgaggcgtggtcttcgtggcataaggaagactctattcatgtaggagtacgctgcatcgagatgctcattgagtcaaccggaatggttagcttacaccgccaaaatgctggcgtagtaggtcaagactctgagactatcgaactcgcacctgaatacgctgaggctatcgcaacccgtgcaggtgcgctggctggcatctctccgatgttccaaccttgcgtagttcctcctaagccgtggactggcattactggtggtggctattgggctgcggggcgcaaacccctgcagttagtacgtactcgcagtctggcggcgcttcgccgctatgaagaagtgtcgatgccggaggtcatcaaagcagtcaacattgcgcagaatacagcatggcgtgttaacaagaaagttctcgacgtagcgaatacgatcacccaatggcagcactgtccagtcgcggatgtgcctgcgatggatcgtggcgaaatgccagctcgtccgttggacatcgataccaacgagattgcacttaaagcgtggaagaaagaagcttccgcgttctaccgcaaagacaaagcacgcgttagccgtcgtctgtcaatggagtttatgttatctcaggcgaacaagtttgcgaattataaagcaatctggtttccgcaaaacatggattggcgtgggcgcgtgtacgctgtcccgatgttcaatcctcagggcaacgatatgacgaaaggcctgctgacctttgcgcagggtaaacccattggtgaagacggcttctattggctcaagattcatggcgcaaatacagctggagtggataaagtaccgtttccacaacgcatcaaatttgttgaggataaccatacgaatattatggaatgcgcgaaagcaccgctggaaaacacttggtgggcggaacaggactcgccgttctgttttctggcgttctgctttgagtatgctggtgtcatcaatcacggtctgtcgtacaactgtagcttgcctctggcatttgatggtagttgctccggcatccaacatttctcagcgatgttacgcgacgaaattggcggcaaagctgtgaatctcctcccatctgcggaataccaggatatttatcgtatcgtcagcgacaaagttaacgaggtactgaaacaagatctgattaacggtacctctaccaccttggaaacggtgactgataagaagacaggcgaaattaccgaacgcacgaaatacgggaccaaagttatggcacagtggtggttagaacacggtgtgaatcgtggcgtcacgaaacgctcggttatgactttggtgtatgggagcaaagagtttggattccgcgatcaagtgctgagtgacaccattcaaccggcgatcgataacggcaaaggtgacatgtttctgaatccgaatcaggctgctggttacatggcgaaactgatctggaacgcagtgtccgtcaccgtagtcgcagcagttgaggcgatgaactggctgaaaagtgcggcgaaattacttgctgctgaagtgaaggataagaagacggatacagttctgcgtggccgctgcgcagtacattgggtgactcccgacggcttccctgtgtggcaggaatacaagaagcctattcagacgcgcttgaacctgatgttcctcggtcagttccgcttacagcctaccattaacaccaacaaagatagcgagattgatgcacacaaacaggagtctggtatcgctcctaactttgtacacagccaagacggtaaccaccttcgtatgactgtagtgtgggcacacgagaagtacggaatcgaatcttttgcactgattcacgactccttcggtaccattccggctgacgctgcgaacctgttcaaagcagtgcgcgaaactatggtttcgacatatgagtcttgtgatgtactggctgatttctacgaccagttcgctgaccagttgcacgagtctcaattggacaaaatgccagcacttccggctaaaggtaacttgaacctccgtgacatcttaaaatcggacttcgcgttcgcg

SEQ ID NO: 464 - protein, 890 aa, synthetic construct
  REGION 1..890: note = Variant of RNA polymerase
MHHHHHHMNTINIAKNDFSDIELAAIPFNTLADHYGERLAREQLALEHESYEMGEARFRKMFERQLKAGEVADNAATKPLITTLLPKMIARINDWFEEVKAKRGKRPTAFQFLQEIKPEAVAYITIKTTLACLTSADNTTVQAVASAIGRAIEDEARFGRIRDLEAKHFKKNVEEQLNKRVGHVYKKAFMQVVEADMLSTGLLGGEAWSSWHKEDSIHVGVRCIEMLIESTGMVSLHRQNAGVVGQDSETIELAPEYAEAIATRAGALAGISPMFQPCVVPPKPWTGITGGGYWAAGRKPLQLVRTRSLAALRRYEEVSMPEVIKAVNIAQNTAWRVNKKVLDVANTITQWQHCPVADVPAMDRGEMPARPLDIDTNEIALKAWKKEASAFYRKDKARVSRRLSMEFMLSQANKFANYKAIWFPQNMDWRGRVYAVPMFNPQGNDMTKGLLTFAQGKPIGEDGFYWLKIHGANTAGVDKVPFPQRIKFVEDNHTNIMECAKAPLENTWWAEQDSPFCFLAFCFEYAGVINHGLSYNCSLPLAFDGSCSGIQHFSAMLRDEIGGKAVNLLPSAEYQDIYRIVSDKVNEVLKQDLINGTSTTLETVTDKKTGEITERTKYGTKVMAQWWLEHGVNRGVTKRSVMTLVYGSKEFGFRDQVLSDTIQPAIDNGKGDMFLNPNQAAGYMAKLIWNAVSVTVVAAVEAMNWLKSAAKLLAAEVKDKKTDTVLRGRCAVHWVTPDGFPVWQEYKKPIQTRLNLMFLGQFRLQPTINTNKDSEIDAHKQESGIAPNFVHSQDGNHLRMTVVWAHEKYGIESFALIHDSFGTIPADAANLFKAVRETMVSTYESCDVLADFYDQFADQLHESQLDKMPALPAKGNLNLRDILKSDFAFA

SEQ ID NO: 465 - DNA, 2670 bp, synthetic construct
  misc_feature 1..2670: note = Variant of RNA polymerase
  source 1..2670: mol_type = other DNA
atgcaccatcaccatcaccatatgaacacgattaacggtgctaagaacgacttctctgacatcgaactggctgctatcccgttcaacactctggctgaccattacggtgagcgtttagctcgcgaacagttggcccttgagcatgagtcttacgagatgggtgaagcacgcttccgcaagatgtttgagcgtcaacttaaagctggtgaggttgcggataacgctgccgccaagcctctcatcactaccctactccctaagatgattgcacgcatcaacgactggtttgaggaagtgaaagctaagcgcggcaagcgcccgacagccttccagttcctgcaagaaatcaagccggaagccgtagcgtacatcaccattaagaccactctggcttgcctaaccagtgcggacaatacaaccgttcaggctgtagcaagcgcaatcggtcgggccattgaggacgaggctcgcttcggtcgtatccgtgaccttgaagctaagcacttcaagaagaacgttgaggaacaactcaacaagcgcgtagggcacgtctacaagaaagcatttatgcaagttgtcgaggctgacatgctctctacgggtctactcggtggcgaggcgtggtcttcgtggcataaggaagactctattcatgtaggagtacgctgcatcgagatgctcattgagtcaaccggaatggttagcttacaccgccaaaatgctggcgtagtaggtcaagactctgagactatcgaactcgcacctgaatacgctgaggctatcgcaacccgtgcaggtgcgctggctggcatctctccgatgttccaaccttgcgtagttcctcctaagccgtggactggcattactggtggtggctattgggctgcggggcgcaaacccctgcagttagtacgtactcgcagtctggcggcgcttcgccgctatgaagaagtgtcgatgccggaggtcatcaaagcagtcaacattgcgcagaatacagcatggcgtgtgaacaagaaagttctcgacgtagcgaatacgatcacccaatggcagcactgtccagtcgcggatgtgcctgcgatggatcgtggcgaaatgccagctcgtccgttggacatcgataccaacgagattgcacttaaagcgtggaagaaagaagcttccgcgttctaccgcaaagacaaagcacgcgttagccgtcgtctgtcaatggagtttatgttatctcaggcgaacaagtttgcgaattacaaagcaatctggtttccgcaaaacatggattggcgtgggcgcgtgtacgctgtcccgatgttcaatcctcagggcaacgatatgacgaaaggcctgctgacctttgcgcagaccaaacccattggtgaagacggcttctattggctcaagattcatggcgcaaatacagctggagtggataaagtaccgtttccacaacgcatcaaatttgttgaggataaccatacgaatattatggaatgcgcgaaagcaccgctggaaaacacttggtgggcggaacaggactcgccgttctgttttctggcgttctgctttgagtatgctggtgtcatcaatcacggtctgtcgtacaactgtagcttgcctctggcatttgatggtagttgctccggcattcaacatttctcagcgatgttacgcgacgaaattggcggcaaagctgtgaatctcctcccatctgcggaagtgcaggatatttatcgtatcgtcagcgacaaagttaacgaggtactgaaacaagatctgattaacggtacctctaccaccttggaaacggtgactgataagaagacaggcgaaattaccgaacgcacgaaatacgggaccaaagttatggcacagtggtggttagaacacggtgtgaatcgtggcgtcacgaaacgctcggttatgactttggtgtatgggagcaaagagtttggattccgcgatcaagtgctgagtgacaccattcaaccggcgatcgataacggcaaaggtgacatgtttctgaatccgaatcaggctgctggttacatggcgaaactgatctggaatgcagtgtccgtcaccgtagtcgcagcagttgaggcgatgaactggctgaaaagtgcggcgaaattacttgctgctgaagtgaaggatcctaagacggatacagttctgcgtggccgctgcgcagtacattgggtgactcccgacggcttccctgtgtggcaggaatacaagaagcctattcagacgcgcttgaacctgatgttcctcggtcagttccgcttacagcctaccattaacaccaacaaagatagcgagattgatgcacacaaacaggagtctggtatcgctcctaactttgtacacagccaagacggtaaccaccttcgtatgactgtagtgtgggcacacgagaagtacggaatcgaatcttttgcactgattcacgactccttcggtaccattccggctgacgctgcgaacctgttcaaagcagtgcgcgaaactatggtttcgacatatgagtcttgtgatgtactggctgatttctacgaccagttcgctgaccagttgcacgagtctcaattggacaaaatgccagcacttccggctaaaggtaacttgaacctccgtgacatcttaaaatcggacttcgcgttcgcg

SEQ ID NO: 466 - protein, 890 aa, synthetic construct
  REGION 1..890: note = Variant of RNA polymerase
MHHHHHHMNTINGAKNDFSDIELAAIPFNTLADHYGERLAREQLALEHESYEMGEARFRKMFERQLKAGEVADNAAAKPLITTLLPKMIARINDWFEEVKAKRGKRPTAFQFLQEIKPEAVAYITIKTTLACLTSADNTTVQAVASAIGRAIEDEARFGRIRDLEAKHFKKNVEEQLNKRVGHVYKKAFMQVVEADMLSTGLLGGEAWSSWHKEDSIHVGVRCIEMLIESTGMVSLHRQNAGVVGQDSETIELAPEYAEAIATRAGALAGISPMFQPCVVPPKPWTGITGGGYWAAGRKPLQLVRTRSLAALRRYEEVSMPEVIKAVNIAQNTAWRVNKKVLDVANTITQWQHCPVADVPAMDRGEMPARPLDIDTNEIALKAWKKEASAFYRKDKARVSRRLSMEFMLSQANKFANYKAIWFPQNMDWRGRVYAVPMFNPQGNDMTKGLLTFAQTKPIGEDGFYWLKIHGANTAGVDKVPFPQRIKFVEDNHTNIMECAKAPLENTWWAEQDSPFCFLAFCFEYAGVINHGLSYNCSLPLAFDGSCSGIQHFSAMLRDEIGGKAVNLLPSAEVQDIYRIVSDKVNEVLKQDLINGTSTTLETVTDKKTGEITERTKYGTKVMAQWWLEHGVNRGVTKRSVMTLVYGSKEFGFRDQVLSDTIQPAIDNGKGDMFLNPNQAAGYMAKLIWNAVSVTVVAAVEAMNWLKSAAKLLAAEVKDPKTDTVLRGRCAVHWVTPDGFPVWQEYKKPIQTRLNLMFLGQFRLQPTINTNKDSEIDAHKQESGIAPNFVHSQDGNHLRMTVVWAHEKYGIESFALIHDSFGTIPADAANLFKAVRETMVSTYESCDVLADFYDQFADQLHESQLDKMPALPAKGNLNLRDILKSDFAFA

SEQ ID NO: 467 - DNA, 2670 bp, synthetic construct
  misc_feature 1..2670: note = Variant of RNA polymerase
  source 1..2670: mol_type = other DNA
atgcaccatcaccatcaccatatgaacacgattaacggtgctaagaacgacttctctgacatcgaactggctgctatcccgttcaacactctggctgaccattacggtgagcgtttagctcgcgaacagttggcccttgagcatgagtcttacgagatgggtgaagcacgcttccgcaagatgtttgagcgtcaacttaaagctggtgaggttgcggataacgctgccactaagcctctcatcactaccctactccctaagatgattgcacgcatcaacgactggtttgaggaagtgaaagctaagcgcggcaagcgcccgacagccttccagttcctgcaagaaatcaagccggaagccgtagcgtacatcaccattaagaccactctggcttgcctaaccagtgcggacaatacaaccgttcaggctgtagcaagcgcaatcggtcgggccattgaggacgaggctcgcttcggtcgtatccgtgaccttgaagctaagcacttcaagaaaaacgttgaggaacaactcaacaagcgcgtagggcacgtctacaagaaagcatttatgcaagttgtcgaggctgacatgctctctaagggtctactcggtggcgaggcgtggtcttcgtggcataaggaagactctattcatgtaggagtacgctgcatcgagatgctcattgagtcaaccggaatggttagcttacaccgccaaaatgctggcgtagtaggtcaagactctgagactatcgaactcgcacctgaatacgctgaggctatcgcaacccgtgcaggtgcgctggctggcatctctccgatgttccaaccttgcgtagttcctcctaagccgtggactggcattactggtggtggctattgggctgcggggcgcaaacccctgcagttagtacgtactcgcagtctggcggcgcttcgccgctatgaagaagtgtcgatgccggaggtcatcaaagcagtcaacattgcgcagaatacagcatggcgtgtgaacaagaaagttctcgacgtagcgaatgcgatcacccaatggcagcactgtccagtcgcggatgtgcctgcgatggatcgtggcgaaatgccagctcgtccgttggacatcgataccaacgagattgcacttaaagcgtggaagaaagaagcttccgcgttctaccgcaaagacaaagcacgcgttagccgtcgtctgtcaatggagtttatgttatctcaggcgaacaagtttgcgaattacaaagcaatctggtttccgcaaaacatggattggcgtgggcgcgtgtacgctgtcccgatgttcaatcctcagggcaacgatatgacgaaaggcctgctgacctttgcgcagggtaaacccattggtgaagacggcttctattggctcaagattcatggcgcaaatacagctggagtggataaagtaccgtttccacaacgcatcaaatttgttgaggataaccatacgaatattatggaatgcgcgaaagcaccgctggaaaacacttggtgggcggaacaggactcgccgttctgttttctggcgttctgctttgagtatgctggcgtcatcaatagtggtctgtcgtacaactgtagcttgcctctggcatttgatggtagttgctccggcatccaacatttctcagcgatgttacgcgacgaaattggcggcaaagctgtgaatctcctcccatctgcggaacctcaggatatttatcgtatcgtcagcgacaaagttaacgaggtactgaaacaagatctgattaacggtacctctaccaccttggaaacggtgactgataagaagacaggcgaaattaccgaacgcacgaaatacgggaccaaagttatggcacagtggtggttagaacacggtgtgaatcgtggcgtcacgaaacgctcggttatgactttggtgtatgggagcaaagagtttggattccgcgatcaagtgctgagtgacaccattcaaccggcgatcgataacggcaaaggtgacatgtttctgaatccgaatcaggctgctggttacatggcgaaactgatctggaatgcagtgtccgtcaccgtagtcgcagcagttgaggcgatgaactggctgaaaagtgcggcgaaattacttgctgctgaagtgaaggatcctaagacggatacagttctgcgtggccgctgcgcagtacattgggtgactcccgacggcttccctgtgtggcaggaatacaagaagcctattcagacgcgcttgaacctgatgttcctcggtcagttccgcttacagcctaccattaacaccaacaaagatagcgagattgatgcacacaaacaggagtctggtatcgctcctaactttgtacacagccaagacggtaaccaccttcgtatgactgtagtgtgggcacacgagaagtacggaatcgaatcttttgcactgattcacgactccttcggtaccattccggctgacgctgcgaacctgttcaaagcagtgcgcgaaactatggtttcgacatatgagtcttgtgatgtactggctgatttctacgaccagttcgctgaccagttgcacgagtctcaattggacaaaatgccagcacttccggctaaaggtaacttgaacctccgtgacatcttaaaatcggacttcgcgttcgcg

SEQ ID NO: 468 - protein, 890 aa, synthetic construct
  REGION 1..890: note = Variant of RNA polymerase
MHHHHHHMNTINGAKNDFSDIELAAIPFNTLADHYGERLAREQLALEHESYEMGEARFRKMFERQLKAGEVADNAATKPLITTLLPKMIARINDWFEEVKAKRGKRPTAFQFLQEIKPEAVAYITIKTTLACLTSADNTTVQAVASAIGRAIEDEARFGRIRDLEAKHFKKNVEEQLNKRVGHVYKKAFMQVVEADMLSKGLLGGEAWSSWHKEDSIHVGVRCIEMLIESTGMVSLHRQNAGVVGQDSETIELAPEYAEAIATRAGALAGISPMFQPCVVPPKPWTGITGGGYWAAGRKPLQLVRTRSLAALRRYEEVSMPEVIKAVNIAQNTAWRVNKKVLDVANAITQWQHCPVADVPAMDRGEMPARPLDIDTNEIALKAWKKEASAFYRKDKARVSRRLSMEFMLSQANKFANYKAIWFPQNMDWRGRVYAVPMFNPQGNDMTKGLLTFAQGKPIGEDGFYWLKIHGANTAGVDKVPFPQRIKFVEDNHTNIMECAKAPLENTWWAEQDSPFCFLAFCFEYAGVINSGLSYNCSLPLAFDGSCSGIQHFSAMLRDEIGGKAVNLLPSAEPQDIYRIVSDKVNEVLKQDLINGTSTTLETVTDKKTGEITERTKYGTKVMAQWWLEHGVNRGVTKRSVMTLVYGSKEFGFRDQVLSDTIQPAIDNGKGDMFLNPNQAAGYMAKLIWNAVSVTVVAAVEAMNWLKSAAKLLAAEVKDPKTDTVLRGRCAVHWVTPDGFPVWQEYKKPIQTRLNLMFLGQFRLQPTINTNKDSEIDAHKQESGIAPNFVHSQDGNHLRMTVVWAHEKYGIESFALIHDSFGTIPADAANLFKAVRETMVSTYESCDVLADFYDQFADQLHESQLDKMPALPAKGNLNLRDILKSDFAFA

SEQ ID NO: 469 - DNA, 2670 bp, synthetic construct
  misc_feature 1..2670: note = Variant of RNA polymerase
  source 1..2670: mol_type = other DNA
atgcaccatcaccatcaccatatgaacacgattaacatcgctaagaacgacttctctgacatcgaactggctgctatcccgttcaacactctggctgaccattacggtgagcgtttagctcgcgaacagttggcccttgagcatgagtcttacgagatgggtgaagcacgcttccgcaagatgtttgagcgtcaacttaaagctggtgaggttgcggataacgctgccgccaagcctctcatcactaccctactccctaagatgattgcacgcatcaacgactggtttgaggaagtgaaagctaagcgcggcaagcgcccgacagccttccagttcctgcaagaaatcaagccggaagccgtagcgtacatcaccattaagaccactctggcttgcctaaccagtgcggacaatacaaccgttcaggctgtagcaagcgcaatcggtcgggccattgaggacgaggctcgcttcggtcgtatccgtgaccttgaagctaagcacttcaagaaaaacgttgaggaacaactcaacaagcgcgtagggcacgtctacaagaaagcatttatgcaagttgtcgaggctgacatgctctctaagggtctactcggtggcgaggcgtggtcttcgtggcataaggaagactctattcatgtaggagtacgctgcatcgagatgctcattgagtcaaccggaatggttagcttacaccgccaaaatgctggcgtagtaggtcaagactctgagactatcgaactcgcacctgaatacgctgaggctatcgcaacccgtgcaggtgcgctggctggcatctctccgatgttccaaccttgcgtagttcctcctaagccgtggactggcattactggtggtggctattgggctgcggggcgcaaacccctgcagttagtacgtactcgcagtctggcggcgcttcgccgctatgaagaagtgtcgatgccggaggtcatcaaagcagtcaacattgcgcagaatacagcatggcgtgtgaacaagaaagttctcgacgtagcgaatgcaatcacccaatggcagcactgtccagtcgcggatgtgcctgcgatggatcgtggcgaaatgccagctcgtccgttggacatcgataccaacgagattgcacttaaagcgtggaagaaagaagcttccgcgttctaccgcaaagacaaagcacgcgttagccgtcgtctgtcaatggagtttatgttatctcaggcgaacaagtttgcgaattataaagcaatctggtttccgcaaaacatggattggcgtgggcgcgtgtacgctgtcccgatgttcaatcctcagggcaacgatatgacgaaaggcctgctgacctttgcgcaggggaaacccattggtgaagacggcttctattggctcaagattcatggcgcaaatacagctggagtggataaagtaccgtttccacaacgcatcaaatttgttgaggataaccatacgaatattatggaatgcgcgaaagcaccgctggaaaacacttggtgggcggaacaggactcgccgttctgttttctggcgttctgctttgagtatgctggcgttatcaatcacggtctgtcgtacaactgtagcttgcctctggcatttgatggtagttgctccggcattcaacatttctcagcgatgttacgcgacgaaattggcggcaaagctgtgaatctcctcccatctgcggaagtgcaggatatttatcgtatcgtcagcgacaaagttaacgaggtactgaaacaagatctgattaacggtacctctaccaccgtggaaacggtgactgataagaagacaggcgaaattacccaacgcacgaaatacgggaccaaagttatggcacagtggtggttagaacacggtgtgaatcgtggcgtcacgaaacgctcggttatgactttggtgtatgggagcaaagagtttggattccgcgatcaagtgctgagtgacaccattcaaccggcgatcgataacggcaaaggtgacatgtttctgaatccgaatcaggctgctggttacatggcgaaactgatctggaacgcagtgtccgggaccgtagtcgcagcagttgaggcgatgaactggctgaaaagtgcggcgaaattacttgctgctgaagtgaaggataagaagacggatacagttctgcgtggccgctgcgcagtacattgggtgactcccgacggcttccctgtgtggcaggaatacaagaagcctattcagacgcgcttgaacctgatgttcctcggtcagttccgcttacagcctaccattaacaccaacaaagatagcgagattgatgcacacaaacaggagtctggtatcgctcctaactttgtacacagccaagacggtaaccaccttcgtatgactgtagtgtgggcacacgagaagtacggaatcgaatcttttgcactgattcacgactccttcggtaccattccggctgacgctgcgaacctgttcaaagcagtgcgcgaaactatggtttcgacatatgagtcttgtgatgtactggctgatttctacgaccagttcgctgaccagttgcacgagtctcaattggacaaaatgccagcacttccggctaaaggtaacttgaacctccgtgacatcttaaaatcggacttcgcgttcgcg

SEQ ID NO: 470 - protein, 890 aa, synthetic construct
  REGION 1..890: note = Variant of RNA polymerase
MHHHHHHMNTINIAKNDFSDIELAAIPFNTLADHYGERLAREQLALEHESYEMGEARFRKMFERQLKAGEVADNAAAKPLITTLLPKMIARINDWFEEVKAKRGKRPTAFQFLQEIKPEAVAYITIKTTLACLTSADNTTVQAVASAIGRAIEDEARFGRIRDLEAKHFKKNVEEQLNKRVGHVYKKAFMQVVEADMLSKGLLGGEAWSSWHKEDSIHVGVRCIEMLIESTGMVSLHRQNAGVVGQDSETIELAPEYAEAIATRAGALAGISPMFQPCVVPPKPWTGITGGGYWAAGRKPLQLVRTRSLAALRRYEEVSMPEVIKAVNIAQNTAWRVNKKVLDVANAITQWQHCPVADVPAMDRGEMPARPLDIDTNEIALKAWKKEASAFYRKDKARVSRRLSMEFMLSQANKFANYKAIWFPQNMDWRGRVYAVPMFNPQGNDMTKGLLTFAQGKPIGEDGFYWLKIHGANTAGVDKVPFPQRIKFVEDNHTNIMECAKAPLENTWWAEQDSPFCFLAFCFEYAGVINHGLSYNCSLPLAFDGSCSGIQHFSAMLRDEIGGKAVNLLPSAEVQDIYRIVSDKVNEVLKQDLINGTSTTVETVTDKKTGEITQRTKYGTKVMAQWWLEHGVNRGVTKRSVMTLVYGSKEFGFRDQVLSDTIQPAIDNGKGDMFLNPNQAAGYMAKLIWNAVSGTVVAAVEAMNWLKSAAKLLAAEVKDKKTDTVLRGRCAVHWVTPDGFPVWQEYKKPIQTRLNLMFLGQFRLQPTINTNKDSEIDAHKQESGIAPNFVHSQDGNHLRMTVVWAHEKYGIESFALIHDSFGTIPADAANLFKAVRETMVSTYESCDVLADFYDQFADQLHESQLDKMPALPAKGNLNLRDILKSDFAFA

SEQ ID NO: 471 - DNA, 2670 bp, synthetic construct
  misc_feature 1..2670: note = Variant of RNA polymerase
  source 1..2670: mol_type = other DNA
atgcaccatcaccatcaccatatgaacacgattaacggtgctaagaacgacttctctgacatcgaactggctgctatcccgttcaacactctggctgaccattacggtgagcgtttagctcgcgaacagttggcccttgagcatgagtcttacgagatgggtgaagcacgcttccgcaagatgtttgagcgtcaacttaaagctggtgaggttgcggataacgctgccgccaagcctctcatcactaccctactccctaagatgattgcacgcatcaacgactggtttgaggaagtgaaagctaagcgcggcaagcgcccgacagccttccagttcctgcaagaaatcaagccggaagccgtagcgtacatcaccattaagaccactctggcttgcctaaccagtgcggacaatacaaccgttcaggctgtagcaagcgcaatcggtcgggccattgaggacgaggctcgcttcggtcgtatccgtgaccttgaagctaagcacttcaagaaaaacgttgaggaacaactcaacaagcgcgtagggcacgtctacaagaaagcatttatgcaagttgtcgaggctgacatgctctctaagggtctactcggtggcgaggcgtggtcttcgtggcataaggaagactctattcatgtaggagtacgctgcatcgagatgctcattgagtcaaccggaatggttagcttacaccgccaaaatgctggcgtagtaggtcaagactctgagactatcgaactcgcacctgaatacgctgaggctatcgcaacccgtgcaggtgcgctggctggcatctctccgatgttccaaccttgcgtagttcctcctaagccgtggactggcattactggtggtggctattgggctgcggggcgcaaacccctgcagttagtacgtactcgcagtctggcggcgcttcgccgctatgaagaagtgtcgatgccggaggtcatcaaagcagtcaacattgcgcagaatacagcatggcgtgtgaacaagaaagttctcgacgtagcgaatgcgatcacccaatggcagcactgtccagtcgcggatgtgcctgcgatggatcgtggcgaaatgccagctcgtccgttggacatcgataccaacgagattgcacttaaagcgtggaagaaagaagcttccgcgttctaccgcaaagacaaagcacgcgttagccgtcgtctgtcaatggagtttatgttatctcaggcgaacaagtttgcgaatgaaaaagcaatctggtttccgcaaaacatggattggcgtgggcgcgtgtacgctgtcccgatgttcaatcctcagggcaacgatatgacgaaaggcctgctgacctttgcgcagaccaaacccattggtgaagacggcttctattggctcaagattcatggcgcaaatacagctggagtggataaagtaccgtttccacaacgcatcaaatttgttgaggataaccatacgaatattatggaatgcgcgaaagcaccgctggaaaacacttggtgggcggaacaggactcgccgttctgttttctggcgttctgctttgagtatgctggcgtcatcaatcacggtctgtcgtacaactgtagcttgcctctggcatttgatggtagttgctccggcattcaacatttctcagcgatgttacgcgacgaaattggcggcaaagctgtgaatctcctcccatctgcggaagtgcaggatatttatcgtatcgtcagcgacaaagttaacgaggtactgaaacaagatctgattaacggtacctctaccaccttggaaacggtgactgataagaagacaggcgaaattaccgaacgcacgaaatacgggaccaaagttatggcacagtggtggttagaacacggtgtgaatcgtggcgtcacgaaacgctcggttatgactttggtgtatgggagcaaagagtttggattccgcgatcaagtgctgagtgacaccattcaaccggcgatcgataacggcaaaggtgacatgtttctgaatccgaatcaggctgctggttacatggcgaaactgatctggaacgcagtgtccgggaccgtagtcgcagcagttgaggcgatgaactggctgaaaagtgcggcgaaattacttgctgctgaagtgaaggatcctaagacggatacagttctgcgtggccgctgcgcagtacattgggtgactcccgacggcttccctgtgtggcaggaatacaagaagcctattcagacgcgcttgaacctgatgttcctcggtcagttccgcttacagcctaccattaacaccaacaaagatagcgagattgatgcacacaaacaggagtctggtatcgctcctaactttgtacacagccaagacggtaaccaccttcgtatgactgtagtgtgggcacacgagaagtacggaatcgaatcttttgcactgattcacgactccttcggtaccattccggctgacgctgcgaacctgttcaaagcagtgcgcgaaactatggtttcgacatatgagtcttgtgatgtactggctgatttctacgaccagttcgctgaccagttgcacgagtctcaattggacaaaatgccagcacttccggctaaaggtaacttgaacctccgtgacatcttaaaatcggacttcgcgttcgcg

SEQ ID NO: 472 - protein, 890 aa, synthetic construct
  REGION 1..890: note = Variant of RNA polymerase
MHHHHHHMNTINGAKNDFSDIELAAIPFNTLADHYGERLAREQLALEHESYEMGEARFRKMFERQLKAGEVADNAAAKPLITTLLPKMIARINDWFEEVKAKRGKRPTAFQFLQEIKPEAVAYITIKTTLACLTSADNTTVQAVASAIGRAIEDEARFGRIRDLEAKHFKKNVEEQLNKRVGHVYKKAFMQVVEADMLSKGLLGGEAWSSWHKEDSIHVGVRCIEMLIESTGMVSLHRQNAGVVGQDSETIELAPEYAEAIATRAGALAGISPMFQPCVVPPKPWTGITGGGYWAAGRKPLQLVRTRSLAALRRYEEVSMPEVIKAVNIAQNTAWRVNKKVLDVANAITQWQHCPVADVPAMDRGEMPARPLDIDTNEIALKAWKKEASAFYRKDKARVSRRLSMEFMLSQANKFANEKAIWFPQNMDWRGRVYAVPMFNPQGNDMTKGLLTFAQTKPIGEDGFYWLKIHGANTAGVDKVPFPQRIKFVEDNHTNIMECAKAPLENTWWAEQDSPFCFLAFCFEYAGVINHGLSYNCSLPLAFDGSCSGIQHFSAMLRDEIGGKAVNLLPSAEVQDIYRIVSDKVNEVLKQDLINGTSTTLETVTDKKTGEITERTKYGTKVMAQWWLEHGVNRGVTKRSVMTLVYGSKEFGFRDQVLSDTIQPAIDNGKGDMFLNPNQAAGYMAKLIWNAVSGTVVAAVEAMNWLKSAAKLLAAEVKDPKTDTVLRGRCAVHWVTPDGFPVWQEYKKPIQTRLNLMFLGQFRLQPTINTNKDSEIDAHKQESGIAPNFVHSQDGNHLRMTVVWAHEKYGIESFALIHDSFGTIPADAANLFKAVRETMVSTYESCDVLADFYDQFADQLHESQLDKMPALPAKGNLNLRDILKSDFAFA

SEQ ID NO: 473 - DNA, 2670 bp, synthetic construct
  misc_feature 1..2670: note = Variant of RNA polymerase
  source 1..2670: mol_type = other DNA
atgcaccatcaccatcaccatatgaacacgattaacatcgctgagaacgacttctctgacatcgaactggctgctatcccgttcaacactctggctgaccattacggtgagcgtttagctcgcgaacagttggcccttgagcatgagtcttacgagatgggtgaagcacgcttccgcaagatgtttgagcgtcaacttaaagctggtgaggttgcggataacgctgccactaagcctctcatcactaccctactccctaagatgattgcacgcatcaacgactggtttgaggaagtgaaagctaagcgcggcaagcgcccgacagccttccagttcctgcaagaaatcaagccggaagccgtagcgtacatcaccattaagaccactctggcttgcctaaccagtgcggacaatacaaccgttcaggctgtagcaagcgcaatcggtcgggccattgaggacgaggctcgcttcggtcgtatccgtgaccttgaagctaagcacttcaagaaaaacgttgaggaacaactcaacaagcgcgtagggcacgtctacaagaaagcatttatgcaagttgtcgaggctgacatgctctctacgggtctactcggtggcgaggcgtggtcttcgtggcataaggaagactctattcatgtaggagtacgctgcatcgagatgctcattgagtcaaccggaatggttagcttacaccgccaaaatgctggcgtagtaggtcaagactctgagactatcgaactcgcacctgaatacgctgaggctatcgcaacccgtgcaggtgcgctggctggcatctctccgatgttccaaccttgcgtagttcctcctaagccgtggactggcattactggtggtggctattgggctgcggggcgcaaacccctgcagttagtacgtactcgcagtctggcggcgcttcgccgctatgaagaagtgtcgatgccggaggtcatcaaagcagtcaacattgcgcagaatacagcatggcgtattaacaagaaagttctcgacgtagcgaatgcaatcacccaatggcagcactgtccagtcgcggatgtgcctgcgatggatcgtggcgaaatgccagctcgtccgttggacatcgataccaacgagattgcacttaaagcgtggaagaaagaagcttccgcgttctaccgcaaagacaaagcacgcgttagccgtcgtctgtcaatggagtttatgttatctcaggcgaacaagtttgcgaattacaaagcaatctggtttccgcaaaacatggattggcgtgggcgcgtgtacgctgtcccgatgttcaatcctcagggcaacgatatgacgaaaggcctgctgacctttgcgcaggagaaacccattggtgaagacggcttctattggctcaagattcatggcgcaaatacagctggagtggataaagtaccgtttccacaacgcatcaaatttgttgaggataaccatacgaatattatggaatgcgcgaaagcaccgctggaaaacacttggtgggcggaacaggactcgccgttctgttttctggcgttctgctttgagtatgctggcgttatcaatcacggtctgtcgtacaactgtagcttgcctctggcatttgatggtagttgctccggcctgcaacatttctcagcgatgttacgcgacgaaattggcggcaaagctgtgaatctcctcccatctgcggaataccaggatatttatcgtatcgtctcggacaaagttaacgaggtactgaaacaagatctgattaacggtacctctaccaccgtggaaacggtgactgataagaagacaggcgaaattacccaacgcacgaaatacgggaccaaagttatggcacagtggtggttagaacacggtgtgaatcgtggcgtcacgaaacgctcggttatgactttggtgtatgggagcaaagagtttggattccgcgatcaagtgctgagtgacaccattcaaccggcgatcgataacggcaaaggtgacatgtttctgaatccgaatcaggctgctggttacatggcgaaactgatctgggatgcagtgtccgtcaccgtagtcgcagcagttgaggcgatgaactggctgaaaagtgcggcgaaattacttgctgctgaagtgaaggatcctaagacggatacagttctgcgtggccgctgcgcagtacattgggtgactcccgacggcttccctgtgtggcaggaatacaagaagcctattcagacgcgcttgaacctgatgttcctcggtcagttccgcttacagcctaccattaacaccaacaaagatagcgagattgatgcacacaaacaggagtctggtatcgctcctaactttgtacacagccaagacggtaaccaccttcgtatgactgtagtgtgggcacacgagaagtacggaatcgaatcttttgcactgattcacgactccttcggtaccattccggctgacgctgcgaacctgttcaaagcagtgcgcgaaactatggtttcgacatatgagtcttgtgatgtactggctgatttctacgaccagttcgctgaccagttgcacgagtctcaattggacaaaatgccagcacttccggctaaaggtaacttgaacctccgtgacatcttaaaatcggacttcgcgttcgcg

SEQ ID NO: 474 - protein, 890 aa, synthetic construct
  REGION 1..890: note = Variant of RNA polymerase
MHHHHHHMNTINIAENDFSDIELAAIPFNTLADHYGERLAREQLALEHESYEMGEARFRKMFERQLKAGEVADNAATKPLITTLLPKMIARINDWFEEVKAKRGKRPTAFQFLQEIKPEAVAYITIKTTLACLTSADNTTVQAVASAIGRAIEDEARFGRIRDLEAKHFKKNVEEQLNKRVGHVYKKAFMQVVEADMLSTGLLGGEAWSSWHKEDSIHVGVRCIEMLIESTGMVSLHRQNAGVVGQDSETIELAPEYAEAIATRAGALAGISPMFQPCVVPPKPWTGITGGGYWAAGRKPLQLVRTRSLAALRRYEEVSMPEVIKAVNIAQNTAWRINKKVLDVANAITQWQHCPVADVPAMDRGEMPARPLDIDTNEIALKAWKKEASAFYRKDKARVSRRLSMEFMLSQANKFANYKAIWFPQNMDWRGRVYAVPMFNPQGNDMTKGLLTFAQEKPIGEDGFYWLKIHGANTAGVDKVPFPQRIKFVEDNHTNIMECAKAPLENTWWAEQDSPFCFLAFCFEYAGVINHGLSYNCSLPLAFDGSCSGLQHFSAMLRDEIGGKAVNLLPSAEYQDIYRIVSDKVNEVLKQDLINGTSTTVETVTDKKTGEITQRTKYGTKVMAQWWLEHGVNRGVTKRSVMTLVYGSKEFGFRDQVLSDTIQPAIDNGKGDMFLNPNQAAGYMAKLIWDAVSVTVVAAVEAMNWLKSAAKLLAAEVKDPKTDTVLRGRCAVHWVTPDGFPVWQEYKKPIQTRLNLMFLGQFRLQPTINTNKDSEIDAHKQESGIAPNFVHSQDGNHLRMTVVWAHEKYGIESFALIHDSFGTIPADAANLFKAVRETMVSTYESCDVLADFYDQFADQLHESQLDKMPALPAKGNLNLRDILKSDFAFA

SEQ ID NO: 475 - DNA, 2670 bp, synthetic construct
  misc_feature 1..2670: note = Variant of RNA polymerase
  source 1..2670: mol_type = other DNA
atgcaccatcaccatcaccatatgaacacgattaacggtgctaagaacgacttctctgacatcgaactggctgctatcccgttcaacactctggctgaccattacggtgagcgtttagctcgcgaacagttggcccttgagcatgagtcttacgagatgggtgaagcacgcttccgcaagatgtttgagcgtcaacttaaagctggtgaggttgcggataacgctgccgccaagcctctcatcactaccctactccctaagatgattgcacgcatcaacgactggtttgaggaagtgaaagctaagcgcggcaagcgcccgacagccttccagttcctgcaagaaatcaagccggaagccgtagcgtacatcaccattaagaccactctggcttgcctaaccagtgcggacaatacaaccgttcaggctgtagcaagcgcaatcggtcgggccattgaggacgaggctcgcttcggtcgtatccgtgaccttgaagctaagcacttcaagaaaaacgttgaggaacaactcaacaagcgcgtagggcacgtctacaagaaagcatttatgcaagttgtcgaggctgacatgctctctaagggtctactcggtggcgaggcgtggtcttcgtggcataaggaagactctattcatgtaggagtacgctgcatcgagatgctcattgagtcaaccggaatggttagcttacaccgccaaaatgctggcgtagtaggtcaagactctgagactatcgaactcgcacctgaatacgctgaggctatcgcaacccgtgcaggtgcgctggctggcatctctccgatgttccaaccttgcgtagttcctcctaagccgtggactggcattactggtggtggctattgggctgcggggcgcaaacccctgcagttagtacgtactcgcagtctggcggcgcttcgccgctatgaagaagtgtcgatgccggaggtcatcaaagcagtcaacattgcgcagaatacagcatggcgtgtgaacaagaaagttctcgacgtagcgaatgcgatcacccaatggcagcactgtccagtcgcggatgtgcctgcgatggatcgtggcgaaatgccagctcgtccgttggacatcgataccaacgagattgcacttaaagcgtggaagaaagaagcttccgcgttctaccgcaaagacaaagcacgcgttagccgtcgtctgtcaatggagtttatgttatctcaggcgaacaagtttgcgaattacaaagcaatctggtttccgcaaaacatggattggcgtgggcgcgtgtacgctgtcccgatgttcaatcctcagggcaacgatatgacgaaaggcctgctgacctttgcgcagggtaaacccattggtgaagacggcttctattggctcaagattcatggcgcaaatacagctggagtggataaagtaccgtttccacaacgcatcaaatttgttgaggataaccatacgaatattatggaatgcgcgaaagcaccgctggaaaacacttggtgggcggaacaggactcgccgttctgttttctggcgttctgctttgagtatgctggcgtcatcaatcacggtctgtcgtacaactgtagcttgcctctggcatttgatggtagttgctccggcctgcaacatttctcagcgatgttacgcgacgaaattggcggcaaagctgtgaatctcctcccatctgcggaagtacaggatatttatcgtatcgtcagcgacaaagttaacgaggtactgaaacaagatctgattaacggtacctctaccaccttggaaacggtgactgataagaagacaggcgaaattaccgaacgcacgaaatacgggaccaaagttatggcacagtggtggttagaacacggtgtgaatcgtggcgtcacgaaacgctcggttatgactttggtgtatgggagcaaagagtttggattccgcgatcaagtgctgagtgacaccattcaaccggcgatcgataacggcaaaggtgacatgtttctgaatccgaatcaggctgctggttacatggcgaaactgatctgggatgcagtgtccgtcaccgtagtcgcagcagttgaggcgatgaactggctgaaaagtgcggcgaaattacttgctgctgaagtgaaggataagaagacggatacagttctgcgtggccgctgcgcagtacattgggtgactcccgacggcttccctgtgtggcaggaatacaagaagcctattcagacgcgcttgaacctgatgttcctcggtcagttccgcttacagcctaccattaacaccaacaaagatagcgagattgatgcacacaaacaggagtctggtatcgctcctaactttgtacacagccaagacggtaaccaccttcgtatgactgtagtgtgggcacacgagaagtacggaatcgaatcttttgcactgattcacgactccttcggtaccattccggctgacgctgcgaacctgttcaaagcagtgcgcgaaactatggtttcgacatatgagtcttgtgatgtactggctgatttctacgaccagttcgctgaccagttgcacgagtctcaattggacaaaatgccagcacttccggctaaaggtaacttgaacctccgtgacatcttaaaatcggacttcgcgttcgcg

SEQ ID NO: 476 - protein, 890 aa, synthetic construct
  REGION 1..890: note = Variant of RNA polymerase
MHHHHHHMNTINGAKNDFSDIELAAIPFNTLADHYGERLAREQLALEHESYEMGEARFRKMFERQLKAGEVADNAAAKPLITTLLPKMIARINDWFEEVKAKRGKRPTAFQFLQEIKPEAVAYITIKTTLACLTSADNTTVQAVASAIGRAIEDEARFGRIRDLEAKHFKKNVEEQLNKRVGHVYKKAFMQVVEADMLSKGLLGGEAWSSWHKEDSIHVGVRCIEMLIESTGMVSLHRQNAGVVGQDSETIELAPEYAEAIATRAGALAGISPMFQPCVVPPKPWTGITGGGYWAAGRKPLQLVRTRSLAALRRYEEVSMPEVIKAVNIAQNTAWRVNKKVLDVANAITQWQHCPVADVPAMDRGEMPARPLDIDTNEIALKAWKKEASAFYRKDKARVSRRLSMEFMLSQANKFANYKAIWFPQNMDWRGRVYAVPMFNPQGNDMTKGLLTFAQGKPIGEDGFYWLKIHGANTAGVDKVPFPQRIKFVEDNHTNIMECAKAPLENTWWAEQDSPFCFLAFCFEYAGVINHGLSYNCSLPLAFDGSCSGLQHFSAMLRDEIGGKAVNLLPSAEVQDIYRIVSDKVNEVLKQDLINGTSTTLETVTDKKTGEITERTKYGTKVMAQWWLEHGVNRGVTKRSVMTLVYGSKEFGFRDQVLSDTIQPAIDNGKGDMFLNPNQAAGYMAKLIWDAVSVTVVAAVEAMNWLKSAAKLLAAEVKDKKTDTVLRGRCAVHWVTPDGFPVWQEYKKPIQTRLNLMFLGQFRLQPTINTNKDSEIDAHKQESGIAPNFVHSQDGNHLRMTVVWAHEKYGIESFALIHDSFGTIPADAANLFKAVRETMVSTYESCDVLADFYDQFADQLHESQLDKMPALPAKGNLNLRDILKSDFAFA

SEQ ID NO: 477 - DNA, 2670 bp, synthetic construct
  misc_feature 1..2670: note = Variant of RNA polymerase
  source 1..2670: mol_type = other DNA
atgcaccatcaccatcaccatatgaacacgattaacatcgctaagaacgacttctctgacatcgaactggctgctatcccgttcaacactctggctgaccattacggtgagcgtttagctcgcgaacagttggcccttgagcatgagtcttacgagatgggtgaagcacgcttccgcaagatgtttgagcgtcaacttaaagctggtgaggttgcggataacgctgccactaagcctctcatcactaccctactccctaagatgattgcacgcatcaacgactggtttgaggaagtgaaagctaagcgcggcaagcgcccgacagccttccagttcctgcaagaaatcaagccggaagccgtagcgtacatcaccattaagaccactctggcttgcctaaccagtgcggacaatacaaccgttcaggctgtagcaagcgcaatcggtcgggccattgaggacgaggctcgcttcggtcgtatccgtgaccttgaagctaagcacttcaagaaaaacgttgaggaacaactcaacaagcgcgtagggcacgtctacaagaaagcatttatgcaagttgtcgaggctgacatgctctctaagggtctactcggtggcgaggcgtggtcttcgtggcataaggaagactctattcatgtaggagtacgctgcatcgagatgctcattgagtcaaccggaatggttagcttacaccgccaaaatgctggcgtagtaggtcaagactctgagactatcgaactcgcacctgaatacgctgaggctatcgcaacccgtgcaggtgcgctggctggcatctctccgatgttccaaccttgcgtagttcctcctaagccgtggactggcattactggtggtggctattgggctgcggggcgcaaacccctgcagttagtacgtactcgcagtctggcggcgcttcgccgctatgaagaagtgtcgatgccggaggtcatcaaagcagtcaacattgcgcagaatacagcatggcgtgtgaacaagaaagttctcgacgtagcgaatgcgatcacccaatggcagcactgtccagtcgcggatgtgcctgcgatggatcgtggcgaaatgccagctcgtccgttggacatcgataccaacgagattgcacttaaagcgtggaagaaagaagcttccgcgttctaccgcaaagacaaagcacgcgttagccgtcgtctgtcaatggagtttatgttatctcaggcgaacaagtttgcgaattacaaagcaatctggtttccgcaaaacatggattggcgtgggcgcgtgtacgctgtcccgatgttcaatcctcagggcaacgatatgacgaaaggcctgctgacctttgcgcagaccaaacccattggtgaagacggcttctattggctcaagattcatggcgcaaatacagctggagtggataaagtaccgtttccacaacgcatcaaatttgttgaggataaccatacgaatattatggaatgcgcgaaagcaccgctggaaaacacttggtgggcggaacaggactcgccgttctgttttctggcgttctgctttgagtatgctggcgtcatcaatcacggtctgtcgtacaactgtagcttgcctctggcatttgatggtagttgctccggcctgcaacatttctcagcgatgttacgcgacgaaattggcggcaaagctgtgaatctcctcccatctgcggaagtgcaggatatttatcgtatcgtcagcgacaaagttaacgaggtactgaaacaagatctgattaacggtacctctaccaccttggaaacggtgactgataagaagacaggcgaaattaccgaacgcacgaaatacgggaccaaagttatggcacagtggtggttagaacacggtgtgaatcgtggcgtcacgaaacgctcggttatgactttggtgtatgggagcaaagagtttggattccgcgatcaagtgctgagtgacaccattcaaccggcgatcgataacggcaaaggtgacatgtttctgaatccgaatcaggctgctggttacatggcgaaactgatctggaacgcagtgtccgtcaccgtagtcgcagcagttgaggcgatgaactggctgaaaagtgcggcgaaattacttgctgctgaagtgaaggataagaagacggatacagttctgcgtggccgctgcgcagtacattgggtgactcccgacggcttccctgtgtggcaggaatacaagaagcctattcagacgcgcttgaacctgatgttcctcggtcagttccgcttacagcctaccattaacaccaacaaagatagcgagattgatgcacacaaacaggagtctggtatcgctcctaactttgtacacagccaagacggtaaccaccttcgtatgactgtagtgtgggcacacgagaagtacggaatcgaatcttttgcactgattcacgactccttcggtaccattccggctgacgctgcgaacctgttcaaagcagtgcgcgaaactatggtttcgacatatgagtcttgtgatgtactggctgatttctacgaccagttcgctgaccagttgcacgagtctcaattggacaaaatgccagcacttccggctaaaggtaacttgaacctccgtgacatcttaaaatcggacttcgcgttcgcg

SEQ ID NO: 478 - protein, 890 aa, synthetic construct
  REGION 1..890: note = Variant of RNA polymerase
MHHHHHHMNTINIAKNDFSDIELAAIPFNTLADHYGERLAREQLALEHESYEMGEARFRKMFERQLKAGEVADNAATKPLITTLLPKMIARINDWFEEVKAKRGKRPTAFQFLQEIKPEAVAYITIKTTLACLTSADNTTVQAVASAIGRAIEDEARFGRIRDLEAKHFKKNVEEQLNKRVGHVYKKAFMQVVEADMLSKGLLGGEAWSSWHKEDSIHVGVRCIEMLIESTGMVSLHRQNAGVVGQDSETIELAPEYAEAIATRAGALAGISPMFQPCVVPPKPWTGITGGGYWAAGRKPLQLVRTRSLAALRRYEEVSMPEVIKAVNIAQNTAWRVNKKVLDVANAITQWQHCPVADVPAMDRGEMPARPLDIDTNEIALKAWKKEASAFYRKDKARVSRRLSMEFMLSQANKFANYKAIWFPQNMDWRGRVYAVPMFNPQGNDMTKGLLTFAQTKPIGEDGFYWLKIHGANTAGVDKVPFPQRIKFVEDNHTNIMECAKAPLENTWWAEQDSPFCFLAFCFEYAGVINHGLSYNCSLPLAFDGSCSGLQHFSAMLRDEIGGKAVNLLPSAEVQDIYRIVSDKVNEVLKQDLINGTSTTLETVTDKKTGEITERTKYGTKVMAQWWLEHGVNRGVTKRSVMTLVYGSKEFGFRDQVLSDTIQPAIDNGKGDMFLNPNQAAGYMAKLIWNAVSVTVVAAVEAMNWLKSAAKLLAAEVKDKKTDTVLRGRCAVHWVTPDGFPVWQEYKKPIQTRLNLMFLGQFRLQPTINTNKDSEIDAHKQESGIAPNFVHSQDGNHLRMTVVWAHEKYGIESFALIHDSFGTIPADAANLFKAVRETMVSTYESCDVLADFYDQFADQLHESQLDKMPALPAKGNLNLRDILKSDFAFA

SEQ ID NO: 479 - DNA, 2670 bp, synthetic construct
  misc_feature 1..2670: note = Variant of RNA polymerase
  source 1..2670: mol_type = other DNA
atgcaccatcaccatcaccatatgaacacgattaacattgctaagaacgacttctctgacatcgaactggctgctatcccgttcaacactctggctgaccattacggtgagcgtttagctcgcgaacagttggcccttgagcatgagtcttacgagatgggtgaagcacgcttccgcaagatgtttgagcgtcaacttaaagctggtgaggttgcggataacgctgccactaagcctctcatcactaccctactccctaagatgattgcacgcatcaacgactggtttgaggaagtgaaagctaagcgcggcaagcgcccgacagccttccagttcctgcaagaaatcaagccggaagccgtagcgtacatcaccattaagaccactctggcttgcctaaccagtgcggacaatacaaccgttcaggctgtagcaagcgcaatcggtcgggccattgaggacgaggctcgcttcggtcgtatccgtgaccttgaagctaagcacttcaagaagaacgttgaggaacaactcaacaagcgcgtagggcacgtctacaagaaagcatttatgcaagttgtcgaggctgacatgctctctaagggtctactcggtggcgaggcgtggtcttcgtggcataaggaagactctattcatgtaggagtacgctgcatcgagatgctcattgagtcaaccggaatggttagcttacaccgccaaaatgctggcgtagtaggtcaagactctgagactatcgaactcgcacctgaatacgctgaggctatcgcaacccgtgcaggtgcgctggctggcatctctccgatgttccaaccttgcgtagttcctcctaagccgtggactggcattactggtggtggctattgggctgcggggcgcaaacccctgcagttagtacgtactcgcagtctggcggcgcttcgccgctatgaagaagtgtcgatgccggaggtcatcaaagcagtcaacattgcgcagaatacagcatggcgtattaacaagaaagttctcgacgtagcgaatacgatcacccaatggcagcactgtccagtcgcggatgtgcctgcgatggatcgtggcgaaatgccagctcgtccgttggacatcgataccaacgagattgcacttaaagcgtggaagaaagaagcttccgcgttctaccgcaaagacaaagcacgcgttagccgtcgtctgtcaatggagtttatgttatctcaggcgaacaagtttgcgaattacaaagcaatctggtttccgcaaaacatggattggcgtgggcgcgtgtacgctgtcccgatgttcaatcctcagggcaacgatatgacgaaaggcctgctgacctttgcgcagggtaaacccattggtgaagacggcttctattggctcaagattcatggcgcaaatacagctggagtggataaagtaccgtttccacaacgcatcaaatttgttgaggataaccatacgaatattatggaatgcgcgaaagcaccgctggaaaacacttggtgggcggaacaggactcgccgttctgttttctggcgttctgctttgagtatgctggcgtcatcaatcacggtctgtcgtacaactgtagcttgcctctggcatttgatggtagttgctccggcctgcaacatttctcagcgatgttacgcgacgaaattggcggcaaagctgtgaatctcctcccatctgcggaataccaggatatttatcgtatcgtcagcgacaaagttaacgaggtactgaaacaagatctgattaacggtacctctaccaccttggaaacggtgactgataagaagacaggcgaaattaccgaacgcacgaaatacgggaccaaagttatggcacagtggtggttagaacacggtgtgaatcgtggcgtcacgaaacgctcggttatgactttggtgtatgggagcaaagagtttggattccgcgatcaagtgctgagtgacaccattcaaccggcgatcgataacggcaaaggtgacatgtttctgaatccgaatcaggctgctggttacatggcgaaactgatctggaacgcagtgtccgtcaccgtagtcgcagcagttgaggcgatgaactggctgaaaagtgcggcgaaattacttgctgctgaagtgaaggataagaagacggatacagttctgcgtggccgctgcgcagtacattgggtgactcccgacggcttccctgtgtggcaggaatacaagaagcctattcagacgcgcttgaacctgatgttcctcggtcagttccgcttacagcctaccattaacaccaacaaagatagcgagattgatgcacacaaacaggagtctggtatcgctcctaactttgtacacagccaagacggtaaccaccttcgtatgactgtagtgtgggcacacgagaagtacggaatcgaatcttttgcactgattcacgactccttcggtaccattccggctgacgctgcgaacctgttcaaagcagtgcgcgaaactatggtttcgacatatgagtcttgtgatgtactggctgatttctacgaccagttcgctgaccagttgcacgagtctcaattggacaaaatgccagcacttccggctaaaggtaacttgaacctccgtgacatcttaaaatcggacttcgcgttcgcg

SEQ ID NO: 480 - protein, 890 aa, synthetic construct
  REGION 1..890: note = Variant of RNA polymerase
MHHHHHHMNTINIAKNDFSDIELAAIPFNTLADHYGERLAREQLALEHESYEMGEARFRKMFERQLKAGEVADNAATKPLITTLLPKMIARINDWFEEVKAKRGKRPTAFQFLQEIKPEAVAYITIKTTLACLTSADNTTVQAVASAIGRAIEDEARFGRIRDLEAKHFKKNVEEQLNKRVGHVYKKAFMQVVEADMLSKGLLGGEAWSSWHKEDSIHVGVRCIEMLIESTGMVSLHRQNAGVVGQDSETIELAPEYAEAIATRAGALAGISPMFQPCVVPPKPWTGITGGGYWAAGRKPLQLVRTRSLAALRRYEEVSMPEVIKAVNIAQNTAWRINKKVLDVANTITQWQHCPVADVPAMDRGEMPARPLDIDTNEIALKAWKKEASAFYRKDKARVSRRLSMEFMLSQANKFANYKAIWFPQNMDWRGRVYAVPMFNPQGNDMTKGLLTFAQGKPIGEDGFYWLKIHGANTAGVDKVPFPQRIKFVEDNHTNIMECAKAPLENTWWAEQDSPFCFLAFCFEYAGVINHGLSYNCSLPLAFDGSCSGLQHFSAMLRDEIGGKAVNLLPSAEYQDIYRIVSDKVNEVLKQDLINGTSTTLETVTDKKTGEITERTKYGTKVMAQWWLEHGVNRGVTKRSVMTLVYGSKEFGFRDQVLSDTIQPAIDNGKGDMFLNPNQAAGYMAKLIWNAVSVTVVAAVEAMNWLKSAAKLLAAEVKDKKTDTVLRGRCAVHWVTPDGFPVWQEYKKPIQTRLNLMFLGQFRLQPTINTNKDSEIDAHKQESGIAPNFVHSQDGNHLRMTVVWAHEKYGIESFALIHDSFGTIPADAANLFKAVRETMVSTYESCDVLADFYDQFADQLHESQLDKMPALPAKGNLNLRDILKSDFAFA

SEQ ID NO: 481 - DNA, 2670 bp, synthetic construct
  misc_feature 1..2670: note = Variant of RNA polymerase
  source 1..2670: mol_type = other DNA
atgcaccatcaccatcaccatatgaacacgattaacatcgctaagaacgacttctctgacatcgaactggctgctatcccgttcaacactctggctgaccattacggtgagcgtttagctcgcgaacagttggcccttgagcatgagtcttacgagatgggtgaagcacgcttccgcaagatgtttgagcgtcaacttaaagctggtgaggttgcggataacgctgccgccaagcctctcatcactaccctactccctaagatgattgcacgcatcaacgactggtttgaggaagtgaaagctaagcgcggcaagcgcccgacagccttccagttcctgcaagaaatcaagccggaagccgtagcgtacatcaccattaagaccactctggcttgcctaaccagtgcggacaatacaaccgttcaggctgtagcaagcgcaatcggtcgggccattgaggacgaggctcgcttcggtcgtatccgtgaccttgaagctaagcacttcaagaaaaacgttgaggaacaactcaacaagcgcgtagggcacgtctacaagaaagcatttatgcaagttgtcgaggctgacatgctctctacgggtctactcggtggcgaggcgtggtcttcgtggcataaggaagactctattcatgtaggagtacgctgcatcgagatgctcattgagtcaaccggaatggttagcttacaccgccaaaatgctggcgtagtaggtcaagactctgagactatcgaactcgcacctgaatacgctgaggctatcgcaacccgtgcaggtgcgctggctggcatctctccgatgttccaaccttgcgtagttcctcctaagccgtggactggcattactggtggtggctattgggctgcggggcgcaaacccctgcagttagtacgtactcgcagtctggcggcgcttcgccgctatgaagaagtgtcgatgccggaggtcatcaaagcagtcaacattgcgcagaatacagcatggcgtgttaacaagaaagttctcgacgtagcgaatacgatcacccaatggcagcactgtccagtcgcggatgtgcctgcgatggatcgtggcgaaatgccagctcgtccgttggacatcgataccaacgagattgcacttaaagcgtggaagaaagaagcttccgcgttctaccgcaaagacaaagcacgcgttagccgtcgtctgtcaatggagtttatgttatctcaggcgaacaagtttgcgaattacaaagcaatctggtttccgcaaaacatggattggcgtgggcgcgtgtacgctgtcccgatgttcaatcctcagggcaacgatatgacgaaaggcctgctgacctttgcgcaggagaaacccattggtgaagacggcttctattggctcaagattcatggcgcaaatacagctggagtggataaagtaccgtttccacaacgcatcaaatttgttgaggataaccatacgaatattatggaatgcgcgaaagcaccgctggaaaacacttggtgggcggaacaggactcgccgttctgttttctggcgttctgctttgagtatgctggcgtcatcaatcacggtctgtcgtacaactgtagcttgcctctggcatttgatggtagttgctccggcatccaacatttctcagcgatgttacgcgacgaaattggcggcaaagctgtgaatctcctcccatctgcggaagtgcaggatatttatcgtatcgtcagcgacaaagttaacgaggtactgaaacaagatctgattaacggtacctctaccaccttggaaacggtgactgataagaagacaggcgaaattaccgaacgcacgaaatacgggaccaaagttatggcacagtggtggttagaacacggtgtgaatcgtggcgtcacgaaacgctcggttatgactttggtgtatgggagcaaagagtttggattccgcgatcaagtgctgagtgacaccattcaaccggcgatcgataacggcaaaggtgacatgtttctgaatccgaatcaggctgctggttacatggcgaaactgatctggaacgcagtgtccgggaccgtagtcgcagcagttgaggcgatgaactggctgaaaagtgcggcgaaattacttgctgctgaagtgaaggataagaagacggatacagttctgcgtggccgctgcgcagtacattgggtgactcccgacggcttccctgtgtggcaggaatacaagaagcctattcagacgcgcttgaacctgatgttcctcggtcagttccgcttacagcctaccattaacaccaacaaagatagcgagattgatgcacacaaacaggagtctggtatcgctcctaactttgtacacagccaagacggtaaccaccttcgtatgactgtagtgtgggcacacgagaagtacggaatcgaatcttttgcactgattcacgactccttcggtaccattccggctgacgctgcgaacctgttcaaagcagtgcgcgaaactatggtttcgacatatgagtcttgtgatgtactggctgatttctacgaccagttcgctgaccagttgcacgagtctcaattggacaaaatgccagcacttccggctaaaggtaacttgaacctccgtgacatcttaaaatcggacttcgcgttcgcg

SEQ ID NO: 482 - protein, 890 aa, synthetic construct
  REGION 1..890: note = Variant of RNA polymerase
MHHHHHHMNTINIAKNDFSDIELAAIPFNTLADHYGERLAREQLALEHESYEMGEARFRKMFERQLKAGEVADNAAAKPLITTLLPKMIARINDWFEEVKAKRGKRPTAFQFLQEIKPEAVAYITIKTTLACLTSADNTTVQAVASAIGRAIEDEARFGRIRDLEAKHFKKNVEEQLNKRVGHVYKKAFMQVVEADMLSTGLLGGEAWSSWHKEDSIHVGVRCIEMLIESTGMVSLHRQNAGVVGQDSETIELAPEYAEAIATRAGALAGISPMFQPCVVPPKPWTGITGGGYWAAGRKPLQLVRTRSLAALRRYEEVSMPEVIKAVNIAQNTAWRVNKKVLDVANTITQWQHCPVADVPAMDRGEMPARPLDIDTNEIALKAWKKEASAFYRKDKARVSRRLSMEFMLSQANKFANYKAIWFPQNMDWRGRVYAVPMFNPQGNDMTKGLLTFAQEKPIGEDGFYWLKIHGANTAGVDKVPFPQRIKFVEDNHTNIMECAKAPLENTWWAEQDSPFCFLAFCFEYAGVINHGLSYNCSLPLAFDGSCSGIQHFSAMLRDEIGGKAVNLLPSAEVQDIYRIVSDKVNEVLKQDLINGTSTTLETVTDKKTGEITERTKYGTKVMAQWWLEHGVNRGVTKRSVMTLVYGSKEFGFRDQVLSDTIQPAIDNGKGDMFLNPNQAAGYMAKLIWNAVSGTVVAAVEAMNWLKSAAKLLAAEVKDKKTDTVLRGRCAVHWVTPDGFPVWQEYKKPIQTRLNLMFLGQFRLQPTINTNKDSEIDAHKQESGIAPNFVHSQDGNHLRMTVVWAHEKYGIESFALIHDSFGTIPADAANLFKAVRETMVSTYESCDVLADFYDQFADQLHESQLDKMPALPAKGNLNLRDILKSDFAFA

SEQ ID NO: 483 - DNA, 2670 bp, synthetic construct
  misc_feature 1..2670: note = Variant of RNA polymerase
  source 1..2670: mol_type = other DNA
atgcaccatcaccatcaccatatgaacacgattaacatcgctaagaacgacttctctgacatcgaactggctgctatcccgttcaacactctggctgaccattacggtgagcgtttagctcgcgaacagttggcccttgagcatgagtcttacgagatgggtgaagcacgcttccgcaagatgtttgagcgtcaacttaaagctggtgaggttgcggataacgctgccgccaagcctctcatcactaccctactccctaagatgattgcacgcatcaacgactggtttgaggaagtgaaagctaagcgcggcaagcgcccgacagccttccagttcctgcaagaaatcaagccggaagccgtagcgtacatcaccattaagaccactctggcttgcctaaccagtgcggacaatacaaccgttcaggctgtagcaagcgcaatcggtcgggccattgaggacgaggctcgcttcggtcgtatccgtgaccttgaagctaagcacttcaagaagaacgttgaggaacaactcaacaagcgcgtagggcacgtctacaagaaagcatttatgcaagttgtcgaggctgacgtgctctctaagggtctactcggtggcgaggcgtggtcttcgtggcataaggaagactctattcatgtaggagtacgctgcatcgagatgctcattgagtcaaccggaatggttagcttacaccgccaaaatgctggcgtagtaggtcaagactctgagactatcgaactcgcacctgaatacgctgaggctatcgcaacccgtgcaggtgcgctggctggcatctctccgatgttccaaccttgcgtagttcctcctaagccgtggactggcattactggtggtggctattgggctgcggggcgcaaacccctgcagttagtacgtactcgcagtctggcggcgcttcgccgctatgaagaagtgtcgatgccggaggtcatcaaagcagtcaacattgcgcagaatacagcatggcgtattaacaagaaagttctcgacgtagcgaatacgatcacccaatggcagcactgtccagtcgcggatgtgcctgcgatggatcgtggcgaaatgccagctcgtccgttggacatcgataccaacgagattgcacttaaagcgtggaagaaagaagcttccgcgttctaccgcaaagacaaagcacgcgttagccgtcgtctgtcaatggagtttatgttatctcaggcgaacaagtttgcgaattacaaagcaatctggtttccgcaaaacatggattggcgtgggcgcgtgtacgctgtcccgatgttcaatcctcagggcaacgatatgacgaaaggcctgctgacctttgcgcagaccaaacccattggtgaagacggcttctattggctcaagattcatggcgcaaatacagctggagtggataaagtaccgtttccacaacgcatcaaatttgttgaggataaccatacgaatattatggaatgcgcgaaagcaccgctggaaaacacttggtgggcggaacaggactcgccgttctgttttctggcgttctgctttgagtatgctggcgtcatcaatagtggtctgtcgtacaactgtagcttgcctctggcatttgatggtagttgctccggcattcaacatttctcagcgatgttacgcgacgaaattggcggcaaagctgtgaatctcctcccatctgcggaataccaggatatttatcgtatcgtcagcgacaaagttaacgaggtactgaaacaagatctgattaacggtacctctaccaccttggaaacggtgactgataagaagacaggcgaaattaccgaacgcacgaaatacgggaccaaagttatggcacagtggtggttagaacacggtgtgaatcgtggcgtcacgaaacgctcggttatgactttggtgtatgggagcaaagagtttggattccgcgatcaagtgctgagtgacaccattcaaccggcgatcgataacggcaaaggtgacatgtttctgaatccgaatcaggctgctggttacatggcgaaactgatctggaacgcagtgtccgtcaccgtagtcgcagcagttgaggcgatgaactggctgaaaagtgcggcgaaattacttgctgctgaagtgaaggataaaaagacggatacagttctgcgtggccgctgcgcagtacattgggtgactcccgacggcttccctgtgtggcaggaatacaagaagcctattcagacgcgcttgaacctgatgttcctcggtcagttccgcttacagcctaccattaacaccaacaaagatagcgagattgatgcacacaaacaggagtctggtatcgctcctaactttgtacacagccaagacggtaaccaccttcgtatgactgtagtgtgggcacacgagaagtacggaatcgaatcttttgcactgattcacgactccttcggtaccattccggctgacgctgcgaacctgttcaaagcagtgcgcgaaactatggtttcgacatatgagtcttgtgatgtactggctgatttctacgaccagttcgctgaccagttgcacgagtctcaattggacaaaatgccagcacttccggctaaaggtaacttgaacctccgtgacatcttaaaatcggacttcgcgttcgcg

SEQ ID NO: 484 - protein, 890 aa, synthetic construct
  REGION 1..890: note = Variant of RNA polymerase
MHHHHHHMNTINIAKNDFSDIELAAIPFNTLADHYGERLAREQLALEHESYEMGEARFRKMFERQLKAGEVADNAAAKPLITTLLPKMIARINDWFEEVKAKRGKRPTAFQFLQEIKPEAVAYITIKTTLACLTSADNTTVQAVASAIGRAIEDEARFGRIRDLEAKHFKKNVEEQLNKRVGHVYKKAFMQVVEADVLSKGLLGGEAWSSWHKEDSIHVGVRCIEMLIESTGMVSLHRQNAGVVGQDSETIELAPEYAEAIATRAGALAGISPMFQPCVVPPKPWTGITGGGYWAAGRKPLQLVRTRSLAALRRYEEVSMPEVIKAVNIAQNTAWRINKKVLDVANTITQWQHCPVADVPAMDRGEMPARPLDIDTNEIALKAWKKEASAFYRKDKARVSRRLSMEFMLSQANKFANYKAIWFPQNMDWRGRVYAVPMFNPQGNDMTKGLLTFAQTKPIGEDGFYWLKIHGANTAGVDKVPFPQRIKFVEDNHTNIMECAKAPLENTWWAEQDSPFCFLAFCFEYAGVINSGLSYNCSLPLAFDGSCSGIQHFSAMLRDEIGGKAVNLLPSAEYQDIYRIVSDKVNEVLKQDLINGTSTTLETVTDKKTGEITERTKYGTKVMAQWWLEHGVNRGVTKRSVMTLVYGSKEFGFRDQVLSDTIQPAIDNGKGDMFLNPNQAAGYMAKLIWNAVSVTVVAAVEAMNWLKSAAKLLAAEVKDKKTDTVLRGRCAVHWVTPDGFPVWQEYKKPIQTRLNLMFLGQFRLQPTINTNKDSEIDAHKQESGIAPNFVHSQDGNHLRMTVVWAHEKYGIESFALIHDSFGTIPADAANLFKAVRETMVSTYESCDVLADFYDQFADQLHESQLDKMPALPAKGNLNLRDILKSDFAFA

SEQ ID NO: 485 - DNA, 2670 bp, synthetic construct
  misc_feature 1..2670: note = Variant of RNA polymerase
  source 1..2670: mol_type = other DNA
atgcaccatcaccatcaccatatgaacacgattaacggtgctaagaacgacttctctgacatcgaactggctgctatcccgttcaacactctggctgaccattacggtgagcgtttagctcgcgaacagttggcccttgagcatgagtcttacgagatgggtgaagcacgcttccgcaagatgtttgagcgtcaacttaaagctggtgaggttgcggataacgctgccgccaagcctctcatcactaccctactccctaagatgattgcacgcatcaacgactggtttgaggaagtgaaagctaagcgcggcaagcgcccgacagccttccagttcctgcaagaaatcaagccggaagccgtagcgtacatcaccattaagaccactctggcttgcctaaccagtgcggacaatacaaccgttcaggctgtagcaagcgcaatcggtcgggccattgaggacgaggctcgcttcggtcgtatccgtgaccttgaagctaagcacttcaagaaaaacgttgaggaacaactcaacaagcgcgtagggcacgtctacaagaaagcatttatgcaagttgtcgaggctgacatgctctctaagggtctactcggtggcgaggcgtggtcttcgtggcataaggaagactctattcatgtaggagtacgctgcatcgagatgctcattgagtcaaccggaatggttagcttacaccgccaaaatgctggcgtagtaggtcaagactctgagactatcgaactcgcacctgaatacgctgaggctatcgcaacccgtgcaggtgcgctggctggcatctctccgatgttccaaccttgcgtagttcctcctaagccgtggactggcattactggtggtggctattgggctgcggggcgcaaacccctgcagttagtacgtactcgcagtctggcggcgcttcgccgctatgaagaagtgtcgatgccggaggtcatcaaagcagtcaacattgcgcagaatacagcatggcgtgttaacaagaaagttctcgacgtagcgaatgcaatcacccaatggcagcactgtccagtcgcggatgtgcctgcgatggatcgtggcgaaatgccagctcgtccgttggacatcgataccaacgagattgcacttaaagcgtggaagaaagaagcttccgcgttctaccgcaaagacaaagcacgcgttagccgtcgtctgtcaatggagtttatgttatctcaggcgaacaagtttgcgaattacaaagcaatctggtttccgcaaaacatggattggcgtgggcgcgtgtacgctgtcccgatgttcaatcctcagggcaacgatatgacgaaaggcctgctgacctttgcgcaggagaaacccattggtgaagacggcttctattggctcaagattcatggcgcaaatacagctggagtggataaagtaccgtttccacaacgcatcaaatttgttgaggataaccatacgaatattatggaatgcgcgaaagcaccgctggaaaacacttggtgggcggaacaggactcgccgttctgttttctggcgttctgctttgagtatgctggcgctatcaatcacggtctgtcgtacaactgtagcttgcctctggcatttgatggtagttgctccggcattcaacatttctcagcgatgttacgcgacgaaattggcggcaaagctgtgaatctcctcccatctgcggaagtgcaggatatttatcgtatcgtcagcgacaaagttaacgaggtactgaaacaagatctgattaacggtacctctaccaccttggaaacggtgactgataagaagacaggcgaaattaccgaacgcacgaaatacgggaccaaagttatggcacagtggtggttagaacacggtgtgaatcgtggcgtcacgaaacgctcggttatgactttggtgtatgggagcaaagagtttggattccgcgatcaagtgctgagtgacaccattcaaccggcgatcgataacggcaaaggtgacatgtttctgaatccgaatcaggctgctggttacatggcgaaactgatctggaacgcagtgtccgtcaccgtagtcgcagcagttgaggcgatgaactggctgaaaagtgcggcgaaattacttgctgctgaagtgaaggataaaaagacggatacagttctgcgtggccgctgcgcagtacattgggtgactcccgacggcttccctgtgtggcaggaatacaagaagcctattcagacgcgcttgaacctgatgttcctcggtcagttccgcttacagcctaccattaacaccaacaaagatagcgagattgatgcacacaaacaggagtctggtatcgctcctaactttgtacacagccaagacggtaaccaccttcgtatgactgtagtgtgggcacacgagaagtacggaatcgaatcttttgcactgattcacgactccttcggtaccattccggctgacgctgcgaacctgttcaaagcagtgcgcgaaactatggtttcgacatatgagtcttgtgatgtactggctgatttctacgaccagttcgctgaccagttgcacgagtctcaattggacaaaatgccagcacttccggctaaaggtaacttgaacctccgtgacatcttaaaatcggacttcgcgttcgcg

SEQ ID NO: 486 - protein, 890 aa, synthetic construct
  REGION 1..890: note = Variant of RNA polymerase
MHHHHHHMNTINGAKNDFSDIELAAIPFNTLADHYGERLAREQLALEHESYEMGEARFRKMFERQLKAGEVADNAAAKPLITTLLPKMIARINDWFEEVKAKRGKRPTAFQFLQEIKPEAVAYITIKTTLACLTSADNTTVQAVASAIGRAIEDEARFGRIRDLEAKHFKKNVEEQLNKRVGHVYKKAFMQVVEADMLSKGLLGGEAWSSWHKEDSIHVGVRCIEMLIESTGMVSLHRQNAGVVGQDSETIELAPEYAEAIATRAGALAGISPMFQPCVVPPKPWTGITGGGYWAAGRKPLQLVRTRSLAALRRYEEVSMPEVIKAVNIAQNTAWRVNKKVLDVANAITQWQHCPVADVPAMDRGEMPARPLDIDTNEIALKAWKKEASAFYRKDKARVSRRLSMEFMLSQANKFANYKAIWFPQNMDWRGRVYAVPMFNPQGNDMTKGLLTFAQEKPIGEDGFYWLKIHGANTAGVDKVPFPQRIKFVEDNHTNIMECAKAPLENTWWAEQDSPFCFLAFCFEYAGAINHGLSYNCSLPLAFDGSCSGIQHFSAMLRDEIGGKAVNLLPSAEVQDIYRIVSDKVNEVLKQDLINGTSTTLETVTDKKTGEITERTKYGTKVMAQWWLEHGVNRGVTKRSVMTLVYGSKEFGFRDQVLSDTIQPAIDNGKGDMFLNPNQAAGYMAKLIWNAVSVTVVAAVEAMNWLKSAAKLLAAEVKDKKTDTVLRGRCAVHWVTPDGFPVWQEYKKPIQTRLNLMFLGQFRLQPTINTNKDSEIDAHKQESGIAPNFVHSQDGNHLRMTVVWAHEKYGIESFALIHDSFGTIPADAANLFKAVRETMVSTYESCDVLADFYDQFADQLHESQLDKMPALPAKGNLNLRDILKSDFAFA

SEQ ID NO: 487 - DNA, 2670 bp, synthetic construct
  misc_feature 1..2670: note = Variant of RNA polymerase
  source 1..2670: mol_type = other DNA
atgcaccatcaccatcaccatatgaacacgattaacattgctaagaacgacttctctgacatcgaactggctgctatcccgttcaacactctggctgaccattacggtgagcgtttagctcgcgaacagttggcccttgagcatgagtcttacgagatgggtgaagcacgcttccgcaagatgtttgagcgtcaacttaaagctggtgaggttgcggataacgctgccgccaagcctctcatcactaccctactccctaagatgattgcacgcatcaacgactggtttgaggaagtgaaagctaagcgcggcaagcgcccgacagccttccagttcctgcaagaaatcaagccggaagccgtagcgtacatcaccattaagaccactctggcttgcctaaccagtgcggacaatacaaccgttcaggctgtagcaagcgcaatcggtcgggccattgaggacgaggctcgcttcggtcgtatccgtgaccttgaagctaagcacttcaagaaaaacgttgaggaacaactcaacaagcgcgtagggcacgtctacaagaaagcatttatgcaagttgtcgaggctgacatgctctctacgggtctactcggtggcgaggcgtggtcttcgtggcataaggaagactctattcatgtaggagtacgctgcatcgagatgctcattgagtcaaccggaatggttagcttacaccgccaaaatgctggcgtagtaggtcaagactctgagactatcgaactcgcacctgaatacgctgaggctatcgcaacccgtgcaggtgcgctggctggcatctctccgatgttccaaccttgcgtagttcctcctaagccgtggactggcattactggtggtggctattgggctgcggggcgcaaacccctgcagttagtacgtactcgcagtctggcggcgcttcgccgctatgaagaagtgtcgatgccggaggtcatcaaagcagtcaacattgcgcagaatacagcatggcgtattaacaagaaagttctcgacgtagcgaatgcgatcacccaatggcagcactgtccagtcgcggatgtgcctgcgatggatcgtggcgaaatgccagctcgtccgttggacatcgataccaacgagattgcacttaaagcgtggaagaaagaagcttccgcgttctaccgcaaagacaaagcacgcgttagccgtcgtctgtcaatggagtttatgttatctcaggcgaacaagtttgcgaattataaagcaatctggtttccgcaaaacatggattggcgtgggcgcgtgtacgctgtcccgatgttcaatcctcagggcaacgatatgacgaaaggcctgctgacctttgcgcaggagaaacccattggtgaagacggcttctattggctcaagattcatggcgcaaatacagctggagtggataaagtaccgtttccacaacgcatcaaatttgttgaggataaccatacgaatattatggaatgcgcgaaagcaccgctggaaaacacttggtgggcggaacaggactcgccgttctgttttctggcgttctgctttgagtatgctggcgttatcaatcacggtctgtcgtacaactgtagcttgcctctggcatttgatggtagttgctccggcattcaacatttctcagcgatgttacgcgacgaaattggcggcaaagctgtgaatctcctcccatctgcggaagtgcaggatatttatcgtatcgtcagcgacaaagttaacgaggtactgaaacaagatctgattaacggtacctctaccaccttggaaacggtgactgataagaagacaggcgaaattaccgaacgcacgaaatacgggaccaaagttatggcacagtggtggttagaacacggtgtgaatcgtggcgtcacgaaacgctcggttatgactttggtgtatgggagcaaagagtttggattccgcgatcaagtgctgagtgacaccattcaaccggcgatcgataacggcaaaggtgacatgtttctgaatccgaatcaggctgctggttacatggcgaaactgatctgggatgcagtgtccgtcaccgtagtcgcagcagttgaggcgatgaactggctgaaaagtgcggcgaaattacttgctgctgaagtgaaggataagaagacggatacagttctgcgtggccgctgcgcagtacattgggtgactcccgacggcttccctgtgtggcaggaatacaagaagcctattcagacgcgcttgaacctgatgttcctcggtcagttccgcttacagcctaccattaacaccaacaaagatagcgagattgatgcacacaaacaggagtctggtatcgctcctaactttgtacacagccaagacggtaaccaccttcgtatgactgtagtgtgggcacacgagaagtacggaatcgaatcttttgcactgattcacgactccttcggtaccattccggctgacgctgcgaacctgttcaaagcagtgcgcgaaactatggtttcgacatatgagtcttgtgatgtactggctgatttctacgaccagttcgctgaccagttgcacgagtctcaattggacaaaatgccagcacttccggctaaaggtaacttgaacctccgtgacatcttaaaatcggacttcgcgttcgcg

SEQ ID NO: 488 - protein, 890 aa, synthetic construct
  REGION 1..890: note = Variant of RNA polymerase
MHHHHHHMNTINIAKNDFSDIELAAIPFNTLADHYGERLAREQLALEHESYEMGEARFRKMFERQLKAGEVADNAAAKPLITTLLPKMIARINDWFEEVKAKRGKRPTAFQFLQEIKPEAVAYITIKTTLACLTSADNTTVQAVASAIGRAIEDEARFGRIRDLEAKHFKKNVEEQLNKRVGHVYKKAFMQVVEADMLSTGLLGGEAWSSWHKEDSIHVGVRCIEMLIESTGMVSLHRQNAGVVGQDSETIELAPEYAEAIATRAGALAGISPMFQPCVVPPKPWTGITGGGYWAAGRKPLQLVRTRSLAALRRYEEVSMPEVIKAVNIAQNTAWRINKKVLDVANAITQWQHCPVADVPAMDRGEMPARPLDIDTNEIALKAWKKEASAFYRKDKARVSRRLSMEFMLSQANKFANYKAIWFPQNMDWRGRVYAVPMFNPQGNDMTKGLLTFAQEKPIGEDGFYWLKIHGANTAGVDKVPFPQRIKFVEDNHTNIMECAKAPLENTWWAEQDSPFCFLAFCFEYAGVINHGLSYNCSLPLAFDGSCSGIQHFSAMLRDEIGGKAVNLLPSAEVQDIYRIVSDKVNEVLKQDLINGTSTTLETVTDKKTGEITERTKYGTKVMAQWWLEHGVNRGVTKRSVMTLVYGSKEFGFRDQVLSDTIQPAIDNGKGDMFLNPNQAAGYMAKLIWDAVSVTVVAAVEAMNWLKSAAKLLAAEVKDKKTDTVLRGRCAVHWVTPDGFPVWQEYKKPIQTRLNLMFLGQFRLQPTINTNKDSEIDAHKQESGIAPNFVHSQDGNHLRMTVVWAHEKYGIESFALIHDSFGTIPADAANLFKAVRETMVSTYESCDVLADFYDQFADQLHESQLDKMPALPAKGNLNLRDILKSDFAFA

SEQ ID NO: 489 - DNA, 2670 bp, synthetic construct
  misc_feature 1..2670: note = Variant of RNA polymerase
  source 1..2670: mol_type = other DNA
atgcaccatcaccatcaccatatgaacacgattaacatcgctaagaacgacttctctgacatcgaactggctgctatcccgttcaacactctggctgaccattacggtgagcgtttagctcgcgaacagttggcccttgagcatgagtcttacgagatgggtgaagcacgcttccgcaagatgtttgagcgtcaacttaaagctggtgaggttgcggataacgctgccgccaagcctctcatcactaccctactccctaagatgattgcacgcatcaacgactggtttgaggaagtgaaagctaagcgcggcaagcgcccgacagccttccagttcctgcaagaaatcaagccggaagccgtagcgtacatcaccattaagaccactctggcttgcctaaccagtgcggacaatacaaccgttcaggctgtagcaagcgcaatcggtcgggccattgaggacgaggctcgcttcggtcgtatccgtgaccttgaagctaagcacttcaagaaaaacgttgaggaacaactcaacaagcgcgtagggcacgtctacaagaaagcatttatgcaagttgtcgaggctgacgtgctctctaagggtctactcggtggcgaggcgtggtcttcgtggcataaggaagactctattcatgtaggagtacgctgcatcgagatgctcattgagtcaaccggaatggttagcttacaccgccaaaatgctggcgtagtaggtcaagactctgagactatcgaactcgcacctgaatacgctgaggctatcgcaacccgtgcaggtgcgctggctggcatctctccgatgttccaaccttgcgtagttcctcctaagccgtggactggcattactggtggtggctattgggctgcggggcgcaaacccctgcagttagtacgtactcgcagtctggcggcgcttcgccgctatgaagaagtgtcgatgccggaggtcatcaaagcagtcaacattgcgcagaatacagcatggcgtattaacaagaaagttctcgacgtagcgaatgcaatcacccaatggcagcactgtccagtcgcggatgtgcctgcgatggatcgtggcgaaatgccagctcgtccgttggacatcgataccaacgagattgcacttaaagcgtggaagaaagaagcttccgcgttctaccgcaaagacaaagcacgcgttagccgtcgtctgtcaatggagtttatgttatctcaggcgaacaagtttgcgaattacaaagcaatctggtttccgcaaaacatggattggcgtgggcgcgtgtacgctgtcccgatgttcaatcctcagggcaacgatatgacgaaaggcctgctgacctttgcgcagggtaaacccattggtgaagacggcttctattggctcaagattcatggcgcaaatacagctggagtggataaagtaccgtttccacaacgcatcaaatttgttgaggataaccatacgaatattatggaatgcgcgaaagcaccgctggaaaacacttggtgggcggaacaggactcgccgttctgttttctggcgttctgctttgagtatgctcgtgtcatcaatcacggtctgtcgtacaactgtagcttgcctctggcatttgatggtagttgctccggcattcaacatttctcagcgatgttacgcgacgaaattggcggcaaagctgtgaatctcctcccatctgcggaataccaggatatttatcgtatcgtcagcgacaaagttaacgaggtactgaaacaagatctgattaacggtacctctaccaccgtggaaacggtgactgataagaagacaggcgaaattaccgaacgcacgaaatacgggaccaaagttatggcacagtggtggttagaacacggtgtgaatcgtggcgtcacgaaacgctcggttatgactttggtgtatgggagcaaagagtttggattccgcgatcaagtgctgagtgacaccattcaaccggcgatcgataacggcaaaggtgacatgtttctgaatccgaatcaggctgctggttacatggcgaaactgatctggaacgcagtgtccgtcaccgtagtcgcagcagttgaggcgatgaactggctgaaaagtgcggcgaaattacttgctgctgaagtgaaggataagaagacggatacagttctgcgtggccgctgcgcagtacattgggtgactcccgacggcttccctgtgtggcaggaatacaagaagcctattcagacgcgcttgaacctgatgttcctcggtcagttccgcttacagcctaccattaacaccaacaaagatagcgagattgatgcacacaaacaggagtctggtatcgctcctaactttgtacacagccaagacggtaaccaccttcgtatgactgtagtgtgggcacacgagaagtacggaatcgaatcttttgcactgattcacgactccttcggtaccattccggctgacgctgcgaacctgttcaaagcagtgcgcgaaactatggtttcgacatatgagtcttgtgatgtactggctgatttctacgaccagttcgctgaccagttgcacgagtctcaattggacaaaatgccagcacttccggctaaaggtaacttgaacctccgtgacatcttaaaatcggacttcgcgttcgcg

SEQ ID NO: 490 - protein, 890 aa, synthetic construct
  REGION 1..890: note = Variant of RNA polymerase
MHHHHHHMNTINIAKNDFSDIELAAIPFNTLADHYGERLAREQLALEHESYEMGEARFRKMFERQLKAGEVADNAAAKPLITTLLPKMIARINDWFEEVKAKRGKRPTAFQFLQEIKPEAVAYITIKTTLACLTSADNTTVQAVASAIGRAIEDEARFGRIRDLEAKHFKKNVEEQLNKRVGHVYKKAFMQVVEADVLSKGLLGGEAWSSWHKEDSIHVGVRCIEMLIESTGMVSLHRQNAGVVGQDSETIELAPEYAEAIATRAGALAGISPMFQPCVVPPKPWTGITGGGYWAAGRKPLQLVRTRSLAALRRYEEVSMPEVIKAVNIAQNTAWRINKKVLDVANAITQWQHCPVADVPAMDRGEMPARPLDIDTNEIALKAWKKEASAFYRKDKARVSRRLSMEFMLSQANKFANYKAIWFPQNMDWRGRVYAVPMFNPQGNDMTKGLLTFAQGKPIGEDGFYWLKIHGANTAGVDKVPFPQRIKFVEDNHTNIMECAKAPLENTWWAEQDSPFCFLAFCFEYARVINHGLSYNCSLPLAFDGSCSGIQHFSAMLRDEIGGKAVNLLPSAEYQDIYRIVSDKVNEVLKQDLINGTSTTVETVTDKKTGEITERTKYGTKVMAQWWLEHGVNRGVTKRSVMTLVYGSKEFGFRDQVLSDTIQPAIDNGKGDMFLNPNQAAGYMAKLIWNAVSVTVVAAVEAMNWLKSAAKLLAAEVKDKKTDTVLRGRCAVHWVTPDGFPVWQEYKKPIQTRLNLMFLGQFRLQPTINTNKDSEIDAHKQESGIAPNFVHSQDGNHLRMTVVWAHEKYGIESFALIHDSFGTIPADAANLFKAVRETMVSTYESCDVLADFYDQFADQLHESQLDKMPALPAKGNLNLRDILKSDFAFA

SEQ ID NO: 491 - DNA, 2670 bp, synthetic construct
  misc_feature 1..2670: note = Variant of RNA polymerase
  source 1..2670: mol_type = other DNA
atgcaccatcaccatcaccatatgaacacgattaacattgctaagaacgacttctctgacatcgaactggctgctatcccgttcaacactctggctgaccattacggtgagcgtttagctcgcgaacagttggcccttgagcatgagtcttacgagatgggtgaagcacgcttccgcaagatgtttgagcgtcaacttaaagctggtgaggttgcggataacgctgccgctaagcctctcatcactaccctactccctaagatgattgcacgcatcaacgactggtttgaggaagtgaaagctaagcgcggcaagcgcccgacagccttccagttcctgcaagaaatcaagccggaagccgtagcgtacatcaccattaagaccactctggcttgcctaaccagtgcggacaatacaaccgttcaggctgtagcaagcgcaatcggtcgggccattgaggacgaggctcgcttcggtcgtatccgtgaccttgaagctaagcacttcaagaaaaacgttgaggaacaactcaacaagcgcgtagggcacgtctacaagaaagcatttatgcaagttgtcgaggctgacgtgctctctaagggtctactcggtggcgaggcgtggtcttcgtggcataaggaagactctattcatgtaggagtacgctgcatcgagatgctcattgagtcaaccggaatggttagcttacaccgccaaaatgctggcgtagtaggtcaagactctgagactatcgaactcgcacctgaatacgctgaggctatcgcaacccgtgcaggtgcgctggctggcatctctccgatgttccaaccttgcgtagttcctcctaagccgtggactggcattactggtggtggctattgggctgcggggcgcaaacccctgcagttagtacgtactcgcagtctggcggcgcttcgccgctatgaagaagtgtcgatgccggaggtcatcaaagcagtcaacattgcgcagaatacagcatggcgtgtgaacaagaaagttctcgacgtagcgaatgcgatcacccaatggcagcactgtccagtcgcggatgtgcctgcgatggatcgtggcgaaatgccagctcgtccgttggacatcgataccaacgagattgcacttaaagcgtggaagaaagaagcttccgcgttctaccgcaaagacaaagcacgcgttagccgtcgtctgtcaatggagtttatgttatctcaggcgaacaagtttgcgaattacaaagcaatctggtttccgcaaaacatggattggcgtgggcgcgtgtacgctgtcccgatgttcaatcctcagggcaacgatatgacgaaaggcctgctgacctttgcgcaggagaaacccattggtgaagacggcttctattggctcaagattcatggcgcaaatacagctggagtggataaagtaccgtttccacaacgcatcaaatttgttgaggataaccatacgaatattatggaatgcgcgaaagcaccgctggaaaacacttggtgggcggaacaggactcgccgttctgttttctggcgttctgctttgagtatgctggcgtcatcaatcacggtctgtcgtacaactgtagcttgcctctggcatttgatggtagttgctccggcatccaacatttctcagcgatgttacgcgacgaaattggcggcaaagctgtgaatctcctcccatctgcggaagtgcaggatatttatctgatcgtctcggacaaagttaacgaggtactgaaacaagatctgattaacggtacctctaccaccttggaaacggtgactgataagaagacaggcgaaattacccaacgcacgaaatacgggaccaaagttatggcacagtggtggttagaacacggtgtgaatcgtggcgtcacgaaacgctcggttatgactttggtgtatgggagcaaagagtttggattccgcgatcaagtgctgagtgacaccattcaaccggcgatcgataacggcaaaggtgacatgtttctgaatccgaatcaggctgctggttacatggcgaaactgatctggaacgcagtgtccgtcaccgtagtcgcagcagttgaggcgatgaactggctgaaaagtgcggcgaaattacttgctgctgaagtgaaggataagaagacggatacagttctgcgtggccgctgcgcagtacattgggtgactcccgacggcttccctgtgtggcaggaatacaagaagcctattcagacgcgcttgaacctgatgttcctcggtcagttccgcttacagcctaccattaacaccaacaaagatagcgagattgatgcacacaaacaggagtctggtatcgctcctaactttgtacacagccaagacggtaaccaccttcgtatgactgtagtgtgggcacacgagaagtacggaatcgaatcttttgcactgattcacgactccttcggtaccattccggctgacgctgcgaacctgttcaaagcagtgcgcgaaactatggtttcgacatatgagtcttgtgatgtactggctgatttctacgaccagttcgctgaccagttgcacgagtctcaattggacaaaatgccagcacttccggctaaaggtaacttgaacctccgtgacatcttaaaatcggacttcgcgttcgcg

SEQ ID NO: 492 - protein, 890 aa, synthetic construct
  REGION 1..890: note = Variant of RNA polymerase
MHHHHHHMNTINIAKNDFSDIELAAIPFNTLADHYGERLAREQLALEHESYEMGEARFRKMFERQLKAGEVADNAAAKPLITTLLPKMIARINDWFEEVKAKRGKRPTAFQFLQEIKPEAVAYITIKTTLACLTSADNTTVQAVASAIGRAIEDEARFGRIRDLEAKHFKKNVEEQLNKRVGHVYKKAFMQVVEADVLSKGLLGGEAWSSWHKEDSIHVGVRCIEMLIESTGMVSLHRQNAGVVGQDSETIELAPEYAEAIATRAGALAGISPMFQPCVVPPKPWTGITGGGYWAAGRKPLQLVRTRSLAALRRYEEVSMPEVIKAVNIAQNTAWRVNKKVLDVANAITQWQHCPVADVPAMDRGEMPARPLDIDTNEIALKAWKKEASAFYRKDKARVSRRLSMEFMLSQANKFANYKAIWFPQNMDWRGRVYAVPMFNPQGNDMTKGLLTFAQEKPIGEDGFYWLKIHGANTAGVDKVPFPQRIKFVEDNHTNIMECAKAPLENTWWAEQDSPFCFLAFCFEYAGVINHGLSYNCSLPLAFDGSCSGIQHFSAMLRDEIGGKAVNLLPSAEVQDIYLIVSDKVNEVLKQDLINGTSTTLETVTDKKTGEITQRTKYGTKVMAQWWLEHGVNRGVTKRSVMTLVYGSKEFGFRDQVLSDTIQPAIDNGKGDMFLNPNQAAGYMAKLIWNAVSVTVVAAVEAMNWLKSAAKLLAAEVKDKKTDTVLRGRCAVHWVTPDGFPVWQEYKKPIQTRLNLMFLGQFRLQPTINTNKDSEIDAHKQESGIAPNFVHSQDGNHLRMTVVWAHEKYGIESFALIHDSFGTIPADAANLFKAVRETMVSTYESCDVLADFYDQFADQLHESQLDKMPALPAKGNLNLRDILKSDFAFA

SEQ ID NO: 493 - DNA, 2670 bp, synthetic construct
  misc_feature 1..2670: note = Variant of RNA polymerase
  source 1..2670: mol_type = other DNA
atgcaccatcaccatcaccatatgaacacgattaacggtgctaagaacgacttctctgacatcgaactggctgctatcccgttcaacactctggctgaccattacggtgagcgtttagctcgcgaacagttggcccttgagcatgagtcttacgagatgggtgaagcacgcttccgcaagatgtttgagcgtcaacttaaagctggtgaggttgcggataacgctgccgccaagcctctcatcactaccctactccctaagatgattgcacgcatcaacgactggtttgaggaagtgaaagctaagcgcggcaagcgcccgacagccttccagttcctgcaagaaatcaagccggaagccgtagcgtacatcaccattaagaccactctggcttgcctaaccagtgcggacaatacaaccgttcaggctgtagcaagcgcaatcggtcgggccattgaggacgaggctcgcttcggtcgtatccgtgaccttgaagctaagcacttcaagaaaaacgttgaggaacaactcaacaagcgcgtagggcacgtctacaagaaagcatttatgcaagttgtcgaggctgacatgctctctaagggtctactcggtggcgaggcgtggtcttcgtggcataaggaagactctattcatgtaggagtacgctgcatcgagatgctcattgagtcaaccggaatggttagcttacaccgccaaaatgctggcgtagtaggtcaagactctgagactatcgaactcgcacctgaatacgctgaggctatcgcaacccgtgcaggtgcgctggctggcatctctccgatgttccaaccttgcgtagttcctcctaagccgtggactggcattactggtggtggctattgggctgcggggcgcaaacccctgcagttagtacgtactcgcagtctggcggcgcttcgccgctatgaagaagtgtcgatgccggaggtcatcaaagcagtcaacattgcgcagaatacagcatggcgtgttaacaagaaagttctcgacgtagcgaatgcaatcacccaatggcagcactgtccagtcgcggatgtgcctgcgatggatcgtggcgaaatgccagctcgtccgttggacatcgataccaacgagattgcacttaaagcgtggaagaaagaagcttccgcgttctaccgcaaagacaaagcacgcgttagccgtcgtctgtcaatggagtttatgttatctcaggcgaacaagtttgcgaattataaagcaatctggtttccgcaaaacatggattggcgtgggcgcgtgtacgctgtcccgatgttcaatcctcagggcaacgatatgacgaaaggcctgctgacctttgcgcagggtaaacccattggtgaagacggcttctattggctcaagattcatggcgcaaatacagctggagtggataaagtaccgtttccacaacgcatcaaatttgttgaggataaccatacgaatattatggaatgcgcgaaagcaccgctggaaaacacttggtgggcggaacaggactcgccgttctgttttctggcgttctgctttgagtatgctggcgtcatcaatcacggtctgtcgtacaactgtagcttgcctctggcatttgatggtagttgctccggcatccaacatttctcagcgatgttacgcgacgaaattggcggcaaagctgtgaatctcctcccatctgcggaagtgcaggatatttatcgtatcgtcagcgacaaagttaacgaggtactgaaacaagatctgattaacggtacctctaccaccttggaaacggtgactgataagaagacaggcgaaattaccgaacgcacgaaatacgggaccaaagttatggcacagtggtggttagaacacggtgtgaatcgtggcgtcacgaaacgctcggttatgactttggtgtatgggagcaaagagtttggattccgcgatcaagtgctgagtgacaccattcaaccggcgatcgataacggcaaaggtgacatgtttctgaatccgaatcaggctgctggttacatggcgaaactgatctggaatgcagtgtccgtcaccgtagtcgcagcagttgaggcgatgaactggctgaaaagtgcggcgaaattacttgctgctgaagtgaaggatcctaagacggatacagttctgcgtggccgctgcgcagtacattgggtgactcccgacggcttccctgtgtggcaggaatacaagaagcctattcagacgcgcttgaacctgatgttcctcggtcagttccgcttacagcctaccattaacaccaacaaagatagcgagattgatgcacacaaacaggagtctggtatcgctcctaactttgtacacagccaagacggtaaccaccttcgtatgactgtagtgtgggcacacgagaagtacggaatcgaatcttttgcactgattcacgactccttcggtaccattccggctgacgctgcgaacctgttcaaagcagtgcgcgaaactatggtttcgacatatgagtcttgtgatgtactggctgatttctacgaccagttcgctgaccagttgcacgagtctcaattggacaaaatgccagcacttccggctaaaggtaacttgaacctccgtgacatcttaaaatcggacttcgcgttcgcg

SEQ ID NO: 494 - protein, 890 aa, synthetic construct
  REGION 1..890: note = Variant of RNA polymerase
MHHHHHHMNTINGAKNDFSDIELAAIPFNTLADHYGERLAREQLALEHESYEMGEARFRKMFERQLKAGEVADNAAAKPLITTLLPKMIARINDWFEEVKAKRGKRPTAFQFLQEIKPEAVAYITIKTTLACLTSADNTTVQAVASAIGRAIEDEARFGRIRDLEAKHFKKNVEEQLNKRVGHVYKKAFMQVVEADMLSKGLLGGEAWSSWHKEDSIHVGVRCIEMLIESTGMVSLHRQNAGVVGQDSETIELAPEYAEAIATRAGALAGISPMFQPCVVPPKPWTGITGGGYWAAGRKPLQLVRTRSLAALRRYEEVSMPEVIKAVNIAQNTAWRVNKKVLDVANAITQWQHCPVADVPAMDRGEMPARPLDIDTNEIALKAWKKEASAFYRKDKARVSRRLSMEFMLSQANKFANYKAIWFPQNMDWRGRVYAVPMFNPQGNDMTKGLLTFAQGKPIGEDGFYWLKIHGANTAGVDKVPFPQRIKFVEDNHTNIMECAKAPLENTWWAEQDSPFCFLAFCFEYAGVINHGLSYNCSLPLAFDGSCSGIQHFSAMLRDEIGGKAVNLLPSAEVQDIYRIVSDKVNEVLKQDLINGTSTTLETVTDKKTGEITERTKYGTKVMAQWWLEHGVNRGVTKRSVMTLVYGSKEFGFRDQVLSDTIQPAIDNGKGDMFLNPNQAAGYMAKLIWNAVSVTVVAAVEAMNWLKSAAKLLAAEVKDPKTDTVLRGRCAVHWVTPDGFPVWQEYKKPIQTRLNLMFLGQFRLQPTINTNKDSEIDAHKQESGIAPNFVHSQDGNHLRMTVVWAHEKYGIESFALIHDSFGTIPADAANLFKAVRETMVSTYESCDVLADFYDQFADQLHESQLDKMPALPAKGNLNLRDILKSDFAFA

SEQ ID NO: 495 - DNA, 2670 bp, synthetic construct
  misc_feature 1..2670: note = Variant of RNA polymerase
  source 1..2670: mol_type = other DNA
atgcaccatcaccatcaccatatgaacacgattaacattgctaagaacgacttctctgacatcgaactggctgctatcccgttcaacactctggctgaccattacggtgagcgtttagctcgcgaacagttggcccttgagcatgagtcttacgagatgggtgaagcacgcttccgcaagatgtttgagcgtcaacttaaagctggtgaggttgcggataacgctgccgccaagcctctcatcactaccctactccctaagatgattgcacgcatcaacgactggtttgaggaagtgaaagctaagcgcggcaagcgcccgacagccttccagttcctgcaagaaatcaagccggaagccgtagcgtacatcaccattaagaccactctggcttgcctaaccagtgcggacaatacaaccgttcaggctgtagcaagcgcaatcggtcgggccattgaggacgaggctcgcttcggtcgtatccgtgaccttgaagctaagcacttcaagaaaaacgttgaggaacaactcaacaagcgcgtagggcacgtctacaagaaagcatttatgcaagttgtcgaggctgacgtgctctctacgggtctactcggtggcgaggcgtggtcttcgtggcataaggaagactctattcatgtaggagtacgctgcatcgagatgctcattgagtcaaccggaatggttagcttacaccgccaaaatgctggcgtagtaggtcaagactctgagactatcgaactcgcacctgaatacgctgaggctatcgcaacccgtgcaggtgcgctggctggcatctctccgatgttccaaccttgcgtagttcctcctaagccgtggactggcattactggtggtggctattgggctgcggggcgcaaacccctgcagttagtacgtactcgcagtctggcggcgcttcgccgctatgaagaagtgtcgatgccggaggtcatcaaagcagtcaacattgcgcagaatacagcatggcgtgttaacaagaaagttctcgacgtagcgaatgcaatcacccaatggcagcactgtccagtcgcggatgtgcctgcgatggatcgtggcgaaatgccagctcgtccgttggacatcgataccaacgagattgcacttaaagcgtggaagaaagaagcttccgcgttctaccgcaaagacaaagcacgcgttagccgtcgtctgtcaatggagtttatgttatctcaggcgaacaagtttgcgaatgaaaaagcaatctggtttccgcaaaacatggattggcgtgggcgcgtgtacgctgtcccgatgttcaatcctcagggcaacgatatgacgaaaggcctgctgacctttgcgcagggtaaacccattggtgaagacggcttctattggctcaagattcatggcgcaaatacagctggagtggataaagtaccgtttccacaacgcatcaaatttgttgaggataaccatacgaatattatggaatgcgcgaaagcaccgctggaaaacacttggtgggcggaacaggactcgccgttctgttttctggcgttctgctttgagtatgctggcgtcatcaatcacggtctgtcgtacaactgtagcttgcctctggcatttgatggtagttgctccggcattcaacatttctcagcgatgttacgcgacgaaattggcggcaaagctgtgaatctcctcccatctgcggaacctcaggatatttatcgtatcgtcagcgacaaagttaacgaggtactgaaacaagatctgattaacggtacctctaccaccttggaaacggtgactgataagaagacaggcgaaattaccgaacgcacgaaatacgggaccaaagttatggcacagtggtggttagaacacggtgtgaatcgtggcgtcacgaaacgctcggttatgactttggtgtatgggagcaaagagtttggattccgcgatcaagtgctgagtgacaccattcaaccggcgatcgataacggcaaaggtgacatgtttctgaatccgaatcaggctgctggttacatggcgaaactgatctggaacgcagtgtccgggaccgtagtcgcagcagttgaggcgatgaactggctgaaaagtgcggcgaaattacttgctgctgaagtgaaggataaaaagacggatacagttctgcgtggccgctgcgcagtacattgggtgactcccgacggcttccctgtgtggcaggaatacaagaagcctattcagacgcgcttgaacctgatgttcctcggtcagttccgcttacagcctaccattaacaccaacaaagatagcgagattgatgcacacaaacaggagtctggtatcgctcctaactttgtacacagccaagacggtaaccaccttcgtatgactgtagtgtgggcacacgagaagtacggaatcgaatcttttgcactgattcacgactccttcggtaccattccggctgacgctgcgaacctgttcaaagcagtgcgcgaaactatggtttcgacatatgagtcttgtgatgtactggctgatttctacgaccagttcgctgaccagttgcacgagtctcaattggacaaaatgccagcacttccggctaaaggtaacttgaacctccgtgacatcttaaaatcggacttcgcgttcgcg

SEQ ID NO: 496 - protein, 890 aa, synthetic construct
  REGION 1..890: note = Variant of RNA polymerase
MHHHHHHMNTINIAKNDFSDIELAAIPFNTLADHYGERLAREQLALEHESYEMGEARFRKMFERQLKAGEVADNAAAKPLITTLLPKMIARINDWFEEVKAKRGKRPTAFQFLQEIKPEAVAYITIKTTLACLTSADNTTVQAVASAIGRAIEDEARFGRIRDLEAKHFKKNVEEQLNKRVGHVYKKAFMQVVEADVLSTGLLGGEAWSSWHKEDSIHVGVRCIEMLIESTGMVSLHRQNAGVVGQDSETIELAPEYAEAIATRAGALAGISPMFQPCVVPPKPWTGITGGGYWAAGRKPLQLVRTRSLAALRRYEEVSMPEVIKAVNIAQNTAWRVNKKVLDVANAITQWQHCPVADVPAMDRGEMPARPLDIDTNEIALKAWKKEASAFYRKDKARVSRRLSMEFMLSQANKFANEKAIWFPQNMDWRGRVYAVPMFNPQGNDMTKGLLTFAQGKPIGEDGFYWLKIHGANTAGVDKVPFPQRIKFVEDNHTNIMECAKAPLENTWWAEQDSPFCFLAFCFEYAGVINHGLSYNCSLPLAFDGSCSGIQHFSAMLRDEIGGKAVNLLPSAEPQDIYRIVSDKVNEVLKQDLINGTSTTLETVTDKKTGEITERTKYGTKVMAQWWLEHGVNRGVTKRSVMTLVYGSKEFGFRDQVLSDTIQPAIDNGKGDMFLNPNQAAGYMAKLIWNAVSGTVVAAVEAMNWLKSAAKLLAAEVKDKKTDTVLRGRCAVHWVTPDGFPVWQEYKKPIQTRLNLMFLGQFRLQPTINTNKDSEIDAHKQESGIAPNFVHSQDGNHLRMTVVWAHEKYGIESFALIHDSFGTIPADAANLFKAVRETMVSTYESCDVLADFYDQFADQLHESQLDKMPALPAKGNLNLRDILKSDFAFA

SEQ ID NO: 497 - DNA, 2670 bp, synthetic construct
  misc_feature 1..2670: note = Variant of RNA polymerase
  source 1..2670: mol_type = other DNA
atgcaccatcaccatcaccatatgaacacgattaacatcgctaagaacgacttctctgacatcgaactggctgctatcccgttcaacactctggctgaccattacggtgagcgtttagctcgcgaacagttggcccttgagcatgagtcttacgagatgggtgaagcacgcttccgcaagatgtttgagcgtcaacttaaagctggtgaggttgcggataacgctgccgccaagcctctcatcactaccctactccctaagatgattgcacgcatcaacgactggtttgaggaagtgaaagctaagcgcggcaagcgcccgacagccttccagttcctgcaagaaatcaagccggaagccgtagcgtacatcaccattaagaccactctggcttgcctaaccagtgcggacaatacaaccgttcaggctgtagcaagcgcaatcggtcgggccattgaggacgaggctcgcttcggtcgtatccgtgaccttgaagctaagcacttcaagaaaaacgttgaggaacaactcaacaagcgcgtagggcacgtctacaagaaagcatttatgcaagttgtcgaggctgacgtgctctctacgggtctactcggtggcgaggcgtggtcttcgtggcataaggaagactctattcatgtaggagtacgctgcatcgagatgctcattgagtcaaccggaatggttagcttacaccgccaaaatgctggcgtagtaggtcaagactctgagactatcgaactcgcacctgaatacgctgaggctatcgcaacccgtgcaggtgcgctggctggcatctctccgatgttccaaccttgcgtagttcctcctaagccgtggactggcattactggtggtggctattgggctgcggggcgcaaacccctgcagttagtacgtactcgcagtctggcggcgcttcgccgctatgaagaagtgtcgatgccggaggtcatcaaagcagtcaacattgcgcagaatacagcatggcgtgtgaacaagaaagttctcgacgtagcgaatgcaatcacccaatggcagcactgtccagtcgcggatgtgcctgcgatggatcgtggcgaaatgccagctcgtccgttggacatcgataccaacgagattgcacttaaagcgtggaagaaagaagcttccgcgttctaccgcaaagacaaagcacgcgttagccgtcgtctgtcaatggagtttatgttatctcaggcgaacaagtttgcgaattataaagcaatctggtttccgcaaaacatggattggcgtgggcgcgtgtacgctgtcccgatgttcaatcctcagggcaacgatatgacgaaaggcctgctgacctttgcgcagggtaaacccattggtgaagacggcttctattggctcaagattcatggcgcaaatacagctggagtggataaagtaccgtttccacaacgcatcaaatttgttgaggataaccatacgaatattatggaatgcgcgaaagcaccgctggaaaacacttggtgggcggaacaggactcgccgttctgttttctggcgttctgctttgagtatgctggtgtcatcaatcacggtctgtcgtacaactgtagcttgcctctggcatttgatggtagttgctccggcatccaacatttctcagcgatgttacgcgacgaaattggcggcaaagctgtgaatctcctcccatctgcggaagtacaggatatttatcgtatcgtcagcgacaaagttaacgaggtactgaaacaagatctgattaacggtacctctaccaccgtggaaacggtgactgataagaagacaggcgaaattaccgaacgcacgaaatacgggaccaaagttatggcacagtggtggttagaacacggtgtgaatcgtggcgtcacgaaacgctcggttatgactttggtgtatgggagcaaagagtttggattccgcgatcaagtgctgagtgacaccattcaaccggcgatcgataacggcaaaggtgacatgtttctgaatccgaatcaggctgctggttacatggcgaaactgatctggaatgcagtgtccgtcaccgtagtcgcagcagttgaggcgatgaactggctgaaaagtgcggcgaaattacttgctgctgaagtgaaggataaaaagacggatacagttctgcgtggccgctgcgcagtacattgggtgactcccgacggcttccctgtgtggcaggaatacaagaagcctattcagacgcgcttgaacctgatgttcctcggtcagttccgcttacagcctaccattaacaccaacaaagatagcgagattgatgcacacaaacaggagtctggtatcgctcctaactttgtacacagccaagacggtaaccaccttcgtatgactgtagtgtgggcacacgagaagtacggaatcgaatcttttgcactgattcacgactccttcggtaccattccggctgacgctgcgaacctgttcaaagcagtgcgcgaaactatggtttcgacatatgagtcttgtgatgtactggctgatttctacgaccagttcgctgaccagttgcacgagtctcaattggacaaaatgccagcacttccggctaaaggtaacttgaacctccgtgacatcttaaaatcggacttcgcgttcgcg

SEQ ID NO: 498 - protein, 890 aa, synthetic construct
  REGION 1..890: note = Variant of RNA polymerase
MHHHHHHMNTINIAKNDFSDIELAAIPFNTLADHYGERLAREQLALEHESYEMGEARFRKMFERQLKAGEVADNAAAKPLITTLLPKMIARINDWFEEVKAKRGKRPTAFQFLQEIKPEAVAYITIKTTLACLTSADNTTVQAVASAIGRAIEDEARFGRIRDLEAKHFKKNVEEQLNKRVGHVYKKAFMQVVEADVLSTGLLGGEAWSSWHKEDSIHVGVRCIEMLIESTGMVSLHRQNAGVVGQDSETIELAPEYAEAIATRAGALAGISPMFQPCVVPPKPWTGITGGGYWAAGRKPLQLVRTRSLAALRRYEEVSMPEVIKAVNIAQNTAWRVNKKVLDVANAITQWQHCPVADVPAMDRGEMPARPLDIDTNEIALKAWKKEASAFYRKDKARVSRRLSMEFMLSQANKFANYKAIWFPQNMDWRGRVYAVPMFNPQGNDMTKGLLTFAQGKPIGEDGFYWLKIHGANTAGVDKVPFPQRIKFVEDNHTNIMECAKAPLENTWWAEQDSPFCFLAFCFEYAGVINHGLSYNCSLPLAFDGSCSGIQHFSAMLRDEIGGKAVNLLPSAEVQDIYRIVSDKVNEVLKQDLINGTSTTVETVTDKKTGEITERTKYGTKVMAQWWLEHGVNRGVTKRSVMTLVYGSKEFGFRDQVLSDTIQPAIDNGKGDMFLNPNQAAGYMAKLIWNAVSVTVVAAVEAMNWLKSAAKLLAAEVKDKKTDTVLRGRCAVHWVTPDGFPVWQEYKKPIQTRLNLMFLGQFRLQPTINTNKDSEIDAHKQESGIAPNFVHSQDGNHLRMTVVWAHEKYGIESFALIHDSFGTIPADAANLFKAVRETMVSTYESCDVLADFYDQFADQLHESQLDKMPALPAKGNLNLRDILKSDFAFA

SEQ ID NO: 499 - DNA, 2670 bp, synthetic construct
  misc_feature 1..2670: note = Variant of RNA polymerase
  source 1..2670: mol_type = other DNA
atgcaccatcaccatcaccatatgaacacgattaacatcgctaagaacgacttctctgacatcgaactggctgctatcccgttcaacactctggctgaccattacggtgagcgtttagctcgcgaacagttggcccttgagcatgagtcttacgagatgggtgaagcacgcttccgcaagatgtttgagcgtcaacttaaagctggtgaggttgcggataacgctgccgccaagcctctcatcactaccctactccctaagatgattgcacgcatcaacgactggtttgaggaagtgaaagctaagcgcggcaagcgcccgacagccttccagttcctgcaagaaatcaagccggaagccgtagcgtacatcaccattaagaccactctggcttgcctaaccagtgcggacaatacaaccgttcaggctgtagcaagcgcaatcggtcgggccattgaggacgaggctcgcttcggtcgtatccgtgaccttgaagctaagcacttcaagaaaaacgttgaggaacaactcaacaagcgcgtagggcacgtctacaagaaagcatttatgcaagttgtcgaggctgacgtgctctctaagggtctactcggtggcgaggcgtggtcttcgtggcataaggaagactctattcatgtaggagtacgctgcatcgagatgctcattgagtcaaccggaatggttagcttacaccgccaaaatgctggcgtagtaggtcaagactctgagactatcgaactcgcacctgaatacgctgaggctatcgcaacccgtgcaggtgcgctggctggcatctctccgatgttccaaccttgcgtagttcctcctaagccgtggactggcattactggtggtggctattgggctgcggggcgcaaacccctgcagttagtacgtactcgcagtctggcggcgcttcgccgctatgaagaagtgtcgatgccggaggtcatcaaagcagtcaacattgcgcagaatacagcatggcgtgtgaacaagaaagttctcgacgtagcgaatacgatcacccaatggcagcactgtccagtcgcggatgtgcctgcgatggatcgtggcgaaatgccagctcgtccgttggacatcgataccaacgagattgcacttaaagcgtggaagaaagaagcttccgcgttctaccgcaaagacaaagcacgcgttagccgtcgtctgtcaatggagtttatgttatctcaggcgaacaagtttgcgaatgaaaaagcaatctggtttccgcaaaacatggattggcgtgggcgcgtgtacgctgtcccgatgttcaatcctcagggcaacgatatgacgaaaggcctgctgacctttgcgcagggtaaacccattggtgaagacggcttctattggctcaagattcatggcgcaaatacagctggagtggataaagtaccgtttccacaacgcatcaaatttgttgaggataaccatacgaatattatggaatgcgcgaaagcaccgctggaaaacacttggtgggcggaacaggactcgccgttctgttttctggcgttctgctttgagtatgctggcgtcatcaatcacggtctgtcgtacaactgtagcttgcctctggcatttgatggtagttgctccggcatccaacatttctcagcgatgttacgcgacgaaattggcggcaaagctgtgaatctcctcccatctgcggaataccaggatatttatcgtatcgtcagcgacaaagttaacgaggtactgaaacaagatctgattaacggtacctctaccaccttggaaacggtgactgataagaagacaggcgaaattaccgaacgcacgaaatacgggaccaaagttatggcacagtggtggttagaacacggtgtgaatcgtggcgtcacgaaacgctcggttatgactttggtgtatgggagcaaagagtttggattccgcgatcaagtgctgagtgacaccattcaaccggcgatcgataacggcaaaggtgacatgtttctgaatccgaatcaggctgctggttacatggcgaaactgatctggaacgcagtgtccgtcaccgtagtcgcagcagttgaggcgatgaactggctgaaaagtgcggcgaaattacttgctgctgaagtgaaggataaaaagacggatacagttctgcgtggccgctgcgcagtacattgggtgactcccgacggcttccctgtgtggcaggaatacaagaagcctattcagacgcgcttgaacctgatgttcctcggtcagttccgcttacagcctaccattaacaccaacaaagatagcgagattgatgcacacaaacaggagtctggtatcgctcctaactttgtacacagccaagacggtaaccaccttcgtatgactgtagtgtgggcacacgagaagtacggaatcgaatcttttgcactgattcacgactccttcggtaccattccggctgacgctgcgaacctgttcaaagcagtgcgcgaaactatggtttcgacatatgagtcttgtgatgtactggctgatttctacgaccagttcgctgaccagttgcacgagtctcaattggacaaaatgccagcacttccggctaaaggtaacttgaacctccgtgacatcttaaaatcggacttcgcgttcgcg

SEQ ID NO: 500 - protein, 890 aa, synthetic construct
  REGION 1..890: note = Variant of RNA polymerase
MHHHHHHMNTINIAKNDFSDIELAAIPFNTLADHYGERLAREQLALEHESYEMGEARFRKMFERQLKAGEVADNAAAKPLITTLLPKMIARINDWFEEVKAKRGKRPTAFQFLQEIKPEAVAYITIKTTLACLTSADNTTVQAVASAIGRAIEDEARFGRIRDLEAKHFKKNVEEQLNKRVGHVYKKAFMQVVEADVLSKGLLGGEAWSSWHKEDSIHVGVRCIEMLIESTGMVSLHRQNAGVVGQDSETIELAPEYAEAIATRAGALAGISPMFQPCVVPPKPWTGITGGGYWAAGRKPLQLVRTRSLAALRRYEEVSMPEVIKAVNIAQNTAWRVNKKVLDVANTITQWQHCPVADVPAMDRGEMPARPLDIDTNEIALKAWKKEASAFYRKDKARVSRRLSMEFMLSQANKFANEKAIWFPQNMDWRGRVYAVPMFNPQGNDMTKGLLTFAQGKPIGEDGFYWLKIHGANTAGVDKVPFPQRIKFVEDNHTNIMECAKAPLENTWWAEQDSPFCFLAFCFEYAGVINHGLSYNCSLPLAFDGSCSGIQHFSAMLRDEIGGKAVNLLPSAEYQDIYRIVSDKVNEVLKQDLINGTSTTLETVTDKKTGEITERTKYGTKVMAQWWLEHGVNRGVTKRSVMTLVYGSKEFGFRDQVLSDTIQPAIDNGKGDMFLNPNQAAGYMAKLIWNAVSVTVVAAVEAMNWLKSAAKLLAAEVKDKKTDTVLRGRCAVHWVTPDGFPVWQEYKKPIQTRLNLMFLGQFRLQPTINTNKDSEIDAHKQESGIAPNFVHSQDGNHLRMTVVWAHEKYGIESFALIHDSFGTIPADAANLFKAVRETMVSTYESCDVLADFYDQFADQLHESQLDKMPALPAKGNLNLRDILKSDFAFA

SEQ ID NO: 501 - DNA, 2670 bp, synthetic construct
  misc_feature 1..2670: note = Variant of RNA polymerase
  source 1..2670: mol_type = other DNA
atgcaccatcaccatcaccatatgaacacgattaacatcgctaagaacgacttctctgacatcgaactggctgctatcccgttcaacactctggctgaccattacggtgagcgtttagctcgcgaacagttggcccttgagcatgagtcttacgagatgggtgaagcacgcttccgcaagatgtttgagcgtcaacttaaagctggtgaggttgcggataacgctgccgctaagcctctcatcactaccctactccctaagatgattgcacgcatcaacgactggtttgaggaagtgaaagctaagcgcggcaagcgcccgacagccttccagttcctgcaagaaatcaagccggaagccgtagcgtacatcaccattaagaccactctggcttgcctaaccagtgcggacaatacaaccgttcaggctgtagcaagcgcaatcggtcgggccattgaggacgaggctcgcttcggtcgtatccgtgaccttgaagctaagcacttcaagaaaaacgttgaggaacaactcaacaagcgcgtagggcacgtctacaagaaagcatttatgcaagttgtcgaggctgacatgctctctaagggtctactcggtggcgaggcgtggtcttcgtggcataaggaagactctattcatgtaggagtacgctgcatcgagatgctcattgagtcaaccggaatggttagcttacaccgccaaaatgctggcgtagtaggtcaagactctgagactatcgaactcgcacctgaatacgctgaggctatcgcaacccgtgcaggtgcgctggctggcatctctccgatgttccaaccttgcgtagttcctcctaagccgtggactggcattactggtggtggctattgggctgcggggcgcaaacccctgcagttagtacgtactcgcagtctggcggcgcttcgccgctatgaagaagtgtcgatgccggaggtcatcaaagcagtcaacattgcgcagaatacagcatggcgtgtgaacaagaaagttctcgacgtagcgaatacgatcacccaatggcagcactgtccagtcgcggatgtgcctgcgatggatcgtggcgaaatgccagctcgtccgttggacatcgataccaacgagattgcacttaaagcgtggaagaaagaagcttccgcgttctaccgcaaagacaaagcacgcgttagccgtcgtctgtcaatggagtttatgttatctcaggcgaacaagtttgcgaattataaagcaatctggtttccgcaaaacatggattggcgtgggcgcgtgtacgctgtcccgatgttcaatcctcagggcaacgatatgacgaaaggcctgctgacctttgcgcagggtaaacccattggtgaagacggcttctattggctcaagattcatggcgcaaatacagctggagtggataaagtaccgtttccacaacgcatcaaatttgttgaggataaccatacgaatattatggaatgcgcgaaagcaccgctggaaaacacttggtgggcggaacaggactcgccgttctgttttctggcgttctgctttgagtatgctggcgtcatcaatcacggtctgtcgtacaactgtagcttgcctctggcatttgatggtagttgctccggcattcaacatttctcagcgatgttacgcgacgaaattggcggcaaagctgtgaatctcctcccatctgcggaagtacaggatatttatcgtatcgtcagcgacaaagttaacgaggtactgaaacaagatctgattaacggtacctctaccaccgtggaaacggtgactgataagaagacaggcgaaattaccgaacgcacgaaatacgggaccaaagttatggcacagtggtggttagaacacggtgtgaatcgtggcgtcacgaaacgctcggttatgactttggtgtatgggagcaaagagtttggattccgcgatcaagtgctgagtgacaccattcaaccggcgatcgataacggcaaaggtgacatgtttctgaatccgaatcaggctgctggttacatggcgaaactgatctggaacgcagtgtccgggaccgtagtcgcagcagttgaggcgatgaactggctgaaaagtgcggcgaaattacttgctgctgaagtgaaggataagaagacggatacagttctgcgtggccgctgcgcagtacattgggtgactcccgacggcttccctgtgtggcaggaatacaagaagcctattcagacgcgcttgaacctgatgttcctcggtcagttccgcttacagcctaccattaacaccaacaaagatagcgagattgatgcacacaaacaggagtctggtatcgctcctaactttgtacacagccaagacggtaaccaccttcgtatgactgtagtgtgggcacacgagaagtacggaatcgaatcttttgcactgattcacgactccttcggtaccattccggctgacgctgcgaacctgttcaaagcagtgcgcgaaactatggtttcgacatatgagtcttgtgatgtactggctgatttctacgaccagttcgctgaccagttgcacgagtctcaattggacaaaatgccagcacttccggctaaaggtaacttgaacctccgtgacatcttaaaatcggacttcgcgttcgcg

SEQ ID NO: 502 - protein, 890 aa, synthetic construct
  REGION 1..890: note = Variant of RNA polymerase
MHHHHHHMNTINIAKNDFSDIELAAIPFNTLADHYGERLAREQLALEHESYEMGEARFRKMFERQLKAGEVADNAAAKPLITTLLPKMIARINDWFEEVKAKRGKRPTAFQFLQEIKPEAVAYITIKTTLACLTSADNTTVQAVASAIGRAIEDEARFGRIRDLEAKHFKKNVEEQLNKRVGHVYKKAFMQVVEADMLSKGLLGGEAWSSWHKEDSIHVGVRCIEMLIESTGMVSLHRQNAGVVGQDSETIELAPEYAEAIATRAGALAGISPMFQPCVVPPKPWTGITGGGYWAAGRKPLQLVRTRSLAALRRYEEVSMPEVIKAVNIAQNTAWRVNKKVLDVANTITQWQHCPVADVPAMDRGEMPARPLDIDTNEIALKAWKKEASAFYRKDKARVSRRLSMEFMLSQANKFANYKAIWFPQNMDWRGRVYAVPMFNPQGNDMTKGLLTFAQGKPIGEDGFYWLKIHGANTAGVDKVPFPQRIKFVEDNHTNIMECAKAPLENTWWAEQDSPFCFLAFCFEYAGVINHGLSYNCSLPLAFDGSCSGIQHFSAMLRDEIGGKAVNLLPSAEVQDIYRIVSDKVNEVLKQDLINGTSTTVETVTDKKTGEITERTKYGTKVMAQWWLEHGVNRGVTKRSVMTLVYGSKEFGFRDQVLSDTIQPAIDNGKGDMFLNPNQAAGYMAKLIWNAVSGTVVAAVEAMNWLKSAAKLLAAEVKDKKTDTVLRGRCAVHWVTPDGFPVWQEYKKPIQTRLNLMFLGQFRLQPTINTNKDSEIDAHKQESGIAPNFVHSQDGNHLRMTVVWAHEKYGIESFALIHDSFGTIPADAANLFKAVRETMVSTYESCDVLADFYDQFADQLHESQLDKMPALPAKGNLNLRDILKSDFAFA

SEQ ID NO: 503 - DNA, 2670 bp, synthetic construct
  misc_feature 1..2670: note = Variant of RNA polymerase
  source 1..2670: mol_type = other DNA
atgcaccatcaccatcaccatatgaacacgattaacatcgctaagaacgacttctctgacatcgaactggctgctatcccgttcaacactctggctgaccattacggtgagcgtttagctcgcgaacagttggcccttgagcatgagtcttacgagatgggtgaagcacgcttccgcaagatgtttgagcgtcaacttaaagctggtgaggttgcggataacgctgccgccaagcctctcatcactaccctactccctaagatgattgcacgcatcaacgactggtttgaggaagtgaaagctaagcgcggcaagcgcccgacagccttccagttcctgcaagaaatcaagccggaagccgtagcgtacatcaccattaagaccactctggcttgcctaaccagtgcggacaatacaaccgttcaggctgtagcaagcgcaatcggtcgggccattgaggacgaggctcgcttcggtcgtatccgtgaccttgaagctaagcacttcaagaaaaacgttgaggaacaactcaacaagcgcgtagggcacgtctacaagaaagcatttatgcaagttgtcgaggctgacatgctctctaagggtctactcggtggcgaggcgtggtcttcgtggcataaggaagactctattcatgtaggagtacgctgcatcgagatgctcattgagtcaaccggaatggttagcttacaccgccaaaatgctggcgtagtaggtcaagactctgagactatcgaactcgcacctgaatacgctgaggctatcgcaacccgtgcaggtgcgctggctggcatctctccgatgttccaaccttgcgtagttcctcctaagccgtggactggcattactggtggtggctattgggctgcggggcgcaaacccctgcagttagtacgtactcgcagtctggcggcgcttcgccgctatgaagaagtgtcgatgccggaggtcatcaaagcagtcaacattgcgcagaatacagcatggcgtgtgaacaagaaagttctcgacgtagcgaatgcaatcacccaatggcagcactgtccagtcgcggatgtgcctgcgatggatcgtggcgaaatgccagctcgtccgttggacatcgataccaacgagattgcacttaaagcgtggaagaaagaagcttccgcgttctaccgcaaagacaaagcacgcgttagccgtcgtctgtcaatggagtttatgttatctcaggcgaacaagtttgcgaattataaagcaatctggtttccgcaaaacatggattggcgtgggcgcgtgtacgctgtcccgatgttcaatcctcagggcaacgatatgacgaaaggcctgctgacctttgcgcaggggaaacccattggtgaagacggcttctattggctcaagattcatggcgcaaatacagctggagtggataaagtaccgtttccacaacgcatcaaatttgttgaggataaccatacgaatattatggaatgcgcgaaagcaccgctggaaaacacttggtgggcggaacaggactcgccgttctgttttctggcgttctgctttgagtatgctggcgttatcaatcacggtctgtcgtacaactgtagcttgcctctggcatttgatggtagttgctccggcctgcaacatttctcagcgatgttacgcgacgaaattggcggcaaagctgtgaatctcctcccatctgcggaagtacaggatatttatcgtatcgtcagcgacaaagttaacgaggtactgaaacaagatctgattaacggtacctctaccaccttggaaacggtgactgataagaagacaggcgaaattaccgaacgcacgaaatacgggaccaaagttatggcacagtggtggttagaacacggtgtgaatcgtggcgtcacgaaacgctcggttatgactttggtgtatgggagcaaagagtttggattccgcgatcaagtgctgagtgacaccattcaaccggcgatcgataacggcaaaggtgacatgtttctgaatccgaatcaggctgctggttacatggcgaaactgatctgggatgcagtgtccgtgaccgtagtcgcagcagttgaggcgatgaactggctgaaaagtgcggcgaaattacttgctgctgaagtgaaggataagaagacggatacagttctgcgtggccgctgcgcagtacattgggtgactcccgacggcttccctgtgtggcaggaatacaagaagcctattcagacgcgcttgaacctgatgttcctcggtcagttccgcttacagcctaccattaacaccaacaaagatagcgagattgatgcacacaaacaggagtctggtatcgctcctaactttgtacacagccaagacggtaaccaccttcgtatgactgtagtgtgggcacacgagaagtacggaatcgaatcttttgcactgattcacgactccttcggtaccattccggctgacgctgcgaacctgttcaaagcagtgcgcgaaactatggtttcgacatatgagtcttgtgatgtactggctgatttctacgaccagttcgctgaccagttgcacgagtctcaattggacaaaatgccagcacttccggctaaaggtaacttgaacctccgtgacatcttaaaatcggacttcgcgttcgcg

SEQ ID NO: 504 - protein, 890 aa, synthetic construct
  REGION 1..890: note = Variant of RNA polymerase
MHHHHHHMNTINIAKNDFSDIELAAIPFNTLADHYGERLAREQLALEHESYEMGEARFRKMFERQLKAGEVADNAAAKPLITTLLPKMIARINDWFEEVKAKRGKRPTAFQFLQEIKPEAVAYITIKTTLACLTSADNTTVQAVASAIGRAIEDEARFGRIRDLEAKHFKKNVEEQLNKRVGHVYKKAFMQVVEADMLSKGLLGGEAWSSWHKEDSIHVGVRCIEMLIESTGMVSLHRQNAGVVGQDSETIELAPEYAEAIATRAGALAGISPMFQPCVVPPKPWTGITGGGYWAAGRKPLQLVRTRSLAALRRYEEVSMPEVIKAVNIAQNTAWRVNKKVLDVANAITQWQHCPVADVPAMDRGEMPARPLDIDTNEIALKAWKKEASAFYRKDKARVSRRLSMEFMLSQANKFANYKAIWFPQNMDWRGRVYAVPMFNPQGNDMTKGLLTFAQGKPIGEDGFYWLKIHGANTAGVDKVPFPQRIKFVEDNHTNIMECAKAPLENTWWAEQDSPFCFLAFCFEYAGVINHGLSYNCSLPLAFDGSCSGLQHFSAMLRDEIGGKAVNLLPSAEVQDIYRIVSDKVNEVLKQDLINGTSTTLETVTDKKTGEITERTKYGTKVMAQWWLEHGVNRGVTKRSVMTLVYGSKEFGFRDQVLSDTIQPAIDNGKGDMFLNPNQAAGYMAKLIWDAVSVTVVAAVEAMNWLKSAAKLLAAEVKDKKTDTVLRGRCAVHWVTPDGFPVWQEYKKPIQTRLNLMFLGQFRLQPTINTNKDSEIDAHKQESGIAPNFVHSQDGNHLRMTVVWAHEKYGIESFALIHDSFGTIPADAANLFKAVRETMVSTYESCDVLADFYDQFADQLHESQLDKMPALPAKGNLNLRDILKSDFAFA

SEQ ID NO: 505 - DNA, 2670 bp, synthetic construct
  misc_feature 1..2670: note = Variant of RNA polymerase
  source 1..2670: mol_type = other DNA
atgcaccatcaccatcaccatatgaacacgattaacatcgctaagaacgacttctctgacatcgaactggctgctatcccgttcaacactctggctgaccattacggtgagcgtttagctcgcgaacagttggcccttgagcatgagtcttacgagatgggtgaagcacgcttccgcaagatgtttgagcgtcaacttaaagctggtgaggttgcggataacgctgccgccaagcctctcatcactaccctactccctaagatgattgcacgcatcaacgactggtttgaggaagtgaaagctaagcgcggcaagcgcccgacagccttccagttcctgcaagaaatcaagccggaagccgtagcgtacatcaccattaagaccactctggcttgcctaaccagtgcggacaatacaaccgttcaggctgtagcaagcgcaatcggtcgggccattgaggacgaggctcgcttcggtcgtatccgtgaccttgaagctaagcacttcaagaaaaacgttgaggaacaactcaacaagcgcgtagggcacgtctacaagaaagcatttatgcaagttgtcgaggctgacatgctctctacgggtctactcggtggcgaggcgtggtcttcgtggcataaggaagactctattcatgtaggagtacgctgcatcgagatgctcattgagtcaaccggaatggttagcttacaccgccaaaatgctggcgtagtaggtcaagactctgagactatcgaactcgcacctgaatacgctgaggctatcgcaacccgtgcaggtgcgctggctggcatctctccgatgttccaaccttgcgtagttcctcctaagccgtggactggcattactggtggtggctattgggctgcggggcgcaaacccctgcagttagtacgtactcgcagtctggcggcgcttcgccgctatgaagaagtgtcgatgccggaggtcatcaaagcagtcaacattgcgcagaatacagcatggcgtgttaacaagaaagttctcgacgtagcgaatgcgatcacccaatggcagcactgtccagtcgcggatgtgcctgcgatggatcgtggcgaaatgccagctcgtccgttggacatcgataccaacgagattgcacttaaagcgtggaagaaagaagcttccgcgttctaccgcaaagacaaagcacgcgttagccgtcgtctgtcaatggagtttatgttatctcaggcgaacaagtttgcgaatgaaaaagcaatctggtttccgcaaaacatggattggcgtgggcgcgtgtacgctgtcccgatgttcaatcctcagggcaacgatatgacgaaaggcctgctgacctttgcgcaggggaaacccattggtgaagacggcttctattggctcaagattcatggcgcaaatacagctggagtggataaagtaccgtttccacaacgcatcaaatttgttgaggataaccatacgaatattatggaatgcgcgaaagcaccgctggaaaacacttggtgggcggaacaggactcgccgttctgttttctggcgttctgctttgagtatgctggtgtcatcaatcacggtctgtcgtacaactgtagcttgcctctggcatttgatggtagttgctccggcctgcaacatttctcagcgatgttacgcgacgaaattggcggcaaagctgtgaatctcctcccatctgcggaagtgcaggatatttatcgtatcgtcagcgacaaagttaacgaggtactgaaacaagatctgattaacggtacctctaccaccttggaaacggtgactgataagaagacaggcgaaattaccgaacgcacgaaatacgggaccaaagttatggcacagtggtggttagaacacggtgtgaatcgtggcgtcacgaaacgctcggttatgactttggtgtatgggagcaaagagtttggattccgcgatcaagtgctgagtgacaccattcaaccggcgatcgataacggcaaaggtgacatgtttctgaatccgaatcaggctgctggttacatggcgaaactgatctggaatgcagtgtccgtcaccgtagtcgcagcagttgaggcgatgaactggctgaaaagtgcggcgaaattacttgctgctgaagtgaaggataaaaagacggatacagttctgcgtggccgctgcgcagtacattgggtgactcccgacggcttccctgtgtggcaggaatacaagaagcctattcagacgcgcttgaacctgatgttcctcggtcagttccgcttacagcctaccattaacaccaacaaagatagcgagattgatgcacacaaacaggagtctggtatcgctcctaactttgtacacagccaagacggtaaccaccttcgtatgactgtagtgtgggcacacgagaagtacggaatcgaatcttttgcactgattcacgactccttcggtaccattccggctgacgctgcgaacctgttcaaagcagtgcgcgaaactatggtttcgacatatgagtcttgtgatgtactggctgatttctacgaccagttcgctgaccagttgcacgagtctcaattggacaaaatgccagcacttccggctaaaggtaacttgaacctccgtgacatcttaaaatcggacttcgcgttcgcg

SEQ ID NO: 506 - protein, 890 aa, synthetic construct
  REGION 1..890: note = Variant of RNA polymerase
MHHHHHHMNTINIAKNDFSDIELAAIPFNTLADHYGERLAREQLALEHESYEMGEARFRKMFERQLKAGEVADNAAAKPLITTLLPKMIARINDWFEEVKAKRGKRPTAFQFLQEIKPEAVAYITIKTTLACLTSADNTTVQAVASAIGRAIEDEARFGRIRDLEAKHFKKNVEEQLNKRVGHVYKKAFMQVVEADMLSTGLLGGEAWSSWHKEDSIHVGVRCIEMLIESTGMVSLHRQNAGVVGQDSETIELAPEYAEAIATRAGALAGISPMFQPCVVPPKPWTGITGGGYWAAGRKPLQLVRTRSLAALRRYEEVSMPEVIKAVNIAQNTAWRVNKKVLDVANAITQWQHCPVADVPAMDRGEMPARPLDIDTNEIALKAWKKEASAFYRKDKARVSRRLSMEFMLSQANKFANEKAIWFPQNMDWRGRVYAVPMFNPQGNDMTKGLLTFAQGKPIGEDGFYWLKIHGANTAGVDKVPFPQRIKFVEDNHTNIMECAKAPLENTWWAEQDSPFCFLAFCFEYAGVINHGLSYNCSLPLAFDGSCSGLQHFSAMLRDEIGGKAVNLLPSAEVQDIYRIVSDKVNEVLKQDLINGTSTTLETVTDKKTGEITERTKYGTKVMAQWWLEHGVNRGVTKRSVMTLVYGSKEFGFRDQVLSDTIQPAIDNGKGDMFLNPNQAAGYMAKLIWNAVSVTVVAAVEAMNWLKSAAKLLAAEVKDKKTDTVLRGRCAVHWVTPDGFPVWQEYKKPIQTRLNLMFLGQFRLQPTINTNKDSEIDAHKQESGIAPNFVHSQDGNHLRMTVVWAHEKYGIESFALIHDSFGTIPADAANLFKAVRETMVSTYESCDVLADFYDQFADQLHESQLDKMPALPAKGNLNLRDILKSDFAFA

SEQ ID NO: 507 - DNA, 2670 bp, synthetic construct
  misc_feature 1..2670: note = Variant of RNA polymerase
  source 1..2670: mol_type = other DNA
atgcaccatcaccatcaccatatgaacacgattaacatcgctaagaacgacttctctgacatcgaactggctgctatcccgttcaacactctggctgaccattacggtgagcgtttagctcgcgaacagttggcccttgagcatgagtcttacgagatgggtgaagcacgcttccgcaagatgtttgagcgtcaacttaaagctggtgaggttgcggataacgctgccgccaagcctctcatcactaccctactccctaagatgattgcacgcatcaacgactggtttgaggaagtgaaagctaagcgcggcaagcgcccgacagccttccagttcctgcaagaaatcaagccggaagccgtagcgtacatcaccattaagaccactctggcttgcctaaccagtgcggacaatacaaccgttcaggctgtagcaagcgcaatcggtcgggccattgaggacgaggctcgcttcggtcgtatccgtgaccttgaagctaagcacttcaagaaaaacgttgaggaacaactcaacaagcgcgtagggcacgtctacaagaaagcatttatgcaagttgtcgaggctgacatgctctctacgggtctactcggtggcgaggcgtggtcttcgtggcataaggaagactctattcatgtaggagtacgctgcatcgagatgctcattgagtcaaccggaatggttagcttacaccgccaaaatgctggcgtagtaggtcaagactctgagactatcgaactcgcacctgaatacgctgaggctatcgcaacccgtgcaggtgcgctggctggcatctctccgatgttccaaccttgcgtagttcctcctaagccgtggactggcattactggtggtggctattgggctgcggggcgcaaacccctgcagttagtacgtactcgcagtctggcggcgcttcgccgctatgaagaagtgtcgatgccggaggtcatcaaagcagtcaacattgcgcagaatacagcatggcgtgtgaacaagaaagttctcgacgtagcgaatacgatcacccaatggcagcactgtccagtcgcggatgtgcctgcgatggatcgtggcgaaatgccagctcgtccgttggacatcgataccaacgagattgcacttaaagcgtggaagaaagaagcttccgcgttctaccgcaaagacaaagcacgcgttagccgtcgtctgtcaatggagtttatgttatctcaggcgaacaagtttgcgaattacaaagcaatctggtttccgcaaaacatggattggcgtgggcgcgtgtacgctgtcccgatgttcaatcctcagggcaacgatatgacgaaaggcctgctgacctttgcgcaggggaaacccattggtgaagacggcttctattggctcaagattcatggcgcaaatacagctggagtggataaagtaccgtttccacaacgcatcaaatttgttgaggataaccatacgaatattatggaatgcgcgaaagcaccgctggaaaacacttggtgggcggaacaggactcgccgttctgttttctggcgttctgctttgagtatgctggcgttatcaatcacggtctgtcgtacaactgtagcttgcctctggcatttgatggtagttgctccggcatccaacatttctcagcgatgttacgcgacgaaattggcggcaaagctgtgaatctcctcccatctgcggaagtgcaggatatttatcgtatcgtcagcgacaaagttaacgaggtactgaaacaagatctgattaacggtacctctaccaccttggaaacggtgactgataagaagacaggcgaaattaccgaacgcacgaaatacgggaccaaagttatggcacagtggtggttagaacacggtgtgaatcgtggcgtcacgaaacgctcggttatgactttggtgtatgggagcaaagagtttggattccgcgatcaagtgctgagtgacaccattcaaccggcgatcgataacggcaaaggtgacatgtttctgaatccgaatcaggctgctggttacatggcgaaactgatctggaacgcagtgtccgtcaccgtagtcgcagcagttgaggcgatgaactggctgaaaagtgcggcgaaattacttgctgctgaagtgaaggataagaagacggatacagttctgcgtggccgctgcgcagtacattgggtgactcccgacggcttccctgtgtggcaggaatacaagaagcctattcagacgcgcttgaacctgatgttcctcggtcagttccgcttacagcctaccattaacaccaacaaagatagcgagattgatgcacacaaacaggagtctggtatcgctcctaactttgtacacagccaagacggtaaccaccttcgtatgactgtagtgtgggcacacgagaagtacggaatcgaatcttttgcactgattcacgactccttcggtaccattccggctgacgctgcgaacctgttcaaagcagtgcgcgaaactatggtttcgacatatgagtcttgtgatgtactggctgatttctacgaccagttcgctgaccagttgcacgagtctcaattggacaaaatgccagcacttccggctaaaggtaacttgaacctccgtgacatcttaaaatcggacttcgcgttcgcg

SEQ ID NO: 508 - protein, 890 aa, synthetic construct
  REGION 1..890: note = Variant of RNA polymerase
MHHHHHHMNTINIAKNDFSDIELAAIPFNTLADHYGERLAREQLALEHESYEMGEARFRKMFERQLKAGEVADNAAAKPLITTLLPKMIARINDWFEEVKAKRGKRPTAFQFLQEIKPEAVAYITIKTTLACLTSADNTTVQAVASAIGRAIEDEARFGRIRDLEAKHFKKNVEEQLNKRVGHVYKKAFMQVVEADMLSTGLLGGEAWSSWHKEDSIHVGVRCIEMLIESTGMVSLHRQNAGVVGQDSETIELAPEYAEAIATRAGALAGISPMFQPCVVPPKPWTGITGGGYWAAGRKPLQLVRTRSLAALRRYEEVSMPEVIKAVNIAQNTAWRVNKKVLDVANTITQWQHCPVADVPAMDRGEMPARPLDIDTNEIALKAWKKEASAFYRKDKARVSRRLSMEFMLSQANKFANYKAIWFPQNMDWRGRVYAVPMFNPQGNDMTKGLLTFAQGKPIGEDGFYWLKIHGANTAGVDKVPFPQRIKFVEDNHTNIMECAKAPLENTWWAEQDSPFCFLAFCFEYAGVINHGLSYNCSLPLAFDGSCSGIQHFSAMLRDEIGGKAVNLLPSAEVQDIYRIVSDKVNEVLKQDLINGTSTTLETVTDKKTGEITERTKYGTKVMAQWWLEHGVNRGVTKRSVMTLVYGSKEFGFRDQVLSDTIQPAIDNGKGDMFLNPNQAAGYMAKLIWNAVSVTVVAAVEAMNWLKSAAKLLAAEVKDKKTDTVLRGRCAVHWVTPDGFPVWQEYKKPIQTRLNLMFLGQFRLQPTINTNKDSEIDAHKQESGIAPNFVHSQDGNHLRMTVVWAHEKYGIESFALIHDSFGTIPADAANLFKAVRETMVSTYESCDVLADFYDQFADQLHESQLDKMPALPAKGNLNLRDILKSDFAFA

SEQ ID NO: 509 - DNA, 2670 bp, synthetic construct
  misc_feature 1..2670: note = Variant of RNA polymerase
  source 1..2670: mol_type = other DNA
atgcaccatcaccatcaccatatgaacacgattaacatcgctaagaacgacttctctgacatcgaactggctgctatcccgttcaacactctggctgaccattacggtgagcgtttagctcgcgaacagttggcccttgagcatgagtcttacgagatgggtgaagcacgcttccgcaagatgtttgagcgtcaacttaaagctggtgaggttgcggataacgctgccactaagcctctcatcactaccctactccctaagatgattgcacgcatcaacgactggtttgaggaagtgaaagctaagcgcggcaagcgcccgacagccttccagttcctgcaagaaatcaagccggaagccgtagcgtacatcaccattaagaccactctggcttgcctaaccagtgcggacaatacaaccgttcaggctgtagcaagcgcaatcggtcgggccattgaggacgaggctcgcttcggtcgtatccgtgaccttgaagctaagcacttcaaggagaacgttgaggaacaactcaacaagcgcgtagggcacgtctacaagaaagcatttatgcaagttgtcgaggctgacgtgctctctaagggtctactcggtggcgaggcgtggtcttcgtggcataaggaagactctattcatgtaggagtacgctgcatcgagatgctcattgagtcaaccggaatggttagcttacaccgccaaaatgctggcgtagtaggtcaagactctgagactatcgaactcgcacctgaatacgctgaggctatcgcaacccgtgcaggtgcgctggctggcatctctccgatgttccaaccttgcgtagttcctcctaagccgtggactggcattactggtggtggctattgggctgcggggcgcaaacccctgcagttagtacgtactcgcagtctggcggcgcttcgccgctatgaagaagtgtcgatgccggaggtcatcaaagcagtcaacattgcgcagaatacagcatggcgtgtgaacaagaaagttctcgacgtagcgaatgcaatcacccaatggcagcactgtccagtcgcggatgtgcctgcgatggatcgtggcgaaatgccagctcgtccgttggacatcgataccaacgagattgcacttaaagcgtggaagaaagaagcttccgcgttctaccgcaaagacaaagcacgcgttagccgtcgtctgtcaatggagtttatgttatctcaggcgaacaagtttgcgaattacaaagcaatctggtttccgcaaaacatggattggcgtgggcgcgtgtacgctgtcccgatgttcaatcctcagggcaacgatatgacgaaaggcctgctgacctttgcgcagggtaaacccattggtgaagacggcttctattggctcaagattcatggcgcaaatacagctggagtggataaagtaccgtttccacaacgcatcaaatttgttgaggataaccatacgaatattatggaatgcgcgaaagcaccgctggaaaacacttggtgggcggaacaggactcgccgttctgttttctggcgttctgctttgagtatgctggtgtcatcaatcacggtctgtcgtacaactgtagcttgcctctggcatttgatggtagttgctccggcattcaacatttctcagcgatgttacgcgacgaaattggcggcaaagctgtgaatctcctcccatctgcggaagtgcaggatatttatcgtatcgtcagcgacaaagttaacgaggtactgaaacaagatctgattaacggtacctctaccaccttggaaacggtgactgataagaagacaggcgaaattaccgaacgcacgaaatacgggaccaaagttatggcacagtggtggttagaacacggtgtgaatcgtggcgtcacgaaacgctcggttatgactttggtgtatgggagcaaagagtttggattccgcgatcaagtgctgagtgacaccattcaaccggcgatcgataacggcaaaggtgacatgtttctgaatccgaatcaggctgctggttacatggcgaaactgatctggaacgcagtgtccgtcaccgtagtcgcagcagttgaggcgatgaactggctgaaaagtgcggcgaaattacttgctgctgaagtgaaggataagaagacggatacagttctgcgtggccgctgcgcagtacattgggtgactcccgacggcttccctgtgtggcaggaatacaagaagcctattcagacgcgcttgaacctgatgttcctcggtcagttccgcttacagcctaccattaacaccaacaaagatagcgagattgatgcacacaaacaggagtctggtatcgctcctaactttgtacacagccaagacggtaaccaccttcgtatgactgtagtgtgggcacacgagaagtacggaatcgaatcttttgcactgattcacgactccttcggtaccattccggctgacgctgcgaacctgttcaaagcagtgcgcgaaactatggtttcgacatatgagtcttgtgatgtactggctgatttctacgaccagttcgctgaccagttgcacgagtctcaattggacaaaatgccagcacttccggctaaaggtaacttgaacctccgtgacatcttaaaatcggacttcgcgttcgcg

SEQ ID NO: 510 - protein, 890 aa, synthetic construct
  REGION 1..890: note = Variant of RNA polymerase
MHHHHHHMNTINIAKNDFSDIELAAIPFNTLADHYGERLAREQLALEHESYEMGEARFRKMFERQLKAGEVADNAATKPLITTLLPKMIARINDWFEEVKAKRGKRPTAFQFLQEIKPEAVAYITIKTTLACLTSADNTTVQAVASAIGRAIEDEARFGRIRDLEAKHFKENVEEQLNKRVGHVYKKAFMQVVEADVLSKGLLGGEAWSSWHKEDSIHVGVRCIEMLIESTGMVSLHRQNAGVVGQDSETIELAPEYAEAIATRAGALAGISPMFQPCVVPPKPWTGITGGGYWAAGRKPLQLVRTRSLAALRRYEEVSMPEVIKAVNIAQNTAWRVNKKVLDVANAITQWQHCPVADVPAMDRGEMPARPLDIDTNEIALKAWKKEASAFYRKDKARVSRRLSMEFMLSQANKFANYKAIWFPQNMDWRGRVYAVPMFNPQGNDMTKGLLTFAQGKPIGEDGFYWLKIHGANTAGVDKVPFPQRIKFVEDNHTNIMECAKAPLENTWWAEQDSPFCFLAFCFEYAGVINHGLSYNCSLPLAFDGSCSGIQHFSAMLRDEIGGKAVNLLPSAEVQDIYRIVSDKVNEVLKQDLINGTSTTLETVTDKKTGEITERTKYGTKVMAQWWLEHGVNRGVTKRSVMTLVYGSKEFGFRDQVLSDTIQPAIDNGKGDMFLNPNQAAGYMAKLIWNAVSVTVVAAVEAMNWLKSAAKLLAAEVKDKKTDTVLRGRCAVHWVTPDGFPVWQEYKKPIQTRLNLMFLGQFRLQPTINTNKDSEIDAHKQESGIAPNFVHSQDGNHLRMTVVWAHEKYGIESFALIHDSFGTIPADAANLFKAVRETMVSTYESCDVLADFYDQFADQLHESQLDKMPALPAKGNLNLRDILKSDFAFA

SEQ ID NO: 511 - DNA, 2670 bp, synthetic construct
  misc_feature 1..2670: note = Variant of RNA polymerase
  source 1..2670: mol_type = other DNA
atgcaccatcaccatcaccatatgaacacgattaacatcgctaagaacgacttctctgacatcgaactggctgctatcccgttcaacactctggctgaccattacggtgagcgtttagctcgcgaacagttggcccttgagcatgagtcttacgagatgggtgaagcacgcttccgcaagatgtttgagcgtcaacttaaagctggtgaggttgcggataacgctgccactaagcctctcatcactaccctactccctaagatgattgcacgcatcaacgactggtttgaggaagtgaaagctaagcgcggcaagcgcccgacagccttccagttcctgcaagaaatcaagccggaagccgtagcgtacatcaccattaagaccactctggcttgcctaaccagtgcggacaatacaaccgttcaggctgtagcaagcgcaatcggtcgggccattgaggacgaggctcgcttcggtcgtatccgtgaccttgaagctaagcacttcaagaaaaacgttgaggaacaactcaacaagcgcgtagggcacgtctacaagaaagcatttatgcaagttgtcgaggctgacatgctctctaagggtctactcggtggcgaggcgtggtcttcgtggcataaggaagactctattcatgtaggagtacgctgcatcgagatgctcattgagtcaaccggaatggttagcttacaccgccaaaatgctggcgtagtaggtcaagactctgagactatcgaactcgcacctgaatacgctgaggctatcgcaacccgtgcaggtgcgctggctggcatctctccgatgttccaaccttgcgtagttcctcctaagccgtggactggcattactggtggtggctattgggctgcggggcgcaaacccctgcagttagtacgtactcgcagtctggcggcgcttcgccgctatgaagaagtgtcgatgccggaggtcatcaaagcagtcaacattgcgcagaatacagcatggcgtgtgaacaagaaagttctcgacgtagcgaatgcaatcacccaatggcagcactgtccagtcgcggatgtgcctgcgatggatcgtggcgaaatgccagctcgtccgttggacatcgataccaacgagattgcacttaaagcgtggaagaaagaagcttccgcgttctaccgcaaagacaaagcacgcgttagccgtcgtctgtcaatggagtttatgttatctcaggcgaacaagtttgcgaattacaaagcaatctggtttccgcaaaacatggattggcgtgggcgcgtgtacgctgtcccgatgttcaatcctcagggcaacgatatgacgaaaggcctgctgacctttgcgcagggtaaacccattggtgaagacggcttctattggctcaagattcatggcgcaaatacagctggagtggataaagtaccgtttccacaacgcatcaaatttgttgaggataaccatacgaatattatggaatgcgcgaaagcaccgctggaaaacacttggtgggcggaacaggactcgccgttctgttttctggcgttctgctttgagtatgctggcgtcatcaatagtggtctgtcgtacaactgtagcttgcctctggcatttgatggtagttgctccggcattcaacatttctcagcgatgttacgcgacgaaattggcggcaaagctgtgaatctcctcccatctgcggaacctcaggatatttatcgtatcgtcagcgacaaagttaacgaggtactgaaacaagatctgattaacggtacctctaccaccttggaaacggtgactgataagaagacaggcgaaattaccgaacgcacgaaatacgggaccaaagttatggcacagtggtggttagaacacggtgtgaatcgtggcgtcacgaaacgctcggttatgactttggtgtatgggagcaaagagtttggattccgcgatcaagtgctgagtgacaccattcaaccggcgatcgataacggcaaaggtgacatgtttctgaatccgaatcaggctgctggttacatggcgaaactgatctggaacgcagtgtccgtcaccgtagtcgcagcagttgaggcgatgaactggctgaaaagtgcggcgaaattacttgctgctgaagtgaaggataagaagacggatacagttctgcgtggccgctgcgcagtacattgggtgactcccgacggcttccctgtgtggcaggaatacaagaagcctattcagacgcgcttgaacctgatgttcctcggtcagttccgcttacagcctaccattaacaccaacaaagatagcgagattgatgcacacaaacaggagtctggtatcgctcctaactttgtacacagccaagacggtaaccaccttcgtatgactgtagtgtgggcacacgagaagtacggaatcgaatcttttgcactgattcacgactccttcggtaccattccggctgacgctgcgaacctgttcaaagcagtgcgcgaaactatggtttcgacatatgagtcttgtgatgtactggctgatttctacgaccagttcgctgaccagttgcacgagtctcaattggacaaaatgccagcacttccggctaaaggtaacttgaacctccgtgacatcttaaaatcggacttcgcgttcgcg

SEQ ID NO: 512 - protein, 890 aa, synthetic construct
  REGION 1..890: note = Variant of RNA polymerase
MHHHHHHMNTINIAKNDFSDIELAAIPFNTLADHYGERLAREQLALEHESYEMGEARFRKMFERQLKAGEVADNAATKPLITTLLPKMIARINDWFEEVKAKRGKRPTAFQFLQEIKPEAVAYITIKTTLACLTSADNTTVQAVASAIGRAIEDEARFGRIRDLEAKHFKKNVEEQLNKRVGHVYKKAFMQVVEADMLSKGLLGGEAWSSWHKEDSIHVGVRCIEMLIESTGMVSLHRQNAGVVGQDSETIELAPEYAEAIATRAGALAGISPMFQPCVVPPKPWTGITGGGYWAAGRKPLQLVRTRSLAALRRYEEVSMPEVIKAVNIAQNTAWRVNKKVLDVANAITQWQHCPVADVPAMDRGEMPARPLDIDTNEIALKAWKKEASAFYRKDKARVSRRLSMEFMLSQANKFANYKAIWFPQNMDWRGRVYAVPMFNPQGNDMTKGLLTFAQGKPIGEDGFYWLKIHGANTAGVDKVPFPQRIKFVEDNHTNIMECAKAPLENTWWAEQDSPFCFLAFCFEYAGVINSGLSYNCSLPLAFDGSCSGIQHFSAMLRDEIGGKAVNLLPSAEPQDIYRIVSDKVNEVLKQDLINGTSTTLETVTDKKTGEITERTKYGTKVMAQWWLEHGVNRGVTKRSVMTLVYGSKEFGFRDQVLSDTIQPAIDNGKGDMFLNPNQAAGYMAKLIWNAVSVTVVAAVEAMNWLKSAAKLLAAEVKDKKTDTVLRGRCAVHWVTPDGFPVWQEYKKPIQTRLNLMFLGQFRLQPTINTNKDSEIDAHKQESGIAPNFVHSQDGNHLRMTVVWAHEKYGIESFALIHDSFGTIPADAANLFKAVRETMVSTYESCDVLADFYDQFADQLHESQLDKMPALPAKGNLNLRDILKSDFAFA

SEQ ID NO: 513 - DNA, 2670 bp, synthetic construct
  misc_feature 1..2670: note = Variant of RNA polymerase
  source 1..2670: mol_type = other DNA
atgcaccatcaccatcaccatatgaacacgattaacatcgctaagaacgacttctctgacatcgaactggctgctatcccgttcaacactctggctgaccattacggtgagcgtttagctcgcgaacagttggcccttgagcatgagtcttacgagatgggtgaagcacgcttccgcaagatgtttgagcgtcaacttaaagctggtgaggttgcggataacgctgccactaagcctctcatcactaccctactccctaagatgattgcacgcatcaacgactggtttgaggaagtgaaagctaagcgcggcaagcgcccgacagccttccagttcctgcaagaaatcaagccggaagccgtagcgtacatcaccattaagaccactctggcttgcctaaccagtgcggacaatacaaccgttcaggctgtagcaagcgcaatcggtcgggccattgaggacgaggctcgcttcggtcgtatccgtgaccttgaagctaagcacttcaaggagaacgttgaggaacaactcaacaagcgcgtagggcacgtctacaagaaagcatttatgcaagttgtcgaggctgacatgctctctaagggtctactcggtggcgaggcgtggtcttcgtggcataaggaagactctattcatgtaggagtacgctgcatcgagatgctcattgagtcaaccggaatggttagcttacaccgccaaaatgctggcgtagtaggtcaagactctgagactatcgaactcgcacctgaatacgctgaggctatcgcaacccgtgcaggtgcgctggctggcatctctccgatgttccaaccttgcgtagttcctcctaagccgtggactggcattactggtggtggctattgggctgcggggcgcaaacccctgcagttagtacgtactcgcagtctggcggcgcttcgccgctatgaagaagtgtcgatgccggaggtcatcaaagcagtcaacattgcgcagaatacagcatggcgtgtgaacaagaaagttctcgacgtagcgaatgcaatcacccaatggcagcactgtccagtcgcggatgtgcctgcgatggatcgtggcgaaatgccagctcgtccgttggacatcgataccaacgagattgcacttaaagcgtggaagaaagaagcttccgcgttctaccgcaaagacaaagcacgcgttagccgtcgtctgtcaatggagtttatgttatctcaggcgaacaagtttgcgaattataaagcaatctggtttccgcaaaacatggattggcgtgggcgcgtgtacgctgtcccgatgttcaatcctcagggcaacgatatgacgaaaggcctgctgacctttgcgcagggtaaacccattggtgaagacggcttctattggctcaagattcatggcgcaaatacagctggagtggataaagtaccgtttccacaacgcatcaaatttgttgaggataaccatacgaatattatggaatgcgcgaaagcaccgctggaaaacacttggtgggcggaacaggactcgccgttctgttttctggcgttctgctttgagtatgctggcgtcatcaatcacggtctgtcgtacaactgtagcttgcctctggcatttgatggtagttgctccggcattcaacatttctcagcgatgttacgcgacgaaattggcggcaaagctgtgaatctcctcccatctgcggaagtgcaggatatttatcgtatcgtcagcgacaaagttaacgaggtactgaaacaagatctgattaacggtacctctaccaccttggaaacggtgactgataagaagacaggcgaaattaccgaacgcacgaaatacgggaccaaagttatggcacagtggtggttagaacacggtgtgaatcgtggcgtcacgaaacgctcggttatgactttggtgtatgggagcaaagagtttggattccgcgatcaagtgctgagtgacaccattcaaccggcgatcgataacggcaaaggtgacatgtttctgaatccgaatcaggctgctggttacatggcgaaactgatctggaatgcagtgtccgtcaccgtagtcgcagcagttgaggcgatgaactggctgaaaagtgcggcgaaattacttgctgctgaagtgaaggatcctaagacggatacagttctgcgtggccgctgcgcagtacattgggtgactcccgacggcttccctgtgtggcaggaatacaagaagcctattcagacgcgcttgaacctgatgttcctcggtcagttccgcttacagcctaccattaacaccaacaaagatagcgagattgatgcacacaaacaggagtctggtatcgctcctaactttgtacacagccaagacggtaaccaccttcgtatgactgtagtgtgggcacacgagaagtacggaatcgaatcttttgcactgattcacgactccttcggtaccattccggctgacgctgcgaacctgttcaaagcagtgcgcgaaactatggtttcgacatatgagtcttgtgatgtactggctgatttctacgaccagttcgctgaccagttgcacgagtctcaattggacaaaatgccagcacttccggctaaaggtaacttgaacctccgtgacatcttaaaatcggacttcgcgttcgcg

SEQ ID NO: 514 - protein, 890 aa, synthetic construct
  REGION 1..890: note = Variant of RNA polymerase
MHHHHHHMNTINIAKNDFSDIELAAIPFNTLADHYGERLAREQLALEHESYEMGEARFRKMFERQLKAGEVADNAATKPLITTLLPKMIARINDWFEEVKAKRGKRPTAFQFLQEIKPEAVAYITIKTTLACLTSADNTTVQAVASAIGRAIEDEARFGRIRDLEAKHFKENVEEQLNKRVGHVYKKAFMQVVEADMLSKGLLGGEAWSSWHKEDSIHVGVRCIEMLIESTGMVSLHRQNAGVVGQDSETIELAPEYAEAIATRAGALAGISPMFQPCVVPPKPWTGITGGGYWAAGRKPLQLVRTRSLAALRRYEEVSMPEVIKAVNIAQNTAWRVNKKVLDVANAITQWQHCPVADVPAMDRGEMPARPLDIDTNEIALKAWKKEASAFYRKDKARVSRRLSMEFMLSQANKFANYKAIWFPQNMDWRGRVYAVPMFNPQGNDMTKGLLTFAQGKPIGEDGFYWLKIHGANTAGVDKVPFPQRIKFVEDNHTNIMECAKAPLENTWWAEQDSPFCFLAFCFEYAGVINHGLSYNCSLPLAFDGSCSGIQHFSAMLRDEIGGKAVNLLPSAEVQDIYRIVSDKVNEVLKQDLINGTSTTLETVTDKKTGEITERTKYGTKVMAQWWLEHGVNRGVTKRSVMTLVYGSKEFGFRDQVLSDTIQPAIDNGKGDMFLNPNQAAGYMAKLIWNAVSVTVVAAVEAMNWLKSAAKLLAAEVKDPKTDTVLRGRCAVHWVTPDGFPVWQEYKKPIQTRLNLMFLGQFRLQPTINTNKDSEIDAHKQESGIAPNFVHSQDGNHLRMTVVWAHEKYGIESFALIHDSFGTIPADAANLFKAVRETMVSTYESCDVLADFYDQFADQLHESQLDKMPALPAKGNLNLRDILKSDFAFA

SEQ ID NO: 515 - DNA, 2670 bp, synthetic construct
  misc_feature 1..2670: note = Variant of RNA polymerase
  source 1..2670: mol_type = other DNA
atgcaccatcaccatcaccatatgaacacgattaacatcgctaagaacgacttctctgacatcgaactggctgctatcccgttcaacactctggctgaccattacggtgagcgtttagctcgcgaacagttggcccttgagcatgagtcttacgagatgggtgaagcacgcttccgcaagatgtttgagcgtcaacttaaagctggtgaggttgcggataacgctgccgctaagcctctcatcactaccctactccctaagatgattgcacgcatcaacgactggtttgaggaagtgaaagctaagcgcggcaagcgcccgacagccttccagttcctgcaagaaatcaagccggaagccgtagcgtacatcaccattaagaccactctggcttgcctaaccagtgcggacaatacaaccgttcaggctgtagcaagcgcaatcggtcgggccattgaggacgaggctcgcttcggtcgtatccgtgaccttgaagctaagcacttcaagaaaaacgttgaggaacaactcaacaagcgcgtagggcacgtctacaagaaagcatttatgcaagttgtcgaggctgacgtgctctctaagggtctactcggtggcgaggcgtggtcttcgtggcataaggaagactctattcatgtaggagtacgctgcatcgagatgctcattgagtcaaccggaatggttagcttacaccgccaaaatgctggcgtagtaggtcaagactctgagactatcgaactcgcacctgaatacgctgaggctatcgcaacccgtgcaggtgcgctggctggcatctctccgatgttccaaccttgcgtagttcctcctaagccgtggactggcattactggtggtggctattgggctgcggggcgcaaacccctgcagttagtacgtactcgcagtctggcggcgcttcgccgctatgaagaagtgtcgatgccggaggtcatcaaagcagtcaacattgcgcagaatacagcatggcgtgtgaacaagaaagttctcgacgtagcgaatgcaatcacccaatggcagcactgtccagtcgcggatgtgcctgcgatggatcgtggcgaaatgccagctcgtccgttggacatcgataccaacgagattgcacttaaagcgtggaagaaagaagcttccgcgttctaccgcaaagacaaagcacgcgttagccgtcgtctgtcaatggagtttatgttatctcaggcgaacaagtttgcgaattataaagcaatctggtttccgcaaaacatggattggcgtgggcgcgtgtacgctgtcccgatgttcaatcctcagggcaacgatatgacgaaaggcctgctgacctttgcgcagggtaaacccattggtgaagacggcttctattggctcaagattcatggcgcaaatacagctggagtggataaagtaccgtttccacaacgcatcaaatttgttgaggataaccatacgaatattatggaatgcgcgaaagcaccgctggaaaacacttggtgggcggaacaggactcgccgttctgttttctggcgttctgctttgagtatgctcgtgtcatcaatcacggtctgtcgtacaactgtagcttgcctctggcatttgatggtagttgctccggcattcaacatttctcagcgatgttacgcgacgaaattggcggcaaagctgtgaatctcctcccatctgcggaagtgcaggatatttatcgtatcgtcagcgacaaagttaacgaggtactgaaacaagatctgattaacggtacctctaccaccttggaaacggtgactgataagaagacaggcgaaattaccgaacgcacgaaatacgggaccaaagttatggcacagtggtggttagaacacggtgtgaatcgtggcgtcacgaaacgctcggttatgactttggtgtatgggagcaaagagtttggattccgcgatcaagtgctgagtgacaccattcaaccggcgatcgataacggcaaaggtgacatgtttctgaatccgaatcaggctgctggttacatggcgaaactgatctggaatgcagtgtccgtcaccgtagtcgcagcagttgaggcgatgaactggctgaaaagtgcggcgaaattacttgctgctgaagtgaaggataagaagacggatacagttctgcgtggccgctgcgcagtacattgggtgactcccgacggcttccctgtgtggcaggaatacaagaagcctattcagacgcgcttgaacctgatgttcctcggtcagttccgcttacagcctaccattaacaccaacaaagatagcgagattgatgcacacaaacaggagtctggtatcgctcctaactttgtacacagccaagacggtaaccaccttcgtatgactgtagtgtgggcacacgagaagtacggaatcgaatcttttgcactgattcacgactccttcggtaccattccggctgacgctgcgaacctgttcaaagcagtgcgcgaaactatggtttcgacatatgagtcttgtgatgtactggctgatttctacgaccagttcgctgaccagttgcacgagtctcaattggacaaaatgccagcacttccggctaaaggtaacttgaacctccgtgacatcttaaaatcggacttcgcgttcgcg

SEQ ID NO: 516 - protein, 890 aa, synthetic construct
  REGION 1..890: note = Variant of RNA polymerase
MHHHHHHMNTINIAKNDFSDIELAAIPFNTLADHYGERLAREQLALEHESYEMGEARFRKMFERQLKAGEVADNAAAKPLITTLLPKMIARINDWFEEVKAKRGKRPTAFQFLQEIKPEAVAYITIKTTLACLTSADNTTVQAVASAIGRAIEDEARFGRIRDLEAKHFKKNVEEQLNKRVGHVYKKAFMQVVEADVLSKGLLGGEAWSSWHKEDSIHVGVRCIEMLIESTGMVSLHRQNAGVVGQDSETIELAPEYAEAIATRAGALAGISPMFQPCVVPPKPWTGITGGGYWAAGRKPLQLVRTRSLAALRRYEEVSMPEVIKAVNIAQNTAWRVNKKVLDVANAITQWQHCPVADVPAMDRGEMPARPLDIDTNEIALKAWKKEASAFYRKDKARVSRRLSMEFMLSQANKFANYKAIWFPQNMDWRGRVYAVPMFNPQGNDMTKGLLTFAQGKPIGEDGFYWLKIHGANTAGVDKVPFPQRIKFVEDNHTNIMECAKAPLENTWWAEQDSPFCFLAFCFEYARVINHGLSYNCSLPLAFDGSCSGIQHFSAMLRDEIGGKAVNLLPSAEVQDIYRIVSDKVNEVLKQDLINGTSTTLETVTDKKTGEITERTKYGTKVMAQWWLEHGVNRGVTKRSVMTLVYGSKEFGFRDQVLSDTIQPAIDNGKGDMFLNPNQAAGYMAKLIWNAVSVTVVAAVEAMNWLKSAAKLLAAEVKDKKTDTVLRGRCAVHWVTPDGFPVWQEYKKPIQTRLNLMFLGQFRLQPTINTNKDSEIDAHKQESGIAPNFVHSQDGNHLRMTVVWAHEKYGIESFALIHDSFGTIPADAANLFKAVRETMVSTYESCDVLADFYDQFADQLHESQLDKMPALPAKGNLNLRDILKSDFAFA

SEQ ID NO: 517 - DNA, 2670 bp, synthetic construct
  misc_feature 1..2670: note = Variant of RNA polymerase
  source 1..2670: mol_type = other DNA
atgcaccatcaccatcaccatatgaacacgattaacatcgctaagaacgacttctctgacatcgaactggctgctatcccgttcaacactctggctgaccattacggtgagcgtttagctcgcgaacagttggcccttgagcatgagtcttacgagatgggtgaagcacgcttccgcaagatgtttgagcgtcaacttaaagctggtgaggttgcggataacgctgccgccaagcctctcatcactaccctactccctaagatgattgcacgcatcaacgactggtttgaggaagtgaaagctaagcgcggcaagcgcccgacagccttccagttcctgcaagaaatcaagccggaagccgtagcgtacatcaccattaagaccactctggcttgcctaaccagtgcggacaatacaaccgttcaggctgtagcaagcgcaatcggtcgggccattgaggacgaggctcgcttcggtcgtatccgtgaccttgaagctaagcacttcaagaaaaacgttgaggaacaactcaacaagcgcgtagggcacgtctacaagaaagcatttatgcaagttgtcgaggctgacatgctctctacgggtctactcggtggcgaggcgtggtcttcgtggcataaggaagactctattcatgtaggagtacgctgcatcgagatgctcattgagtcaaccggaatggttagcttacaccgccaaaatgctggcgtagtaggtcaagactctgagactatcgaactcgcacctgaatacgctgaggctatcgcaacccgtgcaggtgcgctggctggcatctctccgatgttccaaccttgcgtagttcctcctaagccgtggactggcattactggtggtggctattgggctgcggggcgcaaacccctgcagttagtacgtactcgcagtctggcggcgcttcgccgctatgaagaagtgtcgatgccggaggtcatcaaagcagtcaacattgcgcagaatacagcatggcgtgtgaacaagaaagttctcgacgtagcgaatgcaatcacccaatggcagcactgtccagtcgcggatgtgcctgcgatggatcgtggcgaaatgccagctcgtccgttggacatcgataccaacgagattgcacttaaagcgtggaagaaagaagcttccgcgttctaccgcaaagacaaagcacgcgttagccgtcgtctgtcaatggagtttatgttatctcaggcgaacaagtttgcgaattataaagcaatctggtttccgcaaaacatggattggcgtgggcgcgtgtacgctgtcccgatgttcaatcctcagggcaacgatatgacgaaaggcctgctgacctttgcgcaggggaaacccattggtgaagacggcttctattggctcaagattcatggcgcaaatacagctggagtggataaagtaccgtttccacaacgcatcaaatttgttgaggataaccatacgaatattatggaatgcgcgaaagcaccgctggaaaacacttggtgggcggaacaggactcgccgttctgttttctggcgttctgctttgagtatgctggcgtcatcaatcacggtctgtcgtacaactgtagcttgcctctggcatttgatggtagttgctccggcattcaacatttctcagcgatgttacgcgacgaaattggcggcaaagctgtgaatctcctcccatctgcggaagtgcaggatatttatcgtatcgtcagcgacaaagttaacgaggtactgaaacaagatctgattaacggtacctctaccaccttggaaacggtgactgataagaagacaggcgaaattaccgaacgcacgaaatacgggaccaaagttatggcacagtggtggttagaacacggtgtgaatcgtggcgtcacgaaacgctcggttatgactttggtgtatgggagcaaagagtttggattccgcgatcaagtgctgagtgacaccattcaaccggcgatcgataacggcaaaggtgacatgtttctgaatccgaatcaggctgctggttacatggcgaaactgatctggaacgcagtgtccgtcaccgtagtcgcagcagttgaggcgatgaactggctgaaaagtgcggcgaaattacttgctgctgaagtgaaggataagaagacggatacagttctgcgtggccgctgcgcagtacattgggtgactcccgacggcttccctgtgtggcaggaatacaagaagcctattcagacgcgcttgaacctgatgttcctcggtcagttccgcttacagcctaccattaacaccaacaaagatagcgagattgatgcacacaaacaggagtctggtatcgctcctaactttgtacacagccaagacggtaaccaccttcgtatgactgtagtgtgggcacacgagaagtacggaatcgaatcttttgcactgattcacgactccttcggtaccattccggctgacgctgcgaacctgttcaaagcagtgcgcgaaactatggtttcgacatatgagtcttgtgatgtactggctgatttctacgaccagttcgctgaccagttgcacgagtctcaattggacaaaatgccagcacttccggctaaaggtaacttgaacctccgtgacatcttaaaatcggacttcgcgttcgcg

SEQ ID NO: 518 - protein, 890 aa, synthetic construct
  REGION 1..890: note = Variant of RNA polymerase
MHHHHHHMNTINIAKNDFSDIELAAIPFNTLADHYGERLAREQLALEHESYEMGEARFRKMFERQLKAGEVADNAAAKPLITTLLPKMIARINDWFEEVKAKRGKRPTAFQFLQEIKPEAVAYITIKTTLACLTSADNTTVQAVASAIGRAIEDEARFGRIRDLEAKHFKKNVEEQLNKRVGHVYKKAFMQVVEADMLSTGLLGGEAWSSWHKEDSIHVGVRCIEMLIESTGMVSLHRQNAGVVGQDSETIELAPEYAEAIATRAGALAGISPMFQPCVVPPKPWTGITGGGYWAAGRKPLQLVRTRSLAALRRYEEVSMPEVIKAVNIAQNTAWRVNKKVLDVANAITQWQHCPVADVPAMDRGEMPARPLDIDTNEIALKAWKKEASAFYRKDKARVSRRLSMEFMLSQANKFANYKAIWFPQNMDWRGRVYAVPMFNPQGNDMTKGLLTFAQGKPIGEDGFYWLKIHGANTAGVDKVPFPQRIKFVEDNHTNIMECAKAPLENTWWAEQDSPFCFLAFCFEYAGVINHGLSYNCSLPLAFDGSCSGIQHFSAMLRDEIGGKAVNLLPSAEVQDIYRIVSDKVNEVLKQDLINGTSTTLETVTDKKTGEITERTKYGTKVMAQWWLEHGVNRGVTKRSVMTLVYGSKEFGFRDQVLSDTIQPAIDNGKGDMFLNPNQAAGYMAKLIWNAVSVTVVAAVEAMNWLKSAAKLLAAEVKDKKTDTVLRGRCAVHWVTPDGFPVWQEYKKPIQTRLNLMFLGQFRLQPTINTNKDSEIDAHKQESGIAPNFVHSQDGNHLRMTVVWAHEKYGIESFALIHDSFGTIPADAANLFKAVRETMVSTYESCDVLADFYDQFADQLHESQLDKMPALPAKGNLNLRDILKSDFAFA

SEQ ID NO: 519 - DNA, 2670 bp, synthetic construct
  misc_feature 1..2670: note = Variant of RNA polymerase
  source 1..2670: mol_type = other DNA
atgcaccatcaccatcaccatatgaacacgattaacatcgctaagaacgacttctctgacatcgaactggctgctatcccgttcaacactctggctgaccattacggtgagcgtttagctcgcgaacagttggcccttgagcatgagtcttacgagatgggtgaagcacgcttccgcaagatgtttgagcgtcaacttaaagctggtgaggttgcggataacgctgccgccaagcctctcatcactaccctactccctaagatgattgcacgcatcaacgactggtttgaggaagtgaaagctaagcgcggcaagcgcccgacagccttccagttcctgcaagaaatcaagccggaagccgtagcgtacatcaccattaagaccactctggcttgcctaaccagtgcggacaatacaaccgttcaggctgtagcaagcgcaatcggtcgggccattgaggacgaggctcgcttcggtcgtatccgtgaccttgaagctaagcacttcaagaaaaacgttgaggaacaactcaacaagcgcgtagggcacgtctacaagaaagcatttatgcaagttgtcgaggctgacgtgctctctacgggtctactcggtggcgaggcgtggtcttcgtggcataaggaagactctattcatgtaggagtacgctgcatcgagatgctcattgagtcaaccggaatggttagcttacaccgccaaaatgctggcgtagtaggtcaagactctgagactatcgaactcgcacctgaatacgctgaggctatcgcaacccgtgcaggtgcgctggctggcatctctccgatgttccaaccttgcgtagttcctcctaagccgtggactggcattactggtggtggctattgggctgcggggcgcaaacccctgcagttagtacgtactcgcagtctggcggcgcttcgccgctatgaagaagtgtcgatgccggaggtcatcaaagcagtcaacattgcgcagaatacagcatggcgtgtgaacaagaaagttctcgacgtagcgaatgcgatcacccaatggcagcactgtccagtcgcggatgtgcctgcgatggatcgtggcgaaatgccagctcgtccgttggacatcgataccaacgagattgcacttaaagcgtggaagaaagaagcttccgcgttctaccgcaaagacaaagcacgcgttagccgtcgtctgtcaatggagtttatgttatctcaggcgaacaagtttgcgaatgaaaaagcaatctggtttccgcaaaacatggattggcgtgggcgcgtgtacgctgtcccgatgttcaatcctcagggcaacgatatgacgaaaggcctgctgacctttgcgcagggtaaacccattggtgaagacggcttctattggctcaagattcatggcgcaaatacagctggagtggataaagtaccgtttccacaacgcatcaaatttgttgaggataaccatacgaatattatggaatgcgcgaaagcaccgctggaaaacacttggtgggcggaacaggactcgccgttctgttttctggcgttctgctttgagtatgctggcgtcatcaatcacggtctgtcgtacaactgtagcttgcctctggcatttgatggtagttgctccggcattcaacatttctcagcgatgttacgcgacgaaattggcggcaaagctgtgaatctcctcccatctgcggaagtacaggatatttatcgtatcgtcagcgacaaagttaacgaggtactgaaacaagatctgattaacggtacctctaccaccgtggaaacggtgactgataagaagacaggcgaaattaccgaacgcacgaaatacgggaccaaagttatggcacagtggtggttagaacacggtgtgaatcgtggcgtcacgaaacgctcggttatgactttggtgtatgggagcaaagagtttggattccgcgatcaagtgctgagtgacaccattcaaccggcgatcgataacggcaaaggtgacatgtttctgaatccgaatcaggctgctggttacatggcgaaactgatctggaacgcagtgtccgtcaccgtagtcgcagcagttgaggcgatgaactggctgaaaagtgcggcgaaattacttgctgctgaagtgaaggataagaagacggatacagttctgcgtggccgctgcgcagtacattgggtgactcccgacggcttccctgtgtggcaggaatacaagaagcctattcagacgcgcttgaacctgatgttcctcggtcagttccgcttacagcctaccattaacaccaacaaagatagcgagattgatgcacacaaacaggagtctggtatcgctcctaactttgtacacagccaagacggtaaccaccttcgtatgactgtagtgtgggcacacgagaagtacggaatcgaatcttttgcactgattcacgactccttcggtaccattccggctgacgctgcgaacctgttcaaagcagtgcgcgaaactatggtttcgacatatgagtcttgtgatgtactggctgatttctacgaccagttcgctgaccagttgcacgagtctcaattggacaaaatgccagcacttccggctaaaggtaacttgaacctccgtgacatcttaaaatcggacttcgcgttcgcg

SEQ ID NO: 520 - protein, 890 aa, synthetic construct
  REGION 1..890: note = Variant of RNA polymerase
MHHHHHHMNTINIAKNDFSDIELAAIPFNTLADHYGERLAREQLALEHESYEMGEARFRKMFERQLKAGEVADNAAAKPLITTLLPKMIARINDWFEEVKAKRGKRPTAFQFLQEIKPEAVAYITIKTTLACLTSADNTTVQAVASAIGRAIEDEARFGRIRDLEAKHFKKNVEEQLNKRVGHVYKKAFMQVVEADVLSTGLLGGEAWSSWHKEDSIHVGVRCIEMLIESTGMVSLHRQNAGVVGQDSETIELAPEYAEAIATRAGALAGISPMFQPCVVPPKPWTGITGGGYWAAGRKPLQLVRTRSLAALRRYEEVSMPEVIKAVNIAQNTAWRVNKKVLDVANAITQWQHCPVADVPAMDRGEMPARPLDIDTNEIALKAWKKEASAFYRKDKARVSRRLSMEFMLSQANKFANEKAIWFPQNMDWRGRVYAVPMFNPQGNDMTKGLLTFAQGKPIGEDGFYWLKIHGANTAGVDKVPFPQRIKFVEDNHTNIMECAKAPLENTWWAEQDSPFCFLAFCFEYAGVINHGLSYNCSLPLAFDGSCSGIQHFSAMLRDEIGGKAVNLLPSAEVQDIYRIVSDKVNEVLKQDLINGTSTTVETVTDKKTGEITERTKYGTKVMAQWWLEHGVNRGVTKRSVMTLVYGSKEFGFRDQVLSDTIQPAIDNGKGDMFLNPNQAAGYMAKLIWNAVSVTVVAAVEAMNWLKSAAKLLAAEVKDKKTDTVLRGRCAVHWVTPDGFPVWQEYKKPIQTRLNLMFLGQFRLQPTINTNKDSEIDAHKQESGIAPNFVHSQDGNHLRMTVVWAHEKYGIESFALIHDSFGTIPADAANLFKAVRETMVSTYESCDVLADFYDQFADQLHESQLDKMPALPAKGNLNLRDILKSDFAFA

SEQ ID NO: 521 - DNA, 2670 bp, synthetic construct
  misc_feature 1..2670: note = Variant of RNA polymerase
  source 1..2670: mol_type = other DNA
atgcaccatcaccatcaccatatgaacacggagaacatcgctaagaacgacttctctgacatcgaactggctgctatcccgttcaacactctggctgaccattacggtgagcgtttagctcgcgaacagttggcccttgagcatgagtcttacgagatgggtgaagcacgcttccgcaagatgtttgagcgtcaacttaaagctggtgaggttgcggataacgctgccgccaagcctctcatcactaccctactccctaagatgattgcacgcatcaacgactggtttgaggaagtgaaagctaagcgcggcaagcgcccgacagccttccagttcctgcaagaaatcaagccggaagccgtagcgtacatcaccattaagaccactctggcttgcctaaccagtgcggacaatacaaccgttcaggctgtagcaagcgcaatcggtcgggccattgaggacgaggctcgcttcggtcgtatccgtgaccttgaagctaagcacttcaagaaaaacgttgaggaacaactcaacaagcgcgtagggcacgtctacaagaaagcatttatgcaagttgtcgaggctgacatgctctctaagggtctactcggtggcgaggcgtggtcttcgtggcataaggaagactctattcatgtaggagtacgctgcatcgagatgctcattgagtcaaccggaatggttagcttacaccgccaaaatgctggcgtagtaggtcaagactctgagactatcgaactcgcacctgaatacgctgaggctatcgcaacccgtgcaggtgcgctggctggcatctctccgatgttccaaccttgcgtagttcctcctaagccgtggactggcattactggtggtggctattgggctgcggggcgcaaacccctgcagttagtacgtactcgcagtctggcggcgcttcgccgctatgaagaagtgtcgatgccggaggtcatcaaagcagtcaacattgcgcagaatacagcatggcgtgtgaacaagaaagttctcgacgtagcgaatgcaatcacccaatggcagcactgtccagtcgcggatgtgcctgcgatggatcgtggcgaaatgccagctcgtccgttggacatcgataccaacgagattgcacttaaagcgtggaagaaagaagcttccgcgttctaccgcaaagacaaagcacgcgttagccgtcgtctgtcaatggagtttatgttatctcaggcgaacaagtttgcgaattataaagcaatctggtttccgcaaaacatggattggcgtgggcgcgtgtacgctgtcccgatgttcaatcctcagggcaacgatatgacgaaaggcctgctgacctttgcgcagggtaaacccattggtgaagacggcttctattggctcaagattcatggcgcaaatacagctggagtggataaagtaccgtttccacaacgcatcaaatttgttgaggataaccatacgaatattatggaatgcgcgaaagcaccgctggaaaacacttggtgggcggaacaggactcgccgttctgttttctggcgttctgctttgagtatgctggcgtcatcaatagtggtctgtcgtacaactgtagcttgcctctggcatttgatggtagttgctccggcattcaacatttctcagcgatgttacgcgacgaaattggcggcaaagctgtgaatctcctcccatctgcggaagtgcaggatatttatcgtatcgtcgcggacaaagttaacgaggtactgaaacaagatctgattaacggtacctctaccaccttggaaacggtgactgataagaagacaggcgaaattaccgaacgcacgaaatacgggaccaaagttatggcacagtggtggttagaacacggtgtgaatcgtggcgtcacgaaacgctcggttatgactttggtgtatgggagcaaagagtttggattccgcgatcaagtgctgagtgacaccattcaaccggcgatcgataacggcaaaggtgacatgtttctgaatccgaatcaggctgctggttacatggcgaaactgatctggaatgcagtgtccgtcaccgtagtcgcagcagttgaggcgatgaactggctgaaaagtgcggcgaaattacttgctgctgaagtgaaggataagaagacggatacagttctgcgtggccgctgcgcagtacattgggtgactcccgacggcttccctgtgtggcaggaatacaagaagcctattcagacgcgcttgaacctgatgttcctcggtcagttccgcttacagcctaccattaacaccaacaaagatagcgagattgatgcacacaaacaggagtctggtatcgctcctaactttgtacacagccaagacggtaaccaccttcgtatgactgtagtgtgggcacacgagaagtacggaatcgaatcttttgcactgattcacgactccttcggtaccattccggctgacgctgcgaacctgttcaaagcagtgcgcgaaactatggtttcgacatatgagtcttgtgatgtactggctgatttctacgaccagttcgctgaccagttgcacgagtctcaattggacaaaatgccagcacttccggctaaaggtaacttgaacctccgtgacatcttaaaatcggacttcgcgttcgcg

SEQ ID NO: 522 - protein, 890 aa, synthetic construct
  REGION 1..890: note = Variant of RNA polymerase
MHHHHHHMNTENIAKNDFSDIELAAIPFNTLADHYGERLAREQLALEHESYEMGEARFRKMFERQLKAGEVADNAAAKPLITTLLPKMIARINDWFEEVKAKRGKRPTAFQFLQEIKPEAVAYITIKTTLACLTSADNTTVQAVASAIGRAIEDEARFGRIRDLEAKHFKKNVEEQLNKRVGHVYKKAFMQVVEADMLSKGLLGGEAWSSWHKEDSIHVGVRCIEMLIESTGMVSLHRQNAGVVGQDSETIELAPEYAEAIATRAGALAGISPMFQPCVVPPKPWTGITGGGYWAAGRKPLQLVRTRSLAALRRYEEVSMPEVIKAVNIAQNTAWRVNKKVLDVANAITQWQHCPVADVPAMDRGEMPARPLDIDTNEIALKAWKKEASAFYRKDKARVSRRLSMEFMLSQANKFANYKAIWFPQNMDWRGRVYAVPMFNPQGNDMTKGLLTFAQGKPIGEDGFYWLKIHGANTAGVDKVPFPQRIKFVEDNHTNIMECAKAPLENTWWAEQDSPFCFLAFCFEYAGVINSGLSYNCSLPLAFDGSCSGIQHFSAMLRDEIGGKAVNLLPSAEVQDIYRIVADKVNEVLKQDLINGTSTTLETVTDKKTGEITERTKYGTKVMAQWWLEHGVNRGVTKRSVMTLVYGSKEFGFRDQVLSDTIQPAIDNGKGDMFLNPNQAAGYMAKLIWNAVSVTVVAAVEAMNWLKSAAKLLAAEVKDKKTDTVLRGRCAVHWVTPDGFPVWQEYKKPIQTRLNLMFLGQFRLQPTINTNKDSEIDAHKQESGIAPNFVHSQDGNHLRMTVVWAHEKYGIESFALIHDSFGTIPADAANLFKAVRETMVSTYESCDVLADFYDQFADQLHESQLDKMPALPAKGNLNLRDILKSDFAFA

SEQ ID NO: 523 - DNA, 2670 bp, synthetic construct
  misc_feature 1..2670: note = Variant of RNA polymerase
  source 1..2670: mol_type = other DNA
atgcaccatcaccatcaccatatgaacacgattaacggtgctaagaacgacttctctgacatcgaactggctgctatcccgttcaacactctggctgaccattacggtgagcgtttagctcgcgaacagttggcccttgagcatgagtcttacgagatgggtgaagcacgcttccgcaagatgtttgagcgtcaacttaaagctggtgaggttgcggataacgctgccgccaagcctctcatcactaccctactccctaagatgattgcacgcatcaacgactggtttgaggaagtgaaagctaagcgcggcaagcgcccgacagccttccagttcctgcaagaaatcaagccggaagccgtagcgtacatcaccattaagaccactctggcttgcctaaccagtgcggacaatacaaccgttcaggctgtagcaagcgcaatcggtcgggccattgaggacgaggctcgcttcggtcgtatccgtgaccttgaagctaagcacttcaagaaaaacgttgaggaacaactcaacaagcgcgtagggcacgtctacaagaaagcatttatgcaagttgtcgaggctgacgtgctctctacgggtctactcggtggcgaggcgtggtcttcgtggcataaggaagactctattcatgtaggagtacgctgcatcgagatgctcattgagtcaaccggaatggttagcttacaccgccaaaatgctggcgtagtaggtcaagactctgagactatcgaactcgcacctgaatacgctgaggctatcgcaacccgtgcaggtgcgctggctggcatctctccgatgttccaaccttgcgtagttcctcctaagccgtggactggcattactggtggtggctattgggctgcggggcgcaaacccctgcagttagtacgtactcgcagtctggcggcgcttcgccgctatgaagaagtgtcgatgccggaggtcatcaaagcagtcaacattgcgcagaatacagcatggcgtgttaacaagaaagttctcgacgtagcgaatgcgatcacccaatggcagcactgtccagtcgcggatgtgcctgcgatggatcgtggcgaaatgccagctcgtccgttggacatcgataccaacgagattgcacttaaagcgtggaagaaagaagcttccgcgttctaccgcaaagacaaagcacgcgttagccgtcgtctgtcaatggagtttatgttatctcaggcgaacaagtttgcgaatgaaaaagcaatctggtttccgcaaaacatggattggcgtgggcgcgtgtacgctgtcccgatgttcaatcctcagggcaacgatatgacgaaaggcctgctgacctttgcgcaggggaaacccattggtgaagacggcttctattggctcaagattcatggcgcaaatacagctggagtggataaagtaccgtttccacaacgcatcaaatttgttgaggataaccatacgaatattatggaatgcgcgaaagcaccgctggaaaacacttggtgggcggaacaggactcgccgttctgttttctggcgttctgctttgagtatgctggtgtcatcaatcacggtctgtcgtacaactgtagcttgcctctggcatttgatggtagttgctccggcattcaacatttctcagcgatgttacgcgacgaaattggcggcaaagctgtgaatctcctcccatctgcggaagtgcaggatatttatcgtatcgtcagcgacaaagttaacgaggtactgaaacaagatctgattaacggtacctctaccaccttggaaacggtgactgataagaagacaggcgaaattaccgaacgcacgaaatacgggaccaaagttatggcacagtggtggttagaacacggtgtgaatcgtggcgtcacgaaacgctcggttatgactttggtgtatgggagcaaagagtttggattccgcgatcaagtgctgagtgacaccattcaaccggcgatcgataacggcaaaggtgacatgtttctgaatccgaatcaggctgctggttacatggcgaaactgatctggaacgcagtgtccgggaccgtagtcgcagcagttgaggcgatgaactggctgaaaagtgcggcgaaattacttgctgctgaagtgaaggataagaagacggatacagttctgcgtggccgctgcgcagtacattgggtgactcccgacggcttccctgtgtggcaggaatacaagaagcctattcagacgcgcttgaacctgatgttcctcggtcagttccgcttacagcctaccattaacaccaacaaagatagcgagattgatgcacacaaacaggagtctggtatcgctcctaactttgtacacagccaagacggtaaccaccttcgtatgactgtagtgtgggcacacgagaagtacggaatcgaatcttttgcactgattcacgactccttcggtaccattccggctgacgctgcgaacctgttcaaagcagtgcgcgaaactatggtttcgacatatgagtcttgtgatgtactggctgatttctacgaccagttcgctgaccagttgcacgagtctcaattggacaaaatgccagcacttccggctaaaggtaacttgaacctccgtgacatcttaaaatcggacttcgcgttcgcg

SEQ ID NO: 524 - protein, 890 aa, synthetic construct
  REGION 1..890: note = Variant of RNA polymerase
MHHHHHHMNTINGAKNDFSDIELAAIPFNTLADHYGERLAREQLALEHESYEMGEARFRKMFERQLKAGEVADNAAAKPLITTLLPKMIARINDWFEEVKAKRGKRPTAFQFLQEIKPEAVAYITIKTTLACLTSADNTTVQAVASAIGRAIEDEARFGRIRDLEAKHFKKNVEEQLNKRVGHVYKKAFMQVVEADVLSTGLLGGEAWSSWHKEDSIHVGVRCIEMLIESTGMVSLHRQNAGVVGQDSETIELAPEYAEAIATRAGALAGISPMFQPCVVPPKPWTGITGGGYWAAGRKPLQLVRTRSLAALRRYEEVSMPEVIKAVNIAQNTAWRVNKKVLDVANAITQWQHCPVADVPAMDRGEMPARPLDIDTNEIALKAWKKEASAFYRKDKARVSRRLSMEFMLSQANKFANEKAIWFPQNMDWRGRVYAVPMFNPQGNDMTKGLLTFAQGKPIGEDGFYWLKIHGANTAGVDKVPFPQRIKFVEDNHTNIMECAKAPLENTWWAEQDSPFCFLAFCFEYAGVINHGLSYNCSLPLAFDGSCSGIQHFSAMLRDEIGGKAVNLLPSAEVQDIYRIVSDKVNEVLKQDLINGTSTTLETVTDKKTGEITERTKYGTKVMAQWWLEHGVNRGVTKRSVMTLVYGSKEFGFRDQVLSDTIQPAIDNGKGDMFLNPNQAAGYMAKLIWNAVSGTVVAAVEAMNWLKSAAKLLAAEVKDKKTDTVLRGRCAVHWVTPDGFPVWQEYKKPIQTRLNLMFLGQFRLQPTINTNKDSEIDAHKQESGIAPNFVHSQDGNHLRMTVVWAHEKYGIESFALIHDSFGTIPADAANLFKAVRETMVSTYESCDVLADFYDQFADQLHESQLDKMPALPAKGNLNLRDILKSDFAFA

SEQ ID NO: 525 - DNA, 2670 bp, synthetic construct
  misc_feature 1..2670: note = Variant of RNA polymerase
  source 1..2670: mol_type = other DNA
atgcaccatcaccatcaccatatgaacacgattaacggtgctaagaacgacttctctgacatcgaactggctgctatcccgttcaacactctggctgaccattacggtgagcgtttagctcgcgaacagttggcccttgagcatgagtcttacgagatgggtgaagcacgcttccgcaagatgtttgagcgtcaacttaaagctggtgaggttgcggataacgctgccactaagcctctcatcactaccctactccctaagatgattgcacgcatcaacgactggtttgaggaagtgaaagctaagcgcggcaagcgcccgacagccttccagttcctgcaagaaatcaagccggaagccgtagcgtacatcaccattaagaccactctggcttgcctaaccagtgcggacaatacaaccgttcaggctgtagcaagcgcaatcggtcgggccattgaggacgaggctcgcttcggtcgtatccgtgaccttgaagctaagcacttcaagaaaaacgttgaggaacaactcaacaagcgcgtagggcacgtctacaagaaagcatttatgcaagttgtcgaggctgacatgctctctaatggtctactcggtggcgaggcgtggtcttcgtggcataaggaagactctattcatgtaggagtacgctgcatcgagatgctcattgagtcaaccggaatggttagcttacaccgccaaaatgctggcgtagtaggtcaagactctgagactatcgaactcgcacctgaatacgctgaggctatcgcaacccgtgcaggtgcgctggctggcatctctccgatgttccaaccttgcgtagttcctcctaagccgtggactggcattactggtggtggctattgggctgcggggcgcaaacccctgcagttagtacgtactcgcagtctggcggcgcttcgccgctatgaagaagtgtcgatgccggaggtcatcaaagcagtcaacattgcgcagaatacagcatggcgtgtgaacaagaaagttctcgacgtagcgaatgcaatcacccaatggcagcactgtccagtcgcggatgtgcctgcgatggatcgtggcgaaatgccagctcgtccgttggacatcgataccaacgagattgcacttaaagcgtggaagaaagaagcttccgcgttctaccgcaaagacaaagcacgcgttagccgtcgtctgtcaatggagtttatgttatctcaggcgaacaagtttgcgaatgaaaaagcaatctggtttccgcaaaacatggattggcgtgggcgcgtgtacgctgtcccgatgttcaatcctcagggcaacgatatgacgaaaggcctgctgacctttgcgcagaccaaacccattggtgaagacggcttctattggctcaagattcatggcgcaaatacagctggagtggataaagtaccgtttccacaacgcatcaaatttgttgaggataaccatacgaatattatggaatgcgcgaaagcaccgctggaaaacacttggtgggcggaacaggactcgccgttctgttttctggcgttctgctttgagtatgctggcgtcatcaatcacggtctgtcgtacaactgtagcttgcctctggcatttgatggtagttgctccggcattcaacatttctcagcgatgttacgcgacgaaattggcggcaaagctgtgaatctcctcccatctgcggaagtgcaggatatttatcgtatcgtcagcgacaaagttaacgaggtactgaaacaagatctgattaacggtacctctaccaccttggaaacggtgactgataagaagacaggcgaaattaccgaacgcacgaaatacgggaccaaagttatggcacagtggtggttagaacacggtgtgaatcgtggcgtcacgaaacgctcggttatgactttggtgtatgggagcaaagagtttggattccgcgatcaagtgctgagtgacaccattcaaccggcgatcgataacggcaaaggtgacatgtttctgaatccgaatcaggctgctggttacatggcgaaactgatctggaacgcagtgtccgtcaccgtagtcgcagcagttgaggcgatgaactggctgaaaagtgcggcgaaattacttgctgctgaagtgaaggataagaagacggatacagttctgcgtggccgctgcgcagtacattgggtgactcccgacggcttccctgtgtggcaggaatacaagaagcctattcagacgcgcttgaacctgatgttcctcggtcagttccgcttacagcctaccattaacaccaacaaagatagcgagattgatgcacacaaacaggagtctggtatcgctcctaactttgtacacagccaagacggtaaccaccttcgtatgactgtagtgtgggcacacgagaagtacggaatcgaatcttttgcactgattcacgactccttcggtaccattccggctgacgctgcgaacctgttcaaagcagtgcgcgaaactatggtttcgacatatgagtcttgtgatgtactggctgatttctacgaccagttcgctgaccagttgcacgagtctcaattggacaaaatgccagcacttccggctaaaggtaacttgaacctccgtgacatcttaaaatcggacttcgcgttcgct

SEQ ID NO: 526 - protein, 890 aa, synthetic construct
  REGION 1..890: note = Variant of RNA polymerase
MHHHHHHMNTINGAKNDFSDIELAAIPFNTLADHYGERLAREQLALEHESYEMGEARFRKMFERQLKAGEVADNAATKPLITTLLPKMIARINDWFEEVKAKRGKRPTAFQFLQEIKPEAVAYITIKTTLACLTSADNTTVQAVASAIGRAIEDEARFGRIRDLEAKHFKKNVEEQLNKRVGHVYKKAFMQVVEADMLSNGLLGGEAWSSWHKEDSIHVGVRCIEMLIESTGMVSLHRQNAGVVGQDSETIELAPEYAEAIATRAGALAGISPMFQPCVVPPKPWTGITGGGYWAAGRKPLQLVRTRSLAALRRYEEVSMPEVIKAVNIAQNTAWRVNKKVLDVANAITQWQHCPVADVPAMDRGEMPARPLDIDTNEIALKAWKKEASAFYRKDKARVSRRLSMEFMLSQANKFANEKAIWFPQNMDWRGRVYAVPMFNPQGNDMTKGLLTFAQTKPIGEDGFYWLKIHGANTAGVDKVPFPQRIKFVEDNHTNIMECAKAPLENTWWAEQDSPFCFLAFCFEYAGVINHGLSYNCSLPLAFDGSCSGIQHFSAMLRDEIGGKAVNLLPSAEVQDIYRIVSDKVNEVLKQDLINGTSTTLETVTDKKTGEITERTKYGTKVMAQWWLEHGVNRGVTKRSVMTLVYGSKEFGFRDQVLSDTIQPAIDNGKGDMFLNPNQAAGYMAKLIWNAVSVTVVAAVEAMNWLKSAAKLLAAEVKDKKTDTVLRGRCAVHWVTPDGFPVWQEYKKPIQTRLNLMFLGQFRLQPTINTNKDSEIDAHKQESGIAPNFVHSQDGNHLRMTVVWAHEKYGIESFALIHDSFGTIPADAANLFKAVRETMVSTYESCDVLADFYDQFADQLHESQLDKMPALPAKGNLNLRDILKSDFAFA

SEQ ID NO: 527 - DNA, 2670 bp, synthetic construct
  misc_feature 1..2670: note = Variant of RNA polymerase
  source 1..2670: mol_type = other DNA
atgcaccatcaccatcaccatatgaacacgattaacatcgctaagaacgacttctctgacatcgaactggctgctatcccgttcaacactctggctgaccattacggtgagcgtttagctcgcgaacagttggcccttgagcatgagtcttacgagatgggtgaagcacgcttccgcaagatgtttgagcgtcaacttaaagctggtgaggttgcggataacgctgccactaagcctctcatcactaccctactccctaagatgattgcacgcatcaacgactggtttgaggaagtgaaagctaagcgcggcaagcgcccgacagccttccagttcctgcaagaaatcaagccggaagccgtagcgtacatcaccattaagaccactctggcttgcctaaccagtgcggacaatacaaccgttcaggctgtagcaagcgcaatcggtcgggccattgaggacgaggctcgcttcggtcgtatccgtgaccttgaagctaagcacttcaagaagaacgttgaggaacaactcaacaagcgcgtagggcacgtctacaagaaagcatttatgcaagttgtcgaggctgacatgctctctaagggtctactcggtggcgaggcgtggtcttcgtggcataaggaagactctattcatgtaggagtacgctgcatcgagatgctcattgagtcaaccggaatggttagcttacaccgccaaaatgctggcgtagtaggtcaagactctgagactatcgaactcgcacctgaatacgctgaggctatcgcaacccgtgcaggtgcgctggctggcatctctccgatgttccaaccttgcgtagttcctcctaagccgtggactggcattactggtggtggctattgggctgcggggcgcaaacccctgcagttagtacgtactcgcagtctggcggcgcttcgccgctatgaagaagtgtcgatgccggaggtcatcaaagcagtcaacattgcgcagaatacagcatggcgtgtgaacaagaaagttctcgacgtagcgaatgcgatcacccaatggcagcactgtccagtcgcggatgtgcctgcgatggatcgtggcgaaatgccagctcgtccgttggacatcgataccaacgagattgcacttaaagcgtggaagaaagaagcttccgcgttctaccgcaaagacaaagcacgcgttagccgtcgtctgtcaatggagtttatgttatctcaggcgaacaagtttgcgaattacaaagcaatctggtttccgcaaaacatggattggcgtgggcgcgtgtacgctgtcccgatgttcaatcctcagggcaacgatatgacgaaaggcctgctgacctttgcgcagaccaaacccattggtgaagacggcttctattggctcaagattcatggcgcaaatacagctggagtggataaagtaccgtttccacaacgcatcaaatttgttgaggataaccatacgaatattatggaatgcgcgaaagcaccgctggaaaacacttggtgggcggaacaggactcgccgttctgttttctggcgttctgctttgagtatgctggcgtcatcaatcacggtctgtcgtacaactgtagcttgcctctggcatttgatggtagttgctccggcattcaacatttctcagcgatgttacgcgacgaaattggcggcaaagctgtgaatctcctcccatctgcggaagtacaggatatttatcgtatcgtcgcggacaaagttaacgaggtactgaaacaagatctgattaacggtacctctaccaccttggaaacggtgactgataagaagacaggcgaaattaccgaacgcacgaaatacgggaccaaagttatggcacagtggtggttagaacacggtgtgaatcgtggcgtcacgaaacgctcggttatgactttggtgtatgggagcaaagagtttggattccgcgatcaagtgctgagtgacaccattcaaccggcgatcgataacggcaaaggtgacatgtttctgaatccgaatcaggctgctggttacatggcgaaactgatctggaacgcagtgtccgtgaccgtagtcgcagcagttgaggcgatgaactggctgaaaagtgcggcgaaattacttgctgctgaagtgaaggataagaagacggatacagttctgcgtggccgctgcgcagtacattgggtgactcccgacggcttccctgtgtggcaggaatacaagaagcctattcagacgcgcttgaacctgatgttcctcggtcagttccgcttacagcctaccattaacaccaacaaagatagcgagattgatgcacacaaacaggagtctggtatcgctcctaactttgtacacagccaagacggtaaccaccttcgtatgactgtagtgtgggcacacgagaagtacggaatcgaatcttttgcactgattcacgactccttcggtaccattccggctgacgctgcgaacctgttcaaagcagtgcgcgaaactatggtttcgacatatgagtcttgtgatgtactggctgatttctacgaccagttcgctgaccagttgcacgagtctcaattggacaaaatgccagcacttccggctaaaggtaacttgaacctccgtgacatcttaaaatcggacttcgcgttcgcg

SEQ ID NO: 528 - protein, 890 aa, synthetic construct
  REGION 1..890: note = Variant of RNA polymerase
MHHHHHHMNTINIAKNDFSDIELAAIPFNTLADHYGERLAREQLALEHESYEMGEARFRKMFERQLKAGEVADNAATKPLITTLLPKMIARINDWFEEVKAKRGKRPTAFQFLQEIKPEAVAYITIKTTLACLTSADNTTVQAVASAIGRAIEDEARFGRIRDLEAKHFKKNVEEQLNKRVGHVYKKAFMQVVEADMLSKGLLGGEAWSSWHKEDSIHVGVRCIEMLIESTGMVSLHRQNAGVVGQDSETIELAPEYAEAIATRAGALAGISPMFQPCVVPPKPWTGITGGGYWAAGRKPLQLVRTRSLAALRRYEEVSMPEVIKAVNIAQNTAWRVNKKVLDVANAITQWQHCPVADVPAMDRGEMPARPLDIDTNEIALKAWKKEASAFYRKDKARVSRRLSMEFMLSQANKFANYKAIWFPQNMDWRGRVYAVPMFNPQGNDMTKGLLTFAQTKPIGEDGFYWLKIHGANTAGVDKVPFPQRIKFVEDNHTNIMECAKAPLENTWWAEQDSPFCFLAFCFEYAGVINHGLSYNCSLPLAFDGSCSGIQHFSAMLRDEIGGKAVNLLPSAEVQDIYRIVADKVNEVLKQDLINGTSTTLETVTDKKTGEITERTKYGTKVMAQWWLEHGVNRGVTKRSVMTLVYGSKEFGFRDQVLSDTIQPAIDNGKGDMFLNPNQAAGYMAKLIWNAVSVTVVAAVEAMNWLKSAAKLLAAEVKDKKTDTVLRGRCAVHWVTPDGFPVWQEYKKPIQTRLNLMFLGQFRLQPTINTNKDSEIDAHKQESGIAPNFVHSQDGNHLRMTVVWAHEKYGIESFALIHDSFGTIPADAANLFKAVRETMVSTYESCDVLADFYDQFADQLHESQLDKMPALPAKGNLNLRDILKSDFAFA

SEQ ID NO: 529 - DNA, 2670 bp, synthetic construct
  misc_feature 1..2670: note = Variant of RNA polymerase
  source 1..2670: mol_type = other DNA
atgcaccatcaccatcaccatatgaacacggagaacatcgctaagaacgacttctctgacatcgaactggctgctatcccgttcaacactctggctgaccattacggtgagcgtttagctcgcgaacagttggcccttgagcatgagtcttacgagatgggtgaagcacgcttccgcaagatgtttgagcgtcaacttaaagctggtgaggttgcggataacgctgccgccaagcctctcatcactaccctactccctaagatgattgcacgcatcaacgactggtttgaggaagtgaaagctaagcgcggcaagcgcccgacagccttccagttcctgcaagaaatcaagccggaagccgtagcgtacatcaccattaagaccactctggcttgcctaaccagtgcggacaatacaaccgttcaggctgtagcaagcgcaatcggtcgggccattgaggacgaggctcgcttcggtcgtatccgtgaccttgaagctaagcacttcaagaaaaacgttgaggaacaactcaacaagcgcgtagggcacgtctacaagaaagcatttatgcaagttgtcgaggctgacatgctctctaagggtctactcggtggcgaggcgtggtcttcgtggcataaggaagactctattcatgtaggagtacgctgcatcgagatgctcattgagtcaaccggaatggttagcttacaccgccaaaatgctggcgtagtaggtcaagactctgagactatcgaactcgcacctgaatacgctgaggctatcgcaacccgtgcaggtgcgctggctggcatctctccgatgttccaaccttgcgtagttcctcctaagccgtggactggcattactggtggtggctattgggctgcggggcgcaaacccctgcagttagtacgtactcgcagtctggcggcgcttcgccgctatgaagaagtgtcgatgccggaggtcatcaaagcagtcaacattgcgcagaatacagcatggcgtgtgaacaagaaagttctcgacgtagcgaatgcgatcacccaatggcagcactgtccagtcgcggatgtgcctgcgatggatcgtggcgaaatgccagctcgtccgttggacatcgataccaacgagattgcacttaaagcgtggaagaaagaagcttccgcgttctaccgcaaagacaaagcacgcgttagccgtcgtctgtcaatggagtttatgttatctcaggcgaacaagtttgcgaattataaagcaatctggtttccgcaaaacatggattggcgtgggcgcgtgtacgctgtcccgatgttcaatcctcagggcaacgatatgacgaaaggcctgctgacctttgcgcagggtaaacccattggtgaagacggcttctattggctcaagattcatggcgcaaatacagctggagtggataaagtaccgtttccacaacgcatcaaatttgttgaggataaccatacgaatattatggaatgcgcgaaagcaccgctggaaaacacttggtgggcggaacaggactcgccgttctgttttctggcgttctgctttgagtatgctggcgttatcaatcacggtctgtcgtacaactgtagcttgcctctggcatttgatggtagttgctccggcattcaacatttctcagcgatgttacgcgacgaaattggcggcaaagctgtgaatctcctcccatctgcggaagtgcaggatatttatcgtatcgtcagcgacaaagttaacgaggtactgaaacaagatctgattaacggtacctctaccaccttggaaacggtgactgataagaagacaggcgaaattaccgaacgcacgaaatacgggaccaaagttatggcacagtggtggttagaacacggtgtgaatcgtggcgtcacgaaacgctcggttatgactttggtgtatgggagcaaagagtttggattccgcgatcaagtgctgagtgacaccattcaaccggcgatcgataacggcaaaggtgacatgtttctgaatccgaatcaggctgctggttacatggcgaaactgatctgggatgcagtgtccgtcaccgtagtcgcagcagttgaggcgatgaactggctgaaaagtgcggcgaaattacttgctgctgaagtgaaggataagaagacggatacagttctgcgtggccgctgcgcagtacattgggtgactcccgacggcttccctgtgtggcaggaatacaagaagcctattcagacgcgcttgaacctgatgttcctcggtcagttccgcttacagcctaccattaacaccaacaaagatagcgagattgatgcacacaaacaggagtctggtatcgctcctaactttgtacacagccaagacggtaaccaccttcgtatgactgtagtgtgggcacacgagaagtacggaatcgaatcttttgcactgattcacgactccttcggtaccattccggctgacgctgcgaacctgttcaaagcagtgcgcgaaactatggtttcgacatatgagtcttgtgatgtactggctgatttctacgaccagttcgctgaccagttgcacgagtctcaattggacaaaatgccagcacttccggctaaaggtaacttgaacctccgtgacatcttaaaatcggacttcgcgttcgcg

SEQ ID NO: 530 - protein, 890 aa, synthetic construct
  REGION 1..890: note = Variant of RNA polymerase
MHHHHHHMNTENIAKNDFSDIELAAIPFNTLADHYGERLAREQLALEHESYEMGEARFRKMFERQLKAGEVADNAAAKPLITTLLPKMIARINDWFEEVKAKRGKRPTAFQFLQEIKPEAVAYITIKTTLACLTSADNTTVQAVASAIGRAIEDEARFGRIRDLEAKHFKKNVEEQLNKRVGHVYKKAFMQVVEADMLSKGLLGGEAWSSWHKEDSIHVGVRCIEMLIESTGMVSLHRQNAGVVGQDSETIELAPEYAEAIATRAGALAGISPMFQPCVVPPKPWTGITGGGYWAAGRKPLQLVRTRSLAALRRYEEVSMPEVIKAVNIAQNTAWRVNKKVLDVANAITQWQHCPVADVPAMDRGEMPARPLDIDTNEIALKAWKKEASAFYRKDKARVSRRLSMEFMLSQANKFANYKAIWFPQNMDWRGRVYAVPMFNPQGNDMTKGLLTFAQGKPIGEDGFYWLKIHGANTAGVDKVPFPQRIKFVEDNHTNIMECAKAPLENTWWAEQDSPFCFLAFCFEYAGVINHGLSYNCSLPLAFDGSCSGIQHFSAMLRDEIGGKAVNLLPSAEVQDIYRIVSDKVNEVLKQDLINGTSTTLETVTDKKTGEITERTKYGTKVMAQWWLEHGVNRGVTKRSVMTLVYGSKEFGFRDQVLSDTIQPAIDNGKGDMFLNPNQAAGYMAKLIWDAVSVTVVAAVEAMNWLKSAAKLLAAEVKDKKTDTVLRGRCAVHWVTPDGFPVWQEYKKPIQTRLNLMFLGQFRLQPTINTNKDSEIDAHKQESGIAPNFVHSQDGNHLRMTVVWAHEKYGIESFALIHDSFGTIPADAANLFKAVRETMVSTYESCDVLADFYDQFADQLHESQLDKMPALPAKGNLNLRDILKSDFAFA

SEQ ID NO: 531 - DNA, 2670 bp, synthetic construct
  misc_feature 1..2670: note = Variant of RNA polymerase
  source 1..2670: mol_type = other DNA
atgcaccatcaccatcaccatatgaacacggagaacatcgctaagaacgacttctctgacatcgaactggctgctatcccgttcaacactctggctgaccattacggtgagcgtttagctcgcgaacagttggcccttgagcatgagtcttacgagatgggtgaagcacgcttccgcaagatgtttgagcgtcaacttaaagctggtgaggttgcggataacgctgccgccaagcctctcatcactaccctactccctaagatgattgcacgcatcaacgactggtttgaggaagtgaaagctaagcgcggcaagcgcccgacagccttccagttcctgcaagaaatcaagccggaagccgtagcgtacatcaccattaagaccactctggcttgcctaaccagtgcggacaatacaaccgttcaggctgtagcaagcgcaatcggtcgggccattgaggacgaggctcgcttcggtcgtatccgtgaccttgaagctaagcacttcaagaaaaacgttgaggaacaactcaacaagcgcgtagggcacgtctacaagaaagcatttatgcaagttgtcgaggctgacatgctctctacgggtctactcggtggcgaggcgtggtcttcgtggcataaggaagactctattcatgtaggagtacgctgcatcgagatgctcattgagtcaaccggaatggttagcttacaccgccaaaatgctggcgtagtaggtcaagactctgagactatcgaactcgcacctgaatacgctgaggctatcgcaacccgtgcaggtgcgctggctggcatctctccgatgttccaaccttgcgtagttcctcctaagccgtggactggcattactggtggtggctattgggctgcggggcgcaaacccctgcagttagtacgtactcgcagtctggcggcgcttcgccgctatgaagaagtgtcgatgccggaggtcatcaaagcagtcaacattgcgcagaatacagcatggcgtgttaacaagaaagttctcgacgtagcgaatgcaatcacccaatggcagcactgtccagtcgcggatgtgcctgcgatggatcgtggcgaaatgccagctcgtccgttggacatcgataccaacgagattgcacttaaagcgtggaagaaagaagcttccgcgttctaccgcaaagacaaagcacgcgttagccgtcgtctgtcaatggagtttatgttatctcaggcgaacaagtttgcgaattacaaagcaatctggtttccgcaaaacatggattggcgtgggcgcgtgtacgctgtcccgatgttcaatcctcagggcaacgatatgacgaaaggcctgctgacctttgcgcagggtaaacccattggtgaagacggcttctattggctcaagattcatggcgcaaatacagctggagtggataaagtaccgtttccacaacgcatcaaatttgttgaggataaccatacgaatattatggaatgcgcgaaagcaccgctggaaaacacttggtgggcggaacaggactcgccgttctgttttctggcgttctgctttgagtatgctggtgtcatcaatcacggtctgtcgtacaactgtagcttgcctctggcatttgatggtagttgctccggcattcaacatttctcagcgatgttacgcgacgaaattggcggcaaagctgtgaatctcctcccatctgcggaagtacaggatatttatcgtatcgtcagcgacaaagttaacgaggtactgaaacaagatctgattaacggtacctctaccaccttggaaacggtgactgataagaagacaggcgaaattaccgaacgcacgaaatacgggaccaaagttatggcacagtggtggttagaacacggtgtgaatcgtggcgtcacgaaacgctcggttatgactttggtgtatgggagcaaagagtttggattccgcgatcaagtgctgagtgacaccattcaaccggcgatcgataacggcaaaggtgacatgtttctgaatccgaatcaggctgctggttacatggcgaaactgatctggaatgcagtgtccgtcaccgtagtcgcagcagttgaggcgatgaactggctgaaaagtgcggcgaaattacttgctgctgaagtgaaggataagaagacggatacagttctgcgtggccgctgcgcagtacattgggtgactcccgacggcttccctgtgtggcaggaatacaagaagcctattcagacgcgcttgaacctgatgttcctcggtcagttccgcttacagcctaccattaacaccaacaaagatagcgagattgatgcacacaaacaggagtctggtatcgctcctaactttgtacacagccaagacggtaaccaccttcgtatgactgtagtgtgggcacacgagaagtacggaatcgaatcttttgcactgattcacgactccttcggtaccattccggctgacgctgcgaacctgttcaaagcagtgcgcgaaactatggtttcgacatatgagtcttgtgatgtactggctgatttctacgaccagttcgctgaccagttgcacgagtctcaattggacaaaatgccagcacttccggctaaaggtaacttgaacctccgtgacatcttaaaatcggacttcgcgttcgcg

SEQ ID NO: 532 - protein, 890 aa, synthetic construct
  REGION 1..890: note = Variant of RNA polymerase
MHHHHHHMNTENIAKNDFSDIELAAIPFNTLADHYGERLAREQLALEHESYEMGEARFRKMFERQLKAGEVADNAAAKPLITTLLPKMIARINDWFEEVKAKRGKRPTAFQFLQEIKPEAVAYITIKTTLACLTSADNTTVQAVASAIGRAIEDEARFGRIRDLEAKHFKKNVEEQLNKRVGHVYKKAFMQVVEADMLSTGLLGGEAWSSWHKEDSIHVGVRCIEMLIESTGMVSLHRQNAGVVGQDSETIELAPEYAEAIATRAGALAGISPMFQPCVVPPKPWTGITGGGYWAAGRKPLQLVRTRSLAALRRYEEVSMPEVIKAVNIAQNTAWRVNKKVLDVANAITQWQHCPVADVPAMDRGEMPARPLDIDTNEIALKAWKKEASAFYRKDKARVSRRLSMEFMLSQANKFANYKAIWFPQNMDWRGRVYAVPMFNPQGNDMTKGLLTFAQGKPIGEDGFYWLKIHGANTAGVDKVPFPQRIKFVEDNHTNIMECAKAPLENTWWAEQDSPFCFLAFCFEYAGVINHGLSYNCSLPLAFDGSCSGIQHFSAMLRDEIGGKAVNLLPSAEVQDIYRIVSDKVNEVLKQDLINGTSTTLETVTDKKTGEITERTKYGTKVMAQWWLEHGVNRGVTKRSVMTLVYGSKEFGFRDQVLSDTIQPAIDNGKGDMFLNPNQAAGYMAKLIWNAVSVTVVAAVEAMNWLKSAAKLLAAEVKDKKTDTVLRGRCAVHWVTPDGFPVWQEYKKPIQTRLNLMFLGQFRLQPTINTNKDSEIDAHKQESGIAPNFVHSQDGNHLRMTVVWAHEKYGIESFALIHDSFGTIPADAANLFKAVRETMVSTYESCDVLADFYDQFADQLHESQLDKMPALPAKGNLNLRDILKSDFAFA

SEQ ID NO: 533 - DNA, 2670 bp, synthetic construct
  misc_feature 1..2670: note = Variant of RNA polymerase
  source 1..2670: mol_type = other DNA
atgcaccatcaccatcaccatatgaacacggagaacatcgctaagaacgacttctctgacatcgaactggctgctatcccgttcaacactctggctgaccattacggtgagcgtttagctcgcgaacagttggcccttgagcatgagtcttacgagatgggtgaagcacgcttccgcaagatgtttgagcgtcaacttaaagctggtgaggttgcggataacgctgccgctaagcctctcatcactaccctactccctaagatgattgcacgcatcaacgactggtttgaggaagtgaaagctaagcgcggcaagcgcccgacagccttccagttcctgcaagaaatcaagccggaagccgtagcgtacatcaccattaagaccactctggcttgcctaaccagtgcggacaatacaaccgttcaggctgtagcaagcgcaatcggtcgggccattgaggacgaggctcgcttcggtcgtatccgtgaccttgaagctaagcacttcaagaaaaacgttgaggaacaactcaacaagcgcgtagggcacgtctacaagaaagcatttatgcaagttgtcgaggctgacatgctctctaagggtctactcggtggcgaggcgtggtcttcgtggcataaggaagactctattcatgtaggagtacgctgcatcgagatgctcattgagtcaaccggaatggttagcttacaccgccaaaatgctggcgtagtaggtcaagactctgagactatcgaactcgcacctgaatacgctgaggctatcgcaacccgtgcaggtgcgctggctggcatctctccgatgttccaaccttgcgtagttcctcctaagccgtggactggcattactggtggtggctattgggctgcggggcgcaaacccctgcagttagtacgtactcgcagtctggcggcgcttcgccgctatgaagaagtgtcgatgccggaggtcatcaaagcagtcaacattgcgcagaatacagcatggcgtgttaacaagaaagttctcgacgtagcgaatgcaatcacccaatggcagcactgtccagtcgcggatgtgcctgcgatggatcgtggcgaaatgccagctcgtccgttggacatcgataccaacgagattgcacttaaagcgtggaagaaagaagcttccgcgttctaccgcaaagacaaagcacgcgttagccgtcgtctgtcaatggagtttatgttatctcaggcgaacaagtttgcgaattataaagcaatctggtttccgcaaaacatggattggcgtgggcgcgtgtacgctgtcccgatgttcaatcctcagggcaacgatatgacgaaaggcctgctgacctttgcgcaggagaaacccattggtgaagacggcttctattggctcaagattcatggcgcaaatacagctggagtggataaagtaccgtttccacaacgcatcaaatttgttgaggataaccatacgaatattatggaatgcgcgaaagcaccgctggaaaacacttggtgggcggaacaggactcgccgttctgttttctggcgttctgctttgagtatgctggcgtcatcaatagtggtctgtcgtacaactgtagcttgcctctggcatttgatggtagttgctccggcattcaacatttctcagcgatgttacgcgacgaaattggcggcaaagctgtgaatctcctcccatctgcggaagtgcaggatatttatcgtatcgtcagcgacaaagttaacgaggtactgaaacaagatctgattaacggtacctctaccaccttggaaacggtgactgataagaagacaggcgaaattaccgaacgcgcgaaatacgggaccaaagttatggcacagtggtggttagaacacggtgtgaatcgtggcgtcacgaaacgctcggttatgactttggtgtatgggagcaaagagtttggattccgcgatcaagtgctgagtgacaccattcaaccggcgatcgataacggcaaaggtgacatgtttctgaatccgaatcaggctgctggttacatggcgaaactgatctggaacgcagtgtccgtcaccgtagtcgcagcagttgaggcgatgaactggctgaaaagtgcggcgaaattacttgctgctgaagtgaaggataagaagacggatacagttctgcgtggccgctgcgcagtacattgggtgactcccgacggcttccctgtgtggcaggaatacaagaagcctattcagacgcgcttgaacctgatgttcctcggtcagttccgcttacagcctaccattaacaccaacaaagatagcgagattgatgcacacaaacaggagtctggtatcgctcctaactttgtacacagccaagacggtaaccaccttcgtatgactgtagtgtgggcacacgagaagtacggaatcgaatcttttgcactgattcacgactccttcggtaccattccggctgacgctgcgaacctgttcaaagcagtgcgcgaaactatggtttcgacatatgagtcttgtgatgtactggctgatttctacgaccagttcgctgaccagttgcacgagtctcaattggacaaaatgccagcacttccggctaaaggtaacttgaacctccgtgacatcttaaaatcggacttcgcgttcgcg

SEQ ID NO: 534 - protein, 890 aa, synthetic construct
  REGION 1..890: note = Variant of RNA polymerase
MHHHHHHMNTENIAKNDFSDIELAAIPFNTLADHYGERLAREQLALEHESYEMGEARFRKMFERQLKAGEVADNAAAKPLITTLLPKMIARINDWFEEVKAKRGKRPTAFQFLQEIKPEAVAYITIKTTLACLTSADNTTVQAVASAIGRAIEDEARFGRIRDLEAKHFKKNVEEQLNKRVGHVYKKAFMQVVEADMLSKGLLGGEAWSSWHKEDSIHVGVRCIEMLIESTGMVSLHRQNAGVVGQDSETIELAPEYAEAIATRAGALAGISPMFQPCVVPPKPWTGITGGGYWAAGRKPLQLVRTRSLAALRRYEEVSMPEVIKAVNIAQNTAWRVNKKVLDVANAITQWQHCPVADVPAMDRGEMPARPLDIDTNEIALKAWKKEASAFYRKDKARVSRRLSMEFMLSQANKFANYKAIWFPQNMDWRGRVYAVPMFNPQGNDMTKGLLTFAQEKPIGEDGFYWLKIHGANTAGVDKVPFPQRIKFVEDNHTNIMECAKAPLENTWWAEQDSPFCFLAFCFEYAGVINSGLSYNCSLPLAFDGSCSGIQHFSAMLRDEIGGKAVNLLPSAEVQDIYRIVSDKVNEVLKQDLINGTSTTLETVTDKKTGEITERAKYGTKVMAQWWLEHGVNRGVTKRSVMTLVYGSKEFGFRDQVLSDTIQPAIDNGKGDMFLNPNQAAGYMAKLIWNAVSVTVVAAVEAMNWLKSAAKLLAAEVKDKKTDTVLRGRCAVHWVTPDGFPVWQEYKKPIQTRLNLMFLGQFRLQPTINTNKDSEIDAHKQESGIAPNFVHSQDGNHLRMTVVWAHEKYGIESFALIHDSFGTIPADAANLFKAVRETMVSTYESCDVLADFYDQFADQLHESQLDKMPALPAKGNLNLRDILKSDFAFA

SEQ ID NO: 535 - DNA, 2670 bp, synthetic construct
  misc_feature 1..2670: note = Variant of RNA polymerase
  source 1..2670: mol_type = other DNA
atgcaccatcaccatcaccatatgaacacgattaacattgctaagaacgacttctctgacatcgaactggctgctatcccgttcaacactctggctgaccattacggtgagcgtttagctcgcgaacagttggcccttgagcatgagtcttacgagatgggtgaagcacgcttccgcaagatgtttgagcgtcaacttaaagctggtgaggttgcggataacgctgccactaagcctctcatcactaccctactccctaagatgattgcacgcatcaacgactggtttgaggaagtgaaagctaagcgcggcaagcgcccgacagccttccagttcctgcaagaaatcaagccggaagccgtagcgtacatcaccattaagaccactctggcttgcctaaccagtgcggacaatacaaccgttcaggctgtagcaagcgcaatcggtcgggccattgaggacgaggctcgcttcggtcgtatccgtgaccttgaagctaagcacttcaagaaaaacgttgaggaacaactcaacaagcgcgtagggcacgtctacaagaaagcatttatgcaagttgtcgaggctgacatgctctctaagggtctactcggtggcgaggcgtggtcttcgtggcataaggaagactctattcatgtaggagtacgctgcatcgagatgctcattgagtcaaccggaatggttagcttacaccgccaaaatgctggcgtagtaggtcaagactctgagactatcgaactcgcacctgaatacgctgaggctatcgcaacccgtgcaggtgcgctggctggcatctctccgatgttccaaccttgcgtagttcctcctaagccgtggactggcattactggtggtggctattgggctgcggggcgcaaacccctgcagttagtacgtactcgcagtctggcggcgcttcgccgctatgaagaagtgtcgatgccggaggtcatcaaagcagtcaacattgcgcagaatacagcatggcgtgtgaacaagaaagttctcgacgtagcgaatgcaatcacccaatggcagcactgtccagtcgcggatgtgcctgcgatggatcgtggcgaaatgccagctcgtccgttggacatcgataccaacgagattgcacttaaagcgtggaagaaagaagcttccgcgttctaccgcaaagacaaagcacgcgttagccgtcgtctgtcaatggagtttatgttatctcaggcgaacaagtttgcgaattacaaagcaatctggtttccgcaaaacatggattggcgtgggcgcgtgtacgctgtcccgatgttcaatcctcagggcaacgatatgacgaaaggcctgctgacctttgcgcagggtaaacccattggtgaagacggcttctattggctcaagattcatggcgcaaatacagctggagtggataaagtaccgtttccacaacgcatcaaatttgttgaggataaccatacgaatattatggaatgcgcgaaagcaccgctggaaaacacttggtgggcggaacaggactcgccgttctgttttctggcgttctgctttgagtatgctggtgtcatcaatcacggtctgtcgtacaactgtagcttgcctctggcatttgatggtagttgctccggcattcaacatttctcagcgatgttacgcgacgaaattggcggcaaagctgtgaatctcctcccatctgcggaataccaggatatttatcgtatcgtcagcgacaaagttaacgaggtactgaaacaagatctgattaacggtacctctaccaccttggaaacggtgactgataagaagacaggcgaaattaccgaacgcacgaaatacgggaccaaagttatggcacagtggtggttagaacacggtgtgaatcgtggcgtcacgaaacgctcggttatgactttggtgtatgggagcaaagagtttggattccgcgatcaagtgctgagtgacaccattcaaccggcgatcgataacggcaaaggtgacatgtttctgaatccgaatcaggctgctggttacatggcgaaactgatctggaacgcagtgtccgtcaccgtagtcgcagcagttgaggcgatgaactggctgaaaagtgcggcgaaattacttgctgctgaagtgaaggataagaagacggatacagttctgcgtggccgctgcgcagtacattgggtgactcccgacggcttccctgtgtggcaggaatacaagaagcctattcagacgcgcttgaacctgatgttcctcggtcagttccgcttacagcctaccattaacaccaacaaagatagcgagattgatgcacacaaacaggagtctggtatcgctcctaactttgtacacagccaagacggtaaccaccttcgtatgactgtagtgtgggcacacgagaagtacggaatcgaatcttttgcactgattcacgactccttcggtaccattccggctgacgctgcgaacctgttcaaagcagtgcgcgaaactatggtttcgacatatgagtcttgtgatgtactggctgatttctacgaccagttcgctgaccagttgcacgagtctcaattggacaaaatgccagcacttccggctaaaggtaacttgaacctccgtgacatcttaaaatcggacttcgcgttcgcg

SEQ ID NO: 536 - protein, 890 aa, synthetic construct
  REGION 1..890: note = Variant of RNA polymerase
MHHHHHHMNTINIAKNDFSDIELAAIPFNTLADHYGERLAREQLALEHESYEMGEARFRKMFERQLKAGEVADNAATKPLITTLLPKMIARINDWFEEVKAKRGKRPTAFQFLQEIKPEAVAYITIKTTLACLTSADNTTVQAVASAIGRAIEDEARFGRIRDLEAKHFKKNVEEQLNKRVGHVYKKAFMQVVEADMLSKGLLGGEAWSSWHKEDSIHVGVRCIEMLIESTGMVSLHRQNAGVVGQDSETIELAPEYAEAIATRAGALAGISPMFQPCVVPPKPWTGITGGGYWAAGRKPLQLVRTRSLAALRRYEEVSMPEVIKAVNIAQNTAWRVNKKVLDVANAITQWQHCPVADVPAMDRGEMPARPLDIDTNEIALKAWKKEASAFYRKDKARVSRRLSMEFMLSQANKFANYKAIWFPQNMDWRGRVYAVPMFNPQGNDMTKGLLTFAQGKPIGEDGFYWLKIHGANTAGVDKVPFPQRIKFVEDNHTNIMECAKAPLENTWWAEQDSPFCFLAFCFEYAGVINHGLSYNCSLPLAFDGSCSGIQHFSAMLRDEIGGKAVNLLPSAEYQDIYRIVSDKVNEVLKQDLINGTSTTLETVTDKKTGEITERTKYGTKVMAQWWLEHGVNRGVTKRSVMTLVYGSKEFGFRDQVLSDTIQPAIDNGKGDMFLNPNQAAGYMAKLIWNAVSVTVVAAVEAMNWLKSAAKLLAAEVKDKKTDTVLRGRCAVHWVTPDGFPVWQEYKKPIQTRLNLMFLGQFRLQPTINTNKDSEIDAHKQESGIAPNFVHSQDGNHLRMTVVWAHEKYGIESFALIHDSFGTIPADAANLFKAVRETMVSTYESCDVLADFYDQFADQLHESQLDKMPALPAKGNLNLRDILKSDFAFA

SEQ ID NO: 537 - DNA, 2670 bp, synthetic construct
  misc_feature 1..2670: note = Variant of RNA polymerase
  source 1..2670: mol_type = other DNA
atgcaccatcaccatcaccatatgaacacgattaacattgctaagaacgacttctctgacatcgaactggctgctatcccgttcaacactctggctgaccattacggtgagcgtttagctcgcgaacagttggcccttgagcatgagtcttacgagatgggtgaagcacgcttccgcaagatgtttgagcgtcaacttaaagctggtgaggttgcggataacgctgccgccaagcctctcatcactaccctactccctaagatgattgcacgcatcaacgactggtttgaggaagtgaaagctaagcgcggcaagcgcccgacagccttccagttcctgcaagaaatcaagccggaagccgtagcgtacatcaccattaagaccactctggcttgcctaaccagtgcggacaatacaaccgttcaggctgtagcaagcgcaatcggtcgggccattgaggacgaggctcgcttcggtcgtatccgtgaccttgaagctaagcacttcaagaagaacgttgaggaacaactcaacaagcgcgtagggcacgtctacaagaaagcatttatgcaagttgtcgaggctgacatgctctctacgggtctactcggtggcgaggcgtggtcttcgtggcataaggaagactctattcatgtaggagtacgctgcatcgagatgctcattgagtcaaccggaatggttagcttacaccgccaaaatgctggcgtagtaggtcaagactctgagactatcgaactcgcacctgaatacgctgaggctatcgcaacccgtgcaggtgcgctggctggcatctctccgatgttccaaccttgcgtagttcctcctaagccgtggactggcattactggtggtggctattgggctgcggggcgcaaacccctgcagttagtacgtactcgcagtctggcggcgcttcgccgctatgaagaagtgtcgatgccggaggtcatcaaagcagtcaacattgcgcagaatacagcatggcgtgtgaacaagaaagttctcgacgtagcgaatgcaatcacccaatggcagcactgtccagtcgcggatgtgcctgcgatggatcgtggcgaaatgccagctcgtccgttggacatcgataccaacgagattgcacttaaagcgtggaagaaagaagcttccgcgttctaccgcaaagacaaagcacgcgttagccgtcgtctgtcaatggagtttatgttatctcaggcgaacaagtttgcgaattataaagcaatctggtttccgcaaaacatggattggcgtgggcgcgtgtacgctgtcccgatgttcaatcctcagggcaacgatatgacgaaaggcctgctgacctttgcgcagggtaaacccattggtgaagacggcttctattggctcaagattcatggcgcaaatacagctggagtggataaagtaccgtttccacaacgcatcaaatttgttgaggataaccatacgaatattatggaatgcgcgaaagcaccgctggaaaacacttggtgggcggaacaggactcgccgttctgttttctggcgttctgctttgagtatgctggcgtcatcaatagtggtctgtcgtacaactgtagcttgcctctggcatttgatggtagttgctccggcattcaacatttctcagcgatgttacgcgacgaaattggcggcaaagctgtgaatctcctcccatctgcggaagtgcaggatatttatcgtatcgtcagcgacaaagttaacgaggtactgaaacaagatctgattaacggtacctctaccaccttggaaacggtgactgataagaagacaggcgaaattaccgaacgcacgaaatacgggaccaaagttatggcacagtggtggttagaacacggtgtgaatcgtggcgtcacgaaacgctcggttatgactttggtgtatgggagcaaagagtttggattccgcgatcaagtgctgagtgacaccattcaaccggcgatcgataacggcaaaggtgacatgtttctgaatccgaatcaggctgctggttacatggcgaaactgatctgggatgcagtgtccgtcaccgtagtcgcagcagttgaggcgatgaactggctgaaaagtgcggcgaaattacttgctgctgaagtgaaggataaaaagacggatacagttctgcgtggccgctgcgcagtacattgggtgactcccgacggcttccctgtgtggcaggaatacaagaagcctattcagacgcgcttgaacctgatgttcctcggtcagttccgcttacagcctaccattaacaccaacaaagatagcgagattgatgcacacaaacaggagtctggtatcgctcctaactttgtacacagccaagacggtaaccaccttcgtatgactgtagtgtgggcacacgagaagtacggaatcgaatcttttgcactgattcacgactccttcggtaccattccggctgacgctgcgaacctgttcaaagcagtgcgcgaaactatggtttcgacatatgagtcttgtgatgtactggctgatttctacgaccagttcgctgaccagttgcacgagtctcaattggacaaaatgccagcacttccggctaaaggtaacttgaacctccgtgacatcttaaaatcggacttcgcgttcgcg

SEQ ID NO: 538 - protein, 890 aa, synthetic construct
  REGION 1..890: note = Variant of RNA polymerase
MHHHHHHMNTINIAKNDFSDIELAAIPFNTLADHYGERLAREQLALEHESYEMGEARFRKMFERQLKAGEVADNAAAKPLITTLLPKMIARINDWFEEVKAKRGKRPTAFQFLQEIKPEAVAYITIKTTLACLTSADNTTVQAVASAIGRAIEDEARFGRIRDLEAKHFKKNVEEQLNKRVGHVYKKAFMQVVEADMLSTGLLGGEAWSSWHKEDSIHVGVRCIEMLIESTGMVSLHRQNAGVVGQDSETIELAPEYAEAIATRAGALAGISPMFQPCVVPPKPWTGITGGGYWAAGRKPLQLVRTRSLAALRRYEEVSMPEVIKAVNIAQNTAWRVNKKVLDVANAITQWQHCPVADVPAMDRGEMPARPLDIDTNEIALKAWKKEASAFYRKDKARVSRRLSMEFMLSQANKFANYKAIWFPQNMDWRGRVYAVPMFNPQGNDMTKGLLTFAQGKPIGEDGFYWLKIHGANTAGVDKVPFPQRIKFVEDNHTNIMECAKAPLENTWWAEQDSPFCFLAFCFEYAGVINSGLSYNCSLPLAFDGSCSGIQHFSAMLRDEIGGKAVNLLPSAEVQDIYRIVSDKVNEVLKQDLINGTSTTLETVTDKKTGEITERTKYGTKVMAQWWLEHGVNRGVTKRSVMTLVYGSKEFGFRDQVLSDTIQPAIDNGKGDMFLNPNQAAGYMAKLIWDAVSVTVVAAVEAMNWLKSAAKLLAAEVKDKKTDTVLRGRCAVHWVTPDGFPVWQEYKKPIQTRLNLMFLGQFRLQPTINTNKDSEIDAHKQESGIAPNFVHSQDGNHLRMTVVWAHEKYGIESFALIHDSFGTIPADAANLFKAVRETMVSTYESCDVLADFYDQFADQLHESQLDKMPALPAKGNLNLRDILKSDFAFA

SEQ ID NO: 539 - DNA, 2670 bp, synthetic construct
  misc_feature 1..2670: note = Variant of RNA polymerase
  source 1..2670: mol_type = other DNA
atgcaccatcaccatcaccatatgaacacgattaacattgctaagaacgacttctctgacatcgaactggctgctatcccgttcaacactctggctgaccattacggtgagcgtttagctcgcgaacagttggcccttgagcatgagtcttacgagatgggtgaagcacgcttccgcaagatgtttgagcgtcaacttaaagctggtgaggttgcggataacgctgccgccaagcctctcatcactaccctactccctaagatgattgcacgcatcaacgactggtttgaggaagtgaaagctaagcgcggcaagcgcccgacagccttccagttcctgcaagaaatcaagccggaagccgtagcgtacatcaccattaagaccactctggcttgcctaaccagtgcggacaatacaaccgttcaggctgtagcaagcgcaatcggtcgggccattgaggacgaggctcgcttcggtcgtatccgtgaccttgaagctaagcacttcaagaaaaacgttgaggaacaactcaacaagcgcgtagggcacgtctacaagaaagcatttatgcaagttgtcgaggctgacatgctctctaagggtctactcggtggcgaggcgtggtcttcgtggcataaggaagactctattcatgtaggagtacgctgcatcgagatgctcattgagtcaaccggaatggttagcttacaccgccaaaatgctggcgtagtaggtcaagactctgagactatcgaactcgcacctgaatacgctgaggctatcgcaacccgtgcaggtgcgctggctggcatctctccgatgttccaaccttgcgtagttcctcctaagccgtggactggcattactggtggtggctattgggctgcggggcgcaaacccctgcagttagtacgtactcgcagtctggcggcgcttcgccgctatgaagaagtgtcgatgccggaggtcatcaaagcagtcaacattgcgcagaatacagcatggcgtattaacaagaaagttctcgacgtagcgaatgcaatcacccaatggcagcactgtccagtcgcggatgtgcctgcgatggatcgtggcgaaatgccagctcgtccgttggacatcgataccaacgagattgcacttaaagcgtggaagaaagaagcttccgcgttctaccgcaaagacaaagcacgcgttagccgtcgtctgtcaatggagtttatgttatctcaggcgaacaagtttgcgaatgaaaaagcaatctggtttccgcaaaacatggattggcgtgggcgcgtgtacgctgtcccgatgttcaatcctcagggcaacgatatgacgaaaggcctgctgacctttgcgcagggtaaacccattggtgaagacggcttctattggctcaagattcatggcgcaaatacagctggagtggataaagtaccgtttccacaacgcatcaaatttgttgaggataaccatacgaatattatggaatgcgcgaaagcaccgctggaaaacacttggtgggcggaacaggactcgccgttctgttttctggcgttctgctttgagtatgctggcgtcatcaatagtggtctgtcgtacaactgtagcttgcctctggcatttgatggtagttgctccggcattcaacatttctcagcgatgttacgcgacgaaattggcggcaaagctgtgaatctcctcccatctgcggaataccaggatatttatcgtatcgtcagcgacaaagttaacgaggtactgaaacaagatctgattaacggtacctctaccaccttggaaacggtgactgataagaagacaggcgaaattaccgaacgcacgaaatacgggaccaaagttatggcacagtggtggttagaacacggtgtgaatcgtggcgtcacgaaacgctcggttatgactttggtgtatgggagcaaagagtttggattccgcgatcaagtgctgagtgacaccattcaaccggcgatcgataacggcaaaggtgacatgtttctgaatccgaatcaggctgctggttacatggcgaaactgatctgggatgcagtgtccgtcaccgtagtcgcagcagttgaggcgatgaactggctgaaaagtgcggcgaaattacttgctgctgaagtgaaggataaaaagacggatacagttctgcgtggccgctgcgcagtacattgggtgactcccgacggcttccctgtgtggcaggaatacaagaagcctattcagacgcgcttgaacctgatgttcctcggtcagttccgcttacagcctaccattaacaccaacaaagatagcgagattgatgcacacaaacaggagtctggtatcgctcctaactttgtacacagccaagacggtaaccaccttcgtatgactgtagtgtgggcacacgagaagtacggaatcgaatcttttgcactgattcacgactccttcggtaccattccggctgacgctgcgaacctgttcaaagcagtgcgcgaaactatggtttcgacatatgagtcttgtgatgtactggctgatttctacgaccagttcgctgaccagttgcacgagtctcaattggacaaaatgccagcacttccggctaaaggtaacttgaacctccgtgacatcttaaaatcggacttcgcgttcgcg

SEQ ID NO: 540 - protein, 890 aa, synthetic construct
  REGION 1..890: note = Variant of RNA polymerase
MHHHHHHMNTINIAKNDFSDIELAAIPFNTLADHYGERLAREQLALEHESYEMGEARFRKMFERQLKAGEVADNAAAKPLITTLLPKMIARINDWFEEVKAKRGKRPTAFQFLQEIKPEAVAYITIKTTLACLTSADNTTVQAVASAIGRAIEDEARFGRIRDLEAKHFKKNVEEQLNKRVGHVYKKAFMQVVEADMLSKGLLGGEAWSSWHKEDSIHVGVRCIEMLIESTGMVSLHRQNAGVVGQDSETIELAPEYAEAIATRAGALAGISPMFQPCVVPPKPWTGITGGGYWAAGRKPLQLVRTRSLAALRRYEEVSMPEVIKAVNIAQNTAWRINKKVLDVANAITQWQHCPVADVPAMDRGEMPARPLDIDTNEIALKAWKKEASAFYRKDKARVSRRLSMEFMLSQANKFANEKAIWFPQNMDWRGRVYAVPMFNPQGNDMTKGLLTFAQGKPIGEDGFYWLKIHGANTAGVDKVPFPQRIKFVEDNHTNIMECAKAPLENTWWAEQDSPFCFLAFCFEYAGVINSGLSYNCSLPLAFDGSCSGIQHFSAMLRDEIGGKAVNLLPSAEYQDIYRIVSDKVNEVLKQDLINGTSTTLETVTDKKTGEITERTKYGTKVMAQWWLEHGVNRGVTKRSVMTLVYGSKEFGFRDQVLSDTIQPAIDNGKGDMFLNPNQAAGYMAKLIWDAVSVTVVAAVEAMNWLKSAAKLLAAEVKDKKTDTVLRGRCAVHWVTPDGFPVWQEYKKPIQTRLNLMFLGQFRLQPTINTNKDSEIDAHKQESGIAPNFVHSQDGNHLRMTVVWAHEKYGIESFALIHDSFGTIPADAANLFKAVRETMVSTYESCDVLADFYDQFADQLHESQLDKMPALPAKGNLNLRDILKSDFAFA

SEQ ID NO: 541 - DNA, 2670 bp, synthetic construct
  misc_feature 1..2670: note = Variant of RNA polymerase
  source 1..2670: mol_type = other DNA
atgcaccatcaccatcaccatatgaacacgattaacattgctaagaacgacttctctgacatcgaactggctgctatcccgttcaacactctggctgaccattacggtgagcgtttagctcgcgaacagttggcccttgagcatgagtcttacgagatgggtgaagcacgcttccgcaagatgtttgagcgtcaacttaaagctggtgaggttgcggataacgctgccgccaagcctctcatcactaccctactccctaagatgattgcacgcatcaacgactggtttgaggaagtgaaagctaagcgcggcaagcgcccgacagccttccagttcctgcaagaaatcaagccggaagccgtagcgtacatcaccattaagaccactctggcttgcctaaccagtgcggacaatacaaccgttcaggctgtagcaagcgcaatcggtcgggccattgaggacgaggctcgcttcggtcgtatccgtgaccttgaagctaagcacttcaagaaaaacgttgaggaacaactcaacaagcgcgtagggcacgtctacaagaaagcatttatgcaagttgtcgaggctgacatgctctctaagggtctactcggtggcgaggcgtggtcttcgtggcataaggaagactctattcatgtaggagtacgctgcatcgagatgctcattgagtcaaccggaatggttagcttacaccgccaaaatgctggcgtagtaggtcaagactctgagactatcgaactcgcacctgaatacgctgaggctatcgcaacccgtgcaggtgcgctggctggcatctctccgatgttccaaccttgcgtagttcctcctaagccgtggactggcattactggtggtggctattgggctgcggggcgcaaacccctgcagttagtacgtactcgcagtctggcggcgcttcgccgctatgaagaagtgtcgatgccggaggtcatcaaagcagtcaacattgcgcagaatacagcatggcgtattaacaagaaagttctcgacgtagcgaatgcaatcacccaatggcagcactgtccagtcgcggatgtgcctgcgatggatcgtggcgaaatgccagctcgtccgttggacatcgataccaacgagattgcacttaaagcgtggaagaaagaagcttccgcgttctaccgcaaagacaaagcacgcgttagccgtcgtctgtcaatggagtttatgttatctcaggcgaacaagtttgcgaattataaagcaatctggtttccgcaaaacatggattggcgtgggcgcgtgtacgctgtcccgatgttcaatcctcagggcaacgatatgacgaaaggcctgctgacctttgcgcaggagaaacccattggtgaagacggcttctattggctcaagattcatggcgcaaatacagctggagtggataaagtaccgtttccacaacgcatcaaatttgttgaggataaccatacgaatattatggaatgcgcgaaagcaccgctggaaaacacttggtgggcggaacaggactcgccgttctgttttctggcgttctgctttgagtatgctggcgtcatcaatcacggtctgtcgtacaactgtagcttgcctcaggcatttgatggtagttgctccggcattcaacatttctcagcgatgttacgcgacgaaattggcggcaaagctgtgaatctcctcccatctgcggaataccaggatatttatcgtatcgtcagcgacaaagttaacgaggtactgaaacaagatctgattaacggtacctctaccaccgtggaaacggtgactgataagaagacaggcgaaattacccaacgcacgaaatacgggaccaaagaaatggcacagtggtggttagaacacggtgtgaatcgtggcgtcacgaaacgctcggttatgactttggtgtatgggagcaaagagtttggattccgcgatcaagtgctgagtgacaccattcaaccggcgatcgataacggcaaaggtgacatgtttctgaatccgaatcaggctgctggttacatggcgaaactgatctggaacgcagtgtccgggaccgtagtcgcagcagttgaggcgatgaactggctgaaaagtgcggcgaaattacttgctgctgaagtgaaggatccaaagacgggcacagttctgcgtggccgctgcgcagtacattgggtgactcccgacggcttccctgtgtggcaggaatacaagaagcctattcagacgcgcttgaacctgatgttcctcggtcagttccgcttacagcctaccattaacaccaacaaagatagcgagattgatgcacacaaacaggagtctggtatcgctcctaactttgtacacagccaagacggtaaccaccttcgtatgactgtagtgtgggcacacgagaagtacggaatcgaatcttttgcactgattcacgactccttcggtaccattccggctgacgctgcgaacctgttcaaagcagtgcgcgaaactatggtttcgacatatgagtcttgtgatgtactggctgatttctacgaccagttcgctgaccagttgcacgagtctcaattggacaaaatgccagcacttccggctaaaggtaacttgaacctccgtgacatcttaaaatcggacttcgcgttcgcg

SEQ ID NO: 542 - protein, 890 aa, synthetic construct
  REGION 1..890: note = Variant of RNA polymerase
MHHHHHHMNTINIAKNDFSDIELAAIPFNTLADHYGERLAREQLALEHESYEMGEARFRKMFERQLKAGEVADNAAAKPLITTLLPKMIARINDWFEEVKAKRGKRPTAFQFLQEIKPEAVAYITIKTTLACLTSADNTTVQAVASAIGRAIEDEARFGRIRDLEAKHFKKNVEEQLNKRVGHVYKKAFMQVVEADMLSKGLLGGEAWSSWHKEDSIHVGVRCIEMLIESTGMVSLHRQNAGVVGQDSETIELAPEYAEAIATRAGALAGISPMFQPCVVPPKPWTGITGGGYWAAGRKPLQLVRTRSLAALRRYEEVSMPEVIKAVNIAQNTAWRINKKVLDVANAITQWQHCPVADVPAMDRGEMPARPLDIDTNEIALKAWKKEASAFYRKDKARVSRRLSMEFMLSQANKFANYKAIWFPQNMDWRGRVYAVPMFNPQGNDMTKGLLTFAQEKPIGEDGFYWLKIHGANTAGVDKVPFPQRIKFVEDNHTNIMECAKAPLENTWWAEQDSPFCFLAFCFEYAGVINHGLSYNCSLPQAFDGSCSGIQHFSAMLRDEIGGKAVNLLPSAEYQDIYRIVSDKVNEVLKQDLINGTSTTVETVTDKKTGEITQRTKYGTKEMAQWWLEHGVNRGVTKRSVMTLVYGSKEFGFRDQVLSDTIQPAIDNGKGDMFLNPNQAAGYMAKLIWNAVSGTVVAAVEAMNWLKSAAKLLAAEVKDPKTGTVLRGRCAVHWVTPDGFPVWQEYKKPIQTRLNLMFLGQFRLQPTINTNKDSEIDAHKQESGIAPNFVHSQDGNHLRMTVVWAHEKYGIESFALIHDSFGTIPADAANLFKAVRETMVSTYESCDVLADFYDQFADQLHESQLDKMPALPAKGNLNLRDILKSDFAFA

SEQ ID NO: 543 - DNA, 2670 bp, synthetic construct
  misc_feature 1..2670: note = Variant of RNA polymerase
  source 1..2670: mol_type = other DNA
atgcaccatcaccatcaccatatgaacacgattaacattgctaagaacgacttctctgacatcgaactggctgctatcccgttcaacactctggctgaccattacggtgagcgtttagctcgcgaacagttggcccttgagcatgagtcttacgagatgggtgaagcacgcttccgcaagatgtttgagcgtcaacttaaagctggtgaggttgcggataacgctgccgccaagcctctcatcactaccctactccctaagatgattgcacgcatcaacgactggtttgaggaagtgaaagctaagcgcggcaagcgcccgacagccttccagttcctgcaagaaatcaagccggaagccgtagcgtacatcaccattaagaccactctggcttgcctaaccagtgcggacaatacaaccgttcaggctgtagcaagcgcaatcggtcgggccattgaggacgaggctcgcttcggtcgtatccgtgaccttgaagctaagcacttcaagaaaaacgttgaggaacaactcaacaagcgcgtagggcacgtctacaagaaagcatttatgcaagttgtcgaggctgacatgctctctaagggtctactcggtggcgaggcgtggtcttcgtggcataaggaagactctattcatgtaggagtacgctgcatcgagatgctcattgagtcaaccggaatggttagcttacaccgccaaaatgctggcgtagtaggtcaagactctgagactatcgaactcgcacctgaatacgctgaggctatcgcaacccgtgcaggtgcgctggctggcatctctccgatgttccaaccttgcgtagttcctcctaagccgtggactggcattactggtggtggctattgggctgcggggcgcaaacccctgcagttagtacgtactcgcagtctggcggcgcttcgccgctatgaagaagtgtcgatgccggaggtcatcaaagcagtcaacattgcgcagaatacagcatggcgtattaacaagaaagttctcgacgtagcgaatgcaatcacccaatggcagcactgtccagtcgcggatgtgcctgcgatggatcgtggcgaaatgccagctcgtccgttggacatcgataccaacgagattgcacttaaagcgtggaagaaagaagcttccgcgttctaccgcaaagacaaagcacgcgttagccgtcgtctgtcaatggagtttatgttatctcaggcgaacaagtttgcgaattataaagcaatctggtttccgcaaaacatggattggcgtgggcgcgtgtacgctgtcccgatgttcaatcctcagggcaacgatatgacgaaaggcctgctgacctttgcgcaggagaaacccattggtgaagacggcttctattggctcaagattcatggcgcaaatacagctggagtggataaagtaccgtttccacaacgcatcaaatttgttgaggataaccatacgaatattatggaatgcgcgaaagcaccgctggaaaacacttggtgggcggaacaggactcgccgttctgttttctggcgttctgctttgagtatgctggcgtcatcaatcacggtctgtcgtacaactgtagcttgcctcaggcatttgatggtagttgctccggcattcaacatttctcagcgatgttacgcgacgaaattggcggcaaagctgtgaatctcctcccatctgcggaataccaggatatttatcgtatcgtcagcgacaaagttaacgagatgctgaaacaagatctgattaacggtacctctaccaccgtggaaacggtgactgataagaagacaggcgaaattacccaacgcacgaaatacgggaccaaagttatggcacagtggtggttagaacacggtgtgaatcgtggcgtcacgaaacgctcggttatgactttggtgtatgggagcaaagagtttggattccgcgatcaagtgctgagtgacaccattcaaccggcgatcgataacggcaaaggtgacatgtttctgaatccgaatcaggctgctggttacatggcgaaactgatctggaacgcagtgtccgggaccgtagtcgcagcagttgaggcgatgaactggctgaaaagtgcggcgaaattacttgctgctgaagtgaaggatcctaagacggatacagttctgcgtggccgctgcgcagtacattgggtgactcccgacggcttccctgtgtggcaggaatacaagaagcctattcagacgcgcttgaacctgatgttcctcggtcagttccgcttacagcctaccattaacaccaacaaagatagcgagattgatgcacacaaacaggagtctggtatcgctcctaactttgtacacagccaagacggtaaccaccttcgtatgactgtagtgtgggcacacgagaagtacggaatcgaatcttttgcactgattcacgactccttcggtaccattccggctgacgctgcgaacctgttcaaagcagtgcgcgaaactatggtttcgacatatgagtcttgtgatgtactggctgatttctacgaccagttcgctgaccagttgcacgagtctcaacgcgacaaaatgccagcacttccggctaaaggtaacttgaacctccgtgacatcttaaaatcggacttcgcgttcgcg

SEQ ID NO: 544 - protein, 890 aa, synthetic construct
  REGION 1..890: note = Variant of RNA polymerase
MHHHHHHMNTINIAKNDFSDIELAAIPFNTLADHYGERLAREQLALEHESYEMGEARFRKMFERQLKAGEVADNAAAKPLITTLLPKMIARINDWFEEVKAKRGKRPTAFQFLQEIKPEAVAYITIKTTLACLTSADNTTVQAVASAIGRAIEDEARFGRIRDLEAKHFKKNVEEQLNKRVGHVYKKAFMQVVEADMLSKGLLGGEAWSSWHKEDSIHVGVRCIEMLIESTGMVSLHRQNAGVVGQDSETIELAPEYAEAIATRAGALAGISPMFQPCVVPPKPWTGITGGGYWAAGRKPLQLVRTRSLAALRRYEEVSMPEVIKAVNIAQNTAWRINKKVLDVANAITQWQHCPVADVPAMDRGEMPARPLDIDTNEIALKAWKKEASAFYRKDKARVSRRLSMEFMLSQANKFANYKAIWFPQNMDWRGRVYAVPMFNPQGNDMTKGLLTFAQEKPIGEDGFYWLKIHGANTAGVDKVPFPQRIKFVEDNHTNIMECAKAPLENTWWAEQDSPFCFLAFCFEYAGVINHGLSYNCSLPQAFDGSCSGIQHFSAMLRDEIGGKAVNLLPSAEYQDIYRIVSDKVNEMLKQDLINGTSTTVETVTDKKTGEITQRTKYGTKVMAQWWLEHGVNRGVTKRSVMTLVYGSKEFGFRDQVLSDTIQPAIDNGKGDMFLNPNQAAGYMAKLIWNAVSGTVVAAVEAMNWLKSAAKLLAAEVKDPKTDTVLRGRCAVHWVTPDGFPVWQEYKKPIQTRLNLMFLGQFRLQPTINTNKDSEIDAHKQESGIAPNFVHSQDGNHLRMTVVWAHEKYGIESFALIHDSFGTIPADAANLFKAVRETMVSTYESCDVLADFYDQFADQLHESQRDKMPALPAKGNLNLRDILKSDFAFA

SEQ ID NO: 545 - DNA, 2670 bp, synthetic construct
  misc_feature 1..2670: note = Variant of RNA polymerase
  source 1..2670: mol_type = other DNA
atgcaccatcaccatcaccatatgaacacgattaacattgctaagaacgacttctctgacatcgaactggctgctatcccgttcaacactctggctgaccattacggtgagcgtttagctcgcgaacagttggcccttgagcatgagtcttacgagatgggtgaagcacgcttccgcaagatgtttgagcgtcaacttaaagctggtgaggttgcggataacgctgccgccaagcctctcatcactaccctactccctaagatgattgcacgcatcaacgactggtttgaggaagtgaaagctaagcgcggcaagcgcccgacagccttccagttcctgcaagaaatcaagccggaagccgtagcgtacatcaccattaagaccactctggcttgcctaaccagtgcggacaatacaaccgttcaggctgtagcaagcgcaatcggtcgggccattgaggacgaggctcgcttcggtcgtatccgtgaccttgaagctaagcacttcaagaaaaacgttgaggaacaactcaacaagcgcgtagggcacgtctacaagaaagcatttatgcaagttgtcgaggctgacatgctctctaagggtctactcggtggcgaggcgtggtcttcgtggcataaggaagactctattcatgtaggagtacgctgcatcgagatgctcattgagtcaaccggaatggttagcttacaccgccaaaatgctggcgtagtaggtcaagactctgagactatcgaactcgcacctgaatacgctgaggctatcgcaacccgtgcaggtgcgctggctggcatctctccgatgttccaaccttgcgtagttcctcctaagccgtggactggcattactggtggtggctattgggctgcggggcgcaaacccctgcagttagtacgtactcgcagtctggcggcgcttcgccgctatgaagaagtgtcgatgccggaggtcatcaaagcagtcaacattgcgcagaatacagcatggcgtattaacaagaaagttctcgacgtagcgaatgcaatcacccaatggcagcactgtccagtcgcggatgtgcctgcgatggatcgtggcgaaatgccagctcgtccgttggacatcgataccaacgagattgcacttaaagcgtggaagaaagaagcttccgcgttctaccgcaaagacaaagcacgcgttagccgtcgtctgtcaatggagtttatgttatctcaggcgaacaagtttgcgaattataaagcaatctggtttccgcaaaacatggattggcgtgggcgcgtgtacgctgtcccgatgttcaatcctcagggcaacgatatgacgaaaggcctgctgacctttgcgcaggagaaacccattggtgaagacggcttctattggctcaagattcatggcgcaaatacagctggagtggataaagtaccgtttccacaacgcatcaaatttgttgaggataaccatacgaatattatggaatgcgcgaaagcaccgctggaaaacacttggtgggcggaacaggactcgccgttctgttttctggcgttctgctttgagtatgctggcgtcatcaatcacggtctgtcgtacaactgtagcttgcctctggcatttgatggtagttgctccggcattcaacatttctcagcgatgttacgcgacgaaattggcggcaaagctgtgaatctcctcccatctgcggaataccaggatatttatcgtatcgtcagcgacaaagttaacgaggtgctgaaacaagatctgattaacggtacctctaccaccgtggaaacggtgactgataagaagacaggcgaaattacccaacgcacgaaatacgggaccaaagttatggcacagtggtggttagaacacggtgtgaatcgtggcgtcacgaaacgctcggttatgactttggtgtatgggagcaaagagtttggattccgcgatcaagtgctgagtgacaccattcaaccggcgatcgataacggcaaaggtgacatgtttctgaatccgaatcaggctgctggttacatggcgaaactgatctggaacgcagtgtccgggaccgtagtcgcagcagttgaggcgatgaactggctgaaaagtgcggcgaaattacttgctgctgaagtgaaggatccaaagacggacacagttctgcgtggccgctgcgcagtacattgggtgactcccgacggcttccctgtgtggcaggaatacaagaagcctattcagacgcgcttgaacctgatgttcctcggtcagttccgcttacagcctaccattaacaccaacaaagatagcgagattgatgcacacaaacaggagtctggtatcgctcctaactttgtacacagccaagacggtaaccaccttcgtatgactgtagtgtgggcacacgagaagtacggaatcgaatcttttgcactgattcacgactccttcggtaccattccggctgacgctgcgaacctgttcaaagcagtgcgcgaaactttcgttagcacatatgagtcttgtgatgtactggctgatttctacgaccagttcgctgaccagttgcacgagtctcaattggacaaaatgccagcacttccggctaaaggtaacttgaacctccgtgacatcttaaaatcggacttcgcgttcgcg

SEQ ID NO: 546 - protein, 890 aa, synthetic construct
  REGION 1..890: note = Variant of RNA polymerase
MHHHHHHMNTINIAKNDFSDIELAAIPFNTLADHYGERLAREQLALEHESYEMGEARFRKMFERQLKAGEVADNAAAKPLITTLLPKMIARINDWFEEVKAKRGKRPTAFQFLQEIKPEAVAYITIKTTLACLTSADNTTVQAVASAIGRAIEDEARFGRIRDLEAKHFKKNVEEQLNKRVGHVYKKAFMQVVEADMLSKGLLGGEAWSSWHKEDSIHVGVRCIEMLIESTGMVSLHRQNAGVVGQDSETIELAPEYAEAIATRAGALAGISPMFQPCVVPPKPWTGITGGGYWAAGRKPLQLVRTRSLAALRRYEEVSMPEVIKAVNIAQNTAWRINKKVLDVANAITQWQHCPVADVPAMDRGEMPARPLDIDTNEIALKAWKKEASAFYRKDKARVSRRLSMEFMLSQANKFANYKAIWFPQNMDWRGRVYAVPMFNPQGNDMTKGLLTFAQEKPIGEDGFYWLKIHGANTAGVDKVPFPQRIKFVEDNHTNIMECAKAPLENTWWAEQDSPFCFLAFCFEYAGVINHGLSYNCSLPLAFDGSCSGIQHFSAMLRDEIGGKAVNLLPSAEYQDIYRIVSDKVNEVLKQDLINGTSTTVETVTDKKTGEITQRTKYGTKVMAQWWLEHGVNRGVTKRSVMTLVYGSKEFGFRDQVLSDTIQPAIDNGKGDMFLNPNQAAGYMAKLIWNAVSGTVVAAVEAMNWLKSAAKLLAAEVKDPKTDTVLRGRCAVHWVTPDGFPVWQEYKKPIQTRLNLMFLGQFRLQPTINTNKDSEIDAHKQESGIAPNFVHSQDGNHLRMTVVWAHEKYGIESFALIHDSFGTIPADAANLFKAVRETFVSTYESCDVLADFYDQFADQLHESQLDKMPALPAKGNLNLRDILKSDFAFA

SEQ ID NO: 547 - DNA, 2670 bp, synthetic construct
  misc_feature 1..2670: note = Variant of RNA polymerase
  source 1..2670: mol_type = other DNA
atgcaccatcaccatcaccatatgaacacgattaacattgctaagaacgacttctctgacatcgaactggctgctatcccgttcaacactctggctgaccattacggtgagcgtttagctcgcgaacagttggcccttgagcatgagtcttacgagatgggtgaagcacgcttccgcaagatgtttgagcgtcaacttaaagctggtgaggttgcggataacgctgccgccaagcctctcatcactaccctactccctaagatgattgcacgcatcaacgactggtttgaggaagtgaaagctaagcgcggcaagcgcccgacagccttccagttcctgcaagaaatcaagccggaagccgtagcgtacatcaccattaagaccactctggcttgcctaaccagtgcggacaatacaaccgttcaggctgtagcaagcgcaatcggtcgggccattgaggacgaggctcgcttcggtcgtatccgtgaccttgaagctaagcacttcaagaagaacgttgaggaacaactcaacaagcgcgtagggcacgtctacaagaaagcatttatgcaagttgtcgagcacgacatgctctctaagggtctactcggtggcgaggcgtggtcttcgtggcataaggaagactctattcatgtaggagtacgctgcatcgagatgctcattgagtcaaccggaatggttagcttacaccgccaaaatgctggcgtagtaggtcaagactctgagactatcgaactcgcacctgaatacgctgaggctatcgcaacccgtgcaggtgcgctggctggcatctctccgatgttccaaccttgcgtagttcctcctaagccgtggactggcattactggtggtggctattgggctgcggggcgcaaacccctgcagttagtacgtactcgcagtctggcggcgcttcgccgctatgaagaagtgtcgatgccggaggtcatcaaagcagtcaacattgcgcagaatacagcatggcgtattaacaagaaagttctcgacgtagcgaataccatcacccaatggcagcactgtccagtcgcggatgtgcctgcgatggatcgtggcgaaatgccagctcgtccgttggacatcgataccaacgagattgcacttaaagcgtggaagaaagaagcttccgcgttctaccgcaaagacaaagcacgcgttagccgtcgtctgtcaatggagtttatgttatctcaggcgaacaagtttgcgaattataaagcaatctggtttccgcaaaacatggattggcgtgggcgcgtgtacgctgtcccgatgttcaatcctcagggcaacgatatgacgaaaggcctgctgacctttgcgcaggagaaacccattggtgaagacggcttctattggctcaagattcatggcgcaaatacagctggagtggataaagtaccgtttccacaacgcatcaaatttgttgaggataaccatacgaatattatggaatgcgcgaaagcaccgctggaaaacacttggtgggcggaacaggactcgccgttctgttttctggcgttctgctttgagtatgctggcgtcatcaatagtggtctgtcgtacaactgtagcttgcctctggcatttgatggtagttgctccggcctgcaacatttctcagcgatgttacgcgacgaaattggcggcaaagctgtgaatctcctcccatctgcggaataccaggatatttatcgtatcgtcagcgacaaagttaacgagatgctgaaacaagatctgattaacggtacctctaccaccgtggaaacggtgactgataagaagacaggcgaaattacccaacgcacgaaatacgggaccaaagttatggcacagtggtggttagaacacggtgtgaatcgtggcgtcacgaaacgctcggttatgactttggtgtatgggagcaaagagtttggattccgcgatcaagtgctgagtgacaccattcaaccggcgatcgataacggcaaaggtgacatgtttctgaatccgaatcaggctgctggttacatggcgaaactgatctggaacgcagtgtccgggaccgtagtcgcagcagttgaggcgatgaactggctgaaaagtgcggcgaaattacttgctgctgaagtgaaggatcctaagacggatacagttctgcgtggccgctgcgcagtacattgggtgactcccgacggcttccctgtgtggcaggaatacaagaagcctattcagacgcgcttgaacctgatgttcctcggtcagttccgcttacagcctaccattaacaccaacaaagatagcgagattgatgcacacaaacaggagtctggtatcgctcctaactttgtacacagccaagacggtaaccaccttcgtatgactgtagtgtgggcacacgagaagtacggaatcgaatcttttgcactgattcacgactccttcggtaccattccggctgacgctgcgaacctgttcaaagcagtgcgcgaaactatggtttcgacatatgagtcttgtgatgtactggctgatttctacgaccagttcgctgaccagttgcacgagtctcaattggacaaaatgccagcacttccggctaaaggtaacttgaacctccgtgacatcttaaaatcggacttcgcgttcgcg

SEQ ID NO: 548 - protein, 890 aa, synthetic construct
  REGION 1..890: note = Variant of RNA polymerase
MHHHHHHMNTINIAKNDFSDIELAAIPFNTLADHYGERLAREQLALEHESYEMGEARFRKMFERQLKAGEVADNAAAKPLITTLLPKMIARINDWFEEVKAKRGKRPTAFQFLQEIKPEAVAYITIKTTLACLTSADNTTVQAVASAIGRAIEDEARFGRIRDLEAKHFKKNVEEQLNKRVGHVYKKAFMQVVEHDMLSKGLLGGEAWSSWHKEDSIHVGVRCIEMLIESTGMVSLHRQNAGVVGQDSETIELAPEYAEAIATRAGALAGISPMFQPCVVPPKPWTGITGGGYWAAGRKPLQLVRTRSLAALRRYEEVSMPEVIKAVNIAQNTAWRINKKVLDVANTITQWQHCPVADVPAMDRGEMPARPLDIDTNEIALKAWKKEASAFYRKDKARVSRRLSMEFMLSQANKFANYKAIWFPQNMDWRGRVYAVPMFNPQGNDMTKGLLTFAQEKPIGEDGFYWLKIHGANTAGVDKVPFPQRIKFVEDNHTNIMECAKAPLENTWWAEQDSPFCFLAFCFEYAGVINSGLSYNCSLPLAFDGSCSGLQHFSAMLRDEIGGKAVNLLPSAEYQDIYRIVSDKVNEMLKQDLINGTSTTVETVTDKKTGEITQRTKYGTKVMAQWWLEHGVNRGVTKRSVMTLVYGSKEFGFRDQVLSDTIQPAIDNGKGDMFLNPNQAAGYMAKLIWNAVSGTVVAAVEAMNWLKSAAKLLAAEVKDPKTDTVLRGRCAVHWVTPDGFPVWQEYKKPIQTRLNLMFLGQFRLQPTINTNKDSEIDAHKQESGIAPNFVHSQDGNHLRMTVVWAHEKYGIESFALIHDSFGTIPADAANLFKAVRETMVSTYESCDVLADFYDQFADQLHESQLDKMPALPAKGNLNLRDILKSDFAFA

SEQ ID NO: 549 - DNA, 2670 bp, synthetic construct
  misc_feature 1..2670: note = Variant of RNA polymerase
  source 1..2670: mol_type = other DNA
atgcaccatcaccatcaccatatgaacacgattaacattgctaagaacgacttctctgacatcgaactggctgctatcccgttcaacactctggctgaccattacggtgagcgtttagctcgcgaacagttggcccttgagcatgagtcttacgagatgggtgaagcacgcttccgcaagatgtttgagcgtcaacttaaagctggtgaggttgcggataacgctgccgccaagcctctcatcactaccctactccctaagatgattgcacgcatcaacgactggtttgaggaagtgaaagctaagcgcggcaagcgcccgacagccttccagttcctgcaagaaatcaagccggaagccgtagcgtacatcaccattaagaccactctggcttgcctaaccagtgcggacaatacaaccgttcaggctgtagcaagcgcaatcggtcgggccattgaggacgaggctcgcttcggtcgtatccgtgaccttgaagctaagcacttcaagaaaaacgttgaggaacaactcaacaagcgcgtagggcacgtctacaagaaagcatttatgcaagttgtcgaggctgacatgctctctaagggtctactcggtggcgaggcgtggtcttcgtggcataaggaagactctattcatgtaggagtacgctgcatcgagatgctcattgagtcaaccggaatggttagcttacaccgccaaaatgctggcgtagtaggtcaagactctgagactatcgaactcgcacctgaatacgctgaggctatcgcaacccgtgcaggtgcgctggctggcatctctccgatgttccaaccttgcgtagttcctcctaagccgtggactggcattactggtggtggctattgggctgcggggcgcaaacccctgcagttagtacgtactcgcagtctggcggcgcttcgccgctatgaagaagtgtcgatgccggaggtcatcaaagcagtcaacattgcgcagaatacagcatggcgtattaacaagaaagttctcgacgtagcgaatgcaatcacccaatggcagcactgtccagtcgcggatgtgcctgcgatggatcgtggcgaaatgccagctcgtccgttggacatcgataccaacgagattgcacttaaagcgtggaagaaagaagcttccgcgttctaccgcaaagacaaagcacgcgttagccgtcgtctgtcaatggagtttatgttatctcaggcgaacaagtttgcgaattatgaggcaatctggtttccgcaaaacatggattggcgtgggcgcgtgtacgctgtcccgatgttcaatcctcagggcaacgatatgacgaaaggcctgctgacctttgcgcaggagaaacccattggtgaagacggcttctattggctcaagattcatggcgcaaatacagctggagtggataaagtaccgtttccacaacgcatcaaatttgttgaggataaccatacgaatattatggaatgcgcgaaagcaccgctggaaaacacttggtgggcggaacaggactcgccgttctgttttctggcgttctgctttgagtatgctggcgtcatcaatcacggtctgtcgtacaactgtagcttgcctctggcatttgatggtagttgctccggcattcaacatttctcagcgatgttacgcgacgaaattggcggcaaagctgtgaatctcctcccatctgcggaataccaggatatttatcgtatcgtcagcgacaaagttaacgaggtactgaaacaagatctgattaacggtacctctaccaccgtggaaacggtgactgataagaagacaggcgaaattacccaacgcacgaaatacgggaccaaagttatggcacagtggtggttagaacacggtgtgaatcgtggcgtcacgaaacgctcggttatgactttggtgtatgggagcaaagagtttggattccgcgatcaagtgctgagtgacaccattcaaccggcgatcgataacggcaaaggtgacatgtttctgaatccgaatcaggctgctggttacatggcgaaactgatctggaacgcagtgtccgggaccgtagtcgcagcagttgaggcgatgaactggctgaaaagtgcggcgaaattacttgctgctgaagtgaaggatccaaagacgggcacagttctgcgtggccgctgcgcagtacattgggtgactcccgacggcttccctgtgtggcaggaatacaagaagcctattcagacgcgcttgaacctgatgttcctcggtcagttccgcttacagcctaccattaacaccaacaaagatagcgagattgatgcacacaaacaggagtctggtatcgctcctaactttgtacacagccaagacggtaaccaccttcgtatgactgtagtgtgggcacacgagaagtacggaatcgaatcttttgcactgattcacgactccttcggtaccattccggctgacgctgcgaacctgttcaaagcagtgcgcgaaactatggtttcgacatatgagtcttgtgatgtactggctgatttctacgaccagttcgctgaccagttgcacgagtctcaattggacaaaatgccagcacttccggctaaaggtaacttgaacctccgtgacatcttaaaatcggacttcgcgttcgcg

SEQ ID NO: 550 - protein, 890 aa, synthetic construct
  REGION 1..890: note = Variant of RNA polymerase
MHHHHHHMNTINIAKNDFSDIELAAIPFNTLADHYGERLAREQLALEHESYEMGEARFRKMFERQLKAGEVADNAAAKPLITTLLPKMIARINDWFEEVKAKRGKRPTAFQFLQEIKPEAVAYITIKTTLACLTSADNTTVQAVASAIGRAIEDEARFGRIRDLEAKHFKKNVEEQLNKRVGHVYKKAFMQVVEADMLSKGLLGGEAWSSWHKEDSIHVGVRCIEMLIESTGMVSLHRQNAGVVGQDSETIELAPEYAEAIATRAGALAGISPMFQPCVVPPKPWTGITGGGYWAAGRKPLQLVRTRSLAALRRYEEVSMPEVIKAVNIAQNTAWRINKKVLDVANAITQWQHCPVADVPAMDRGEMPARPLDIDTNEIALKAWKKEASAFYRKDKARVSRRLSMEFMLSQANKFANYEAIWFPQNMDWRGRVYAVPMFNPQGNDMTKGLLTFAQEKPIGEDGFYWLKIHGANTAGVDKVPFPQRIKFVEDNHTNIMECAKAPLENTWWAEQDSPFCFLAFCFEYAGVINHGLSYNCSLPLAFDGSCSGIQHFSAMLRDEIGGKAVNLLPSAEYQDIYRIVSDKVNEVLKQDLINGTSTTVETVTDKKTGEITQRTKYGTKVMAQWWLEHGVNRGVTKRSVMTLVYGSKEFGFRDQVLSDTIQPAIDNGKGDMFLNPNQAAGYMAKLIWNAVSGTVVAAVEAMNWLKSAAKLLAAEVKDPKTGTVLRGRCAVHWVTPDGFPVWQEYKKPIQTRLNLMFLGQFRLQPTINTNKDSEIDAHKQESGIAPNFVHSQDGNHLRMTVVWAHEKYGIESFALIHDSFGTIPADAANLFKAVRETMVSTYESCDVLADFYDQFADQLHESQLDKMPALPAKGNLNLRDILKSDFAFA

SEQ ID NO: 551 - DNA, 2670 bp, synthetic construct
  misc_feature 1..2670: note = Variant of RNA polymerase
  source 1..2670: mol_type = other DNA
atgcaccatcaccatcaccatatgaacacgattaacattgctaagaacgacttctctgacatcgaactggctgctatcccgttcaacactctggctgaccattacggtgagcgtttagctcgcgaacagttggcccttgagcatgagtcttacgagatgggtgaagcacgcttccgcaagatgtttgagcgtcaacttaaagctggtgaggttgcggataacgctgccgccaagcctctcatcactaccctactccctaagatgattgcacgcatcaacgactggtttgaggaagtgaaagctaagcgcggcaagcgcccgacagccttccagttcctgcaagaaatcaagccggaagccgtagcgtacatcaccattaagaccactctggcttgcctaaccagtgcggacaatacaaccgttcaggctgtagcaagcgcaatcggtcgggccattgaggacgaggctcgcttcggtcgtatccgtgaccttgaagctaagcacttcaagaaaattgttgaggaacaactcaacaagcgcgtagggcacccgtacaagaaagcatttatgcaagttgtcgaggctgacatgctctctaagggtctactcggtggcgaggcgtggtcttcgtggcataaggaagactctattcatgtaggagtacgctgcatcgagatgctcattgagtcaaccggaatggttagcttacaccgccaaaatgctggcgtagtaggtcaagactctgagactatcgaactcgcacctgaatacgctgaggctatcgcaacccgtgcaggtgcgctggctggcatctctccgatgttccaaccttgcgtagttcctcctaagccgtggactggcattactggtggtggctattgggctgcggggcgcaaacccctgcagttagtacgtactcgcagtctggcggcgcttcgccgctatgaagaagtgtcgatgccggaggtcatcaaagcagtcaacattgcgcagaatacagcatggcgtattaacaagaaagttctcgacgtagcgaatgccatcacccaatggcagcactgtccagtcgcggatgtgcctgcgatggatcgtggcgaaatgccagctcgtccgttggacatcgataccaacgagattgcacttaaagcgtggaagaaagaagcttccgcgttctaccgcaaagacaaagcacgcgttagccgtcgtctgtcaatggagtttatgttatctcaggcgaacaagtttgcgaattataaagcaatctggtttccgcaaaacatggattggcgtgggcgcgtgtacgctgtcccgatgttcaatcctcagggcaacgatatgacgaaaggcctgctgacctttgcgcaggagaaacccattggtgaagacggcttctattggctcaagattcatggcgcaaatacagctggagtggataaagtaccgtttccacaacgcatcaaatttgttgaggataaccatacgaatattatggaatgcgcgaaagcaccgctggaaaacacttggtgggcggaacaggactcgccgttctgttttctggcgttctgctttgagtatgctggcgtcatcaatcatggtctgtcgtacaactgtagcttgcctctggcatttgatggtagttgctccggcctgcaacatttctcagcgatgttacgcgacgaaattggcggcaaagctgtgaatctcctcccatctgcggaataccaggatatttatcgtatcgtcagcgacaaagttaacgagatgctgaaacaagatctgattaacggtacctctaccaccgtggaaacggtgactgataagaagacaggcgaaattacccaacgcacgaaatacgggaccaaagttatggcacagtggtggttagaacacggtgtgaatcgtggcgtcacgaaacgctcggttatgactttggtgtatgggagcaaagagtttggattccgcgatcaagtgctgagtgacaccattcaaccggcgatcgataacggcaaaggtgacatgtttctgaatccgaatcaggctgctggttacatggcgaaactgatctggaacgcagtgtccgggaccgtagtcgcagcagttgaggcgatgaactggctgaaaagtgcggcgaaattacttgctgctgaagtgaaggatcctaagacggatacagttctgcgtggccgctgcgcagtacattgggtgactcccgacggcttccctgtgtggcaggaatacaagaagcctattcagacgcgcttgaacctgatgttcctcggtcagttccgcttacagcctaccattaacaccaacaaagatagcgagattgatgcacacaaacaggagtctggtatcgctcctaactttgtacacagccaagacggtaaccaccttcgtatgactgtagtgtgggcacacgagaagtacggaatcgaatcttttgcactgattcacgactccttcggtaccattccggctgacgctgcgaacctgttcaaagcagtgcgcgaaactatggtttcgacatatgagtcttgtgatgtactggctgatttctacgaccagttcgctgaccagttgcacgagtctcaattggacaaaatgccagcacttccggctaaaggtaacttgaacctccgtgacatcttaaaatcggacttcgcgttcgcg

SEQ ID NO: 552 - protein, 890 aa, synthetic construct
  REGION 1..890: note = Variant of RNA polymerase
MHHHHHHMNTINIAKNDFSDIELAAIPFNTLADHYGERLAREQLALEHESYEMGEARFRKMFERQLKAGEVADNAAAKPLITTLLPKMIARINDWFEEVKAKRGKRPTAFQFLQEIKPEAVAYITIKTTLACLTSADNTTVQAVASAIGRAIEDEARFGRIRDLEAKHFKKIVEEQLNKRVGHPYKKAFMQVVEADMLSKGLLGGEAWSSWHKEDSIHVGVRCIEMLIESTGMVSLHRQNAGVVGQDSETIELAPEYAEAIATRAGALAGISPMFQPCVVPPKPWTGITGGGYWAAGRKPLQLVRTRSLAALRRYEEVSMPEVIKAVNIAQNTAWRINKKVLDVANAITQWQHCPVADVPAMDRGEMPARPLDIDTNEIALKAWKKEASAFYRKDKARVSRRLSMEFMLSQANKFANYKAIWFPQNMDWRGRVYAVPMFNPQGNDMTKGLLTFAQEKPIGEDGFYWLKIHGANTAGVDKVPFPQRIKFVEDNHTNIMECAKAPLENTWWAEQDSPFCFLAFCFEYAGVINHGLSYNCSLPLAFDGSCSGLQHFSAMLRDEIGGKAVNLLPSAEYQDIYRIVSDKVNEMLKQDLINGTSTTVETVTDKKTGEITQRTKYGTKVMAQWWLEHGVNRGVTKRSVMTLVYGSKEFGFRDQVLSDTIQPAIDNGKGDMFLNPNQAAGYMAKLIWNAVSGTVVAAVEAMNWLKSAAKLLAAEVKDPKTDTVLRGRCAVHWVTPDGFPVWQEYKKPIQTRLNLMFLGQFRLQPTINTNKDSEIDAHKQESGIAPNFVHSQDGNHLRMTVVWAHEKYGIESFALIHDSFGTIPADAANLFKAVRETMVSTYESCDVLADFYDQFADQLHESQLDKMPALPAKGNLNLRDILKSDFAFA

SEQ ID NO: 553 - DNA, 2670 bp, synthetic construct
  misc_feature 1..2670: note = Variant of RNA polymerase
  source 1..2670: mol_type = other DNA
atgcaccatcaccatcaccatatgaacacgattaacattgctaagaacgacttctctgacatcgaactggctgctatcccgttcaacactctggctgaccattacggtgagcgtttagctcgcgaacagttggcccttgagcatgagtcttacgagatgggtgaagcacgcttccgcaagatgtttgagcgtcaacttaaagctggtgaggttgcggataacgctgccgccaagcctctcatcactaccctactccctaagatgattgcacgcatcaacgactggtttgaggaagtgaaagctaagcgcggcaagcgcccgacagccttccagttcctgcaagaaatcaagccggaagccgtagcgtacatcaccattaagaccactctggcttgcctaaccagtgcggacaatacaaccgttcaggctgtagcaagcgcaatcggtcgggccattgaggacgaggctcgcttcggtcgtatccgtgaccttgaagctaagcacttcaagaagaacgttgaggaacaactcaacaagcgcgtagggcacccgtacaagaaagcatttatgcaagttgtcgagcacgacatgctctctaagggtctactcggtggcgaggcgtggtcttcgtggcataaggaagactctattcatgtaggagtacgctgcatcgagatgctcattgagtcaaccggaatggttagcttacaccgccaaaatgctggcgtagtaggtcaagactctgagactatcgaactcgcacctgaatacgctgaggctatcgcaacccgtgcaggtgcgctggctggcatctctccgatgttccaaccttgcgtagttcctcctaagccgtggactggcattactggtggtggctattgggctgcggggcgcaaacccctgcagttagtacgtactcgcagtctggcggcgcttcgccgctatgaagaagtgtcgatgccggaggtcatcaaagcagtcaacattgcgcagaatacagcatggcgtattaacaagaaagttctcgacgtagcgaataccatcacccaatggcagcactgtccagtcgcggatgtgcctgcgatggatcgtggcgaaatgccagctcgtccgttggacatcgataccaacgagattgcacttaaagcgtggaagaaagaagcttccgcgttctaccgcaaagacaaagcacgcgttagccgtcgtctgtcaatggagtttatgttatctcaggcgaacaagtttgcgaatgagaaagcaatctggtttccgcaaaacatggattggcgtgggcgcgtgtacgctgtcccgatgttcaatcctcagggcaacgatatgacgaaaggcctgctgacctttgcgcaggagaaacccattggtgaagacggcttctattggctcaagattcatggcgcaaatacagctggagtggataaagtaccgtttccacaacgcatcaaatttgttgaggataaccatacgaatattatggaatgcgcgaaagcaccgctggaaaacacttggtgggcggaacaggactcgccgttctgttttctggcgttctgctttgagtatgctggcgtcatcaatcatggtctgtcgtacaactgtagcttgcctctggcatttgatggtagttgctccggcctgcaacatttctcagcgatgttacgcgacgaaattggcggcaaagctgtgaatctcctcccatctgcggaataccaggatatttatcgtatcgtcagcgacaaagttaacgagcgtctgaaacaagatctgattaacggtacctctaccaccgtggaaacggtgactgataagaagacaggcgaaattacccaacgcacgaaatacgggaccaaagttatggcacagtggtggttagaacacggtgtgaatcgtggcgtcacgaaacgctcggttatgactttggtgtatgggagcaaagagtttggattccgcgatcaagtgctgagtgacaccattcaaccggcgatcgataacggcaaaggtgacatgtttctgaatccgaatcaggctgctggttacatggcgaaactgatctggaacgcagtgtccgggaccgtagtcgcagcagttgaggcgatgaactggctgaaaagtgcggcgaaattacttgctgctgaagtgaaggatcctaagacggatacagttctgcgtggccgctgcgcagtacattgggtgactcccgacggcttccctgtgtggcaggaatacaagaagcctattcagacgcgcttgaacctgatgttcctcggtcagttccgcttacagcctaccattaacaccaacaaagatagcgagattgatgcacacaaacaggagtctggtatcgctcctaactttgtacacagccaagacggtaaccaccttcgtatgactgtagtgtgggcacacgagaagtacggaatcgaatcttttgcactgattcacgactccttcggtaccattccggctgacgctgcgaacctgttcaaagcagtgcgcgaaactatggtttcgacatatgagtcttgtgatgtactggctgatttctacgaccagttcgctgaccagttgcacgagtctcaattggacaaaatgccagcacttccggctaaaggtaacttgaacctccgtgacatcttaaaatcggacttcgcgttcgcg

SEQ ID NO: 554 - protein, 890 aa, synthetic construct
  REGION 1..890: note = Variant of RNA polymerase
MHHHHHHMNTINIAKNDFSDIELAAIPFNTLADHYGERLAREQLALEHESYEMGEARFRKMFERQLKAGEVADNAAAKPLITTLLPKMIARINDWFEEVKAKRGKRPTAFQFLQEIKPEAVAYITIKTTLACLTSADNTTVQAVASAIGRAIEDEARFGRIRDLEAKHFKKNVEEQLNKRVGHPYKKAFMQVVEHDMLSKGLLGGEAWSSWHKEDSIHVGVRCIEMLIESTGMVSLHRQNAGVVGQDSETIELAPEYAEAIATRAGALAGISPMFQPCVVPPKPWTGITGGGYWAAGRKPLQLVRTRSLAALRRYEEVSMPEVIKAVNIAQNTAWRINKKVLDVANTITQWQHCPVADVPAMDRGEMPARPLDIDTNEIALKAWKKEASAFYRKDKARVSRRLSMEFMLSQANKFANEKAIWFPQNMDWRGRVYAVPMFNPQGNDMTKGLLTFAQEKPIGEDGFYWLKIHGANTAGVDKVPFPQRIKFVEDNHTNIMECAKAPLENTWWAEQDSPFCFLAFCFEYAGVINHGLSYNCSLPLAFDGSCSGLQHFSAMLRDEIGGKAVNLLPSAEYQDIYRIVSDKVNERLKQDLINGTSTTVETVTDKKTGEITQRTKYGTKVMAQWWLEHGVNRGVTKRSVMTLVYGSKEFGFRDQVLSDTIQPAIDNGKGDMFLNPNQAAGYMAKLIWNAVSGTVVAAVEAMNWLKSAAKLLAAEVKDPKTDTVLRGRCAVHWVTPDGFPVWQEYKKPIQTRLNLMFLGQFRLQPTINTNKDSEIDAHKQESGIAPNFVHSQDGNHLRMTVVWAHEKYGIESFALIHDSFGTIPADAANLFKAVRETMVSTYESCDVLADFYDQFADQLHESQLDKMPALPAKGNLNLRDILKSDFAFA

SEQ ID NO: 555 - DNA, 2670 bp, synthetic construct
  misc_feature 1..2670: note = Variant of RNA polymerase
  source 1..2670: mol_type = other DNA
atgcaccatcaccatcaccatatgaacacgattaacattgctaagaacgacttctctgacatcgaactggctgctatcccgttcaacactctggctgaccattacggtgagcgtttagctcgcgaacagttggcccttgagcatgagtcttacgagatgggtgaagcacgcttccgcaagatgtttgagcgtcaacttaaagctggtgaggttgcggataacgctgccgccaagcctctcatcactaccctactccctaagatgattgcacgcatcaacgactggtttgaggaagtgaaagctaagcgcggcaagcgcccgacagccttccagttcctgcaagaaatcaagccggaagccgtagcgtacatcaccattaagaccactctggcttgcctaaccagtgcggacaatacaaccgttcaggctgtagcaagcgcaatcggtcgggccattgaggacgaggctcgcttcggtcgtatccgtgaccttgaagctaagcacttcaagggcaacgttgaggaacaactcaacaagcgcgtagggcacccgtacaagaaagcatttatgcaagttgtcgaggctgacatgctctctaagggtctactcggtggcgaggcgtggtcttcgtggcataaggaagactctattcatgtaggagtacgctgcatcgagatgctcattgagtcaaccggaatggttagcttacaccgccaaaatgctggcgtagtaggtcaagactctgagactatcgaactcgcacctgaatacgctgaggctatcgcaacccgtgcaggtgcgctggctggcatctctccgatgttccaaccttgcgtagttcctcctaagccgtggactggcattactggtggtggctattgggctgcggggcgcaaacccctgcagttagtacgtactcgcagtctggcggcgcttcgccgctatgaagaagtgtcgatgccggaggtcatcaaagcagtcaacattgcgcagaatacagcatggcgtattaacaagaaagttctcgacgtagcgaataccatcacccaatggcagcactgtccagtcgcggatgtgcctgcgatggatcgtggcgaaatgccagctcgtccgttggacatcgataccaacgagattgcacttaaagcgtggaagaaagaagcttccgcgttctaccgcaaagacaaagcacgcgttagccgtcgtctgtcaatggagtttatgttatctcaggcgaacaagtttgcgaattataaagcaatctggtttccgcaaaacatggattggcgtgggcgcgtgtacgctgtcccgatgttcaatcctcagggcaacgatatgacgaaaggcctgctgacctttgcgcaggagaaacccattggtgaagacggcttctattggctcaagattcatggcgcaaatacagctggagtggataaagtaccgtttccacaacgcatcaaatttgttgaggataaccatacgaatattatggaatgcgcgaaagcaccgctggaaaacacttggtgggcggaacaggactcgccgttctgttttctggcgttctgctttgagtatgctggcgtcatcaatagtggtctgtcgtacaactgtagcttgcctctggcatttgatggtagttgctccggcctgcaacatttctcagcgatgttacgcgacgaaattggcggcaaagctgtgaatctcctcccatctgcggaataccaggatatttatcgtatcgtcagcgacaaagttaacgaggtactgaaacaagatctgattaacggtacctctaccaccgtggaaacggtgactgataagaagacaggcgaaattacccaacgcacgaaatacgggaccaaagttatggcacagtggtggttagaacacggtgtgaatcgtggcgtcacgaaacgctcggttatgactttggtgtatgggagcaaagagtttggattccgcgatcaagtgctgagtgacaccattcaaccggcgatcgataacggcaaaggtgacatgtttctgaatccgaatcaggctgctggttacatggcgaaactgatctggaacgcagtgtccgggaccgtagtcgcagcagttgaggcgatgaactggctgaaaagtgcggcgaaattacttgctgctgaagtgaaggatcctaagacggatacagttctgcgtggccgctgcgcagtacattgggtgactcccgacggcttccctgtgtggcaggaatacaagaagcctattcagacgcgcttgaacctgatgttcctcggtcagttccgcttacagcctaccattaacaccaacaaagatagcgagattgatgcacacaaacaggagtctggtatcgctcctaactttgtacacagccaagacggtaaccaccttcgtatgactgtagtgtgggcacacgagaagtacggaatcgaatcttttgcactgattcacgactccttcggtaccattccggctgacgctgcgaacctgttcaaagcagtgcgcgaaactatggtttcgacatatgagtcttgtgatgtactggctgatttctacgaccagttcgctgaccagttgcacgagtctcaattggacaaaatgccagcacttccggctaaaggtaacttgaacctccgtgacatcttaaaatcggacttcgcgttcgcg

SEQ ID NO: 556 - protein, 890 aa, synthetic construct
  REGION 1..890: note = Variant of RNA polymerase
MHHHHHHMNTINIAKNDFSDIELAAIPFNTLADHYGERLAREQLALEHESYEMGEARFRKMFERQLKAGEVADNAAAKPLITTLLPKMIARINDWFEEVKAKRGKRPTAFQFLQEIKPEAVAYITIKTTLACLTSADNTTVQAVASAIGRAIEDEARFGRIRDLEAKHFKGNVEEQLNKRVGHPYKKAFMQVVEADMLSKGLLGGEAWSSWHKEDSIHVGVRCIEMLIESTGMVSLHRQNAGVVGQDSETIELAPEYAEAIATRAGALAGISPMFQPCVVPPKPWTGITGGGYWAAGRKPLQLVRTRSLAALRRYEEVSMPEVIKAVNIAQNTAWRINKKVLDVANTITQWQHCPVADVPAMDRGEMPARPLDIDTNEIALKAWKKEASAFYRKDKARVSRRLSMEFMLSQANKFANYKAIWFPQNMDWRGRVYAVPMFNPQGNDMTKGLLTFAQEKPIGEDGFYWLKIHGANTAGVDKVPFPQRIKFVEDNHTNIMECAKAPLENTWWAEQDSPFCFLAFCFEYAGVINSGLSYNCSLPLAFDGSCSGLQHFSAMLRDEIGGKAVNLLPSAEYQDIYRIVSDKVNEVLKQDLINGTSTTVETVTDKKTGEITQRTKYGTKVMAQWWLEHGVNRGVTKRSVMTLVYGSKEFGFRDQVLSDTIQPAIDNGKGDMFLNPNQAAGYMAKLIWNAVSGTVVAAVEAMNWLKSAAKLLAAEVKDPKTDTVLRGRCAVHWVTPDGFPVWQEYKKPIQTRLNLMFLGQFRLQPTINTNKDSEIDAHKQESGIAPNFVHSQDGNHLRMTVVWAHEKYGIESFALIHDSFGTIPADAANLFKAVRETMVSTYESCDVLADFYDQFADQLHESQLDKMPALPAKGNLNLRDILKSDFAFA

SEQ ID NO: 557 - DNA, 2670 bp, synthetic construct
  misc_feature 1..2670: note = Variant of RNA polymerase
  source 1..2670: mol_type = other DNA
atgcaccatcaccatcaccatatgaacacgattaacattgctaagaacgacttctctgacatcgaactggctgctatcccgttcaacactctggctgaccattacggtgagcgtttagctcgcgaacagttggcccttgagcatgagtcttacgagatgggtgaagcacgcttccgcaagatgtttgagcgtcaacttaaagctggtgaggttgcggataacgctgccgccaagcctctcatcactaccctactccctaagatgattgcacgcatcaacgactggtttgaggaagtgaaagctaagcgcggcaagcgcccgacagccttccagttcctgcaagaaatcaagccggaagccgtagcgtacatcaccattaagaccactctggcttgcctaaccagtgcggacaatacaaccgttcaggctgtagcaagcgcaatcggtcgggccattgaggacgaggctcgcttcggtcgtatccgtgaccttgaagctaagcacttcaagggcaacgttgaggaacaactcaacaagcgcgtagggcacccgtacaagaaagcatttatgcaagttgtcgaggctgacatgctctctaagggtctactcggtggcgaggcgtggtcttcgtggcataaggaagactctattcatgtaggagtacgctgcatcgagatgctcattgagtcaaccggaatggttagcttacaccgccaaaatgctggcgtagtaggtcaagactctgagactatcgaactcgcacctgaatacgctgaggctatcgcaacccgtgcaggtgcgctggctggcatctctccgatgttccaaccttgcgtagttcctcctaagccgtggactggcattactggtggtggctattgggctgcggggcgcaaacccctgcagttagtacgtactcgcagtctggcggcgcttcgccgctatgaagaagtgtcgatgccggaggtcatcaaagcagtcaacattgcgcagaatacagcatggcgtattaacaagaaagttctcgacgtagcgaataccatcacccaatggcagcactgtccagtcgcggatgtgcctgcgatggatcgtggcgaaatgccagctcgtccgttggacatcgataccaacgagattgcacttaaagcgtggaagaaagaagcttccgcgttctaccgcaaagacaaagcacgcgttagccgtcgtctgtcaatggagtttatgttatctcaggcgaacaagtttgcgaatgagaaagcaatctggtttccgcaaaacatggattggcgtgggcgcgtgtacgctgtcccgatgttcaatcctcagggcaacgatatgacgaaaggcctgctgacctttgcgcaggagaaacccattggtgaagacggcttctattggctcaagattcatggcgcaaatacagctggagtggataaagtaccgtttccacaacgcatcaaatttgttgaggataaccatacgaatattatggaatgcgcgaaagcaccgctggaaaacacttggtgggcggaacaggactcgccgttctgttttctggcgttctgctttgagtatgctggcgtcatcaatagtggtctgtcgtacaactgtagcttgcctctggcatttgatggtagttgctccggcctgcaacatttctcagcgatgttacgcgacgaaattggcggcaaagctgtgaatctcctcccatctgcggaataccaggatatttatcgtatcgtcagcgacaaagttaacgagatgctgaaacaagatctgattaacggtacctctaccaccgtggaaacggtgactgataagaagacaggcgaaattacccaacgcacgaaatacgggaccaaagttatggcacagtggtggttagaacacggtgtgaatcgtggcgtcacgaaacgctcggttatgactttggtgtatgggagcaaagagtttggattccgcgatcaagtgctgagtgacaccattcaaccggcgatcgataacggcaaaggtgacatgtttctgaatccgaatcaggctgctggttacatggcgaaactgatctggaacgcagtgtccgggaccgtagtcgcagcagttgaggcgatgaactggctgaaaagtgcggcgaaattacttgctgctgaagtgaaggatcctaagacggatacagttctgcgtggccgctgcgcagtacattgggtgactcccgacggcttccctgtgtggcaggaatacaagaagcctattcagacgcgcttgaacctgatgttcctcggtcagttccgcttacagcctaccattaacaccaacaaagatagcgagattgatgcacacaaacaggagtctggtatcgctcctaactttgtacacagccaagacggtaaccaccttcgtatgactgtagtgtgggcacacgagaagtacggaatcgaatcttttgcactgattcacgactccttcggcaccattccggctgacgctgcgaacctgttcaaagcagtgcgcgaaactatggtttcgacatatgagtcttgtgatgtactggctgatttctacgaccagttcgctgaccagttgcacgagtctcaattggacaaaatgccagcacttccggctaaaggtaacttgaacctccgtgacatcttaaaatcggacttcgcgttcgcg

SEQ ID NO: 558 - protein, 890 aa, synthetic construct
  REGION 1..890: note = Variant of RNA polymerase
MHHHHHHMNTINIAKNDFSDIELAAIPFNTLADHYGERLAREQLALEHESYEMGEARFRKMFERQLKAGEVADNAAAKPLITTLLPKMIARINDWFEEVKAKRGKRPTAFQFLQEIKPEAVAYITIKTTLACLTSADNTTVQAVASAIGRAIEDEARFGRIRDLEAKHFKGNVEEQLNKRVGHPYKKAFMQVVEADMLSKGLLGGEAWSSWHKEDSIHVGVRCIEMLIESTGMVSLHRQNAGVVGQDSETIELAPEYAEAIATRAGALAGISPMFQPCVVPPKPWTGITGGGYWAAGRKPLQLVRTRSLAALRRYEEVSMPEVIKAVNIAQNTAWRINKKVLDVANTITQWQHCPVADVPAMDRGEMPARPLDIDTNEIALKAWKKEASAFYRKDKARVSRRLSMEFMLSQANKFANEKAIWFPQNMDWRGRVYAVPMFNPQGNDMTKGLLTFAQEKPIGEDGFYWLKIHGANTAGVDKVPFPQRIKFVEDNHTNIMECAKAPLENTWWAEQDSPFCFLAFCFEYAGVINSGLSYNCSLPLAFDGSCSGLQHFSAMLRDEIGGKAVNLLPSAEYQDIYRIVSDKVNEMLKQDLINGTSTTVETVTDKKTGEITQRTKYGTKVMAQWWLEHGVNRGVTKRSVMTLVYGSKEFGFRDQVLSDTIQPAIDNGKGDMFLNPNQAAGYMAKLIWNAVSGTVVAAVEAMNWLKSAAKLLAAEVKDPKTDTVLRGRCAVHWVTPDGFPVWQEYKKPIQTRLNLMFLGQFRLQPTINTNKDSEIDAHKQESGIAPNFVHSQDGNHLRMTVVWAHEKYGIESFALIHDSFGTIPADAANLFKAVRETMVSTYESCDVLADFYDQFADQLHESQLDKMPALPAKGNLNLRDILKSDFAFA

SEQ ID NO: 559 - DNA, 2670 bp, synthetic construct
  misc_feature 1..2670: note = Variant of RNA polymerase
  source 1..2670: mol_type = other DNA
atgcaccatcaccatcaccatatgaacacgattaacattgctaagaacgacttctctgacatcgaactggctgctatcccgttcaacactctggctgaccattacggtgagcgtttagctcgcgaacagttggcccttgagcatgagtcttacgagatgggtgaagcacgcttccgcaagatgtttgagcgtcaacttaaagctggtgaggttgcggataacgctgccgccaagcctctcatcactaccctactccctaagatgattgcacgcatcaacgactggtttgaggaagtgaaagctaagcgcggcaagcgcccgacagccttccagttcctgcaagaaatcaagccggaagccgtagcgtacatcaccattaagaccactctggcttgcctaaccagtgcggacaatacaaccgttcaggctgtagcaagcgcaatcggtcgggccattgaggacgaggctcgcttcggtcgtatccgtgaccttgaagctaagcacgtcaagaaaaacgttgaggaacaactcaacaagcgcgtagggcacgtctacaagaaagcatttatgcaagttgtcgaggctgacatgctctctaagggtctactcggtggcgaggcgtggtcttcgtggcataaggaagactctattcatgtaggagtacgctgcatcgagatgctcattgagtcaaccggaatggttagcttacaccgccaaaatgctggcgtagtaggtcaagactctgagactatcgaactcgcacctgaatacgctgaggctatcgcaacccgtgcaggtgcgctggctggcatctctccgatgttccaaccttgcgtagttcctcctaagccgtggactggcattactggtggtggctattgggctgcggggcgcaaacccctgcagttagtacgtactcgcagtctggcggcgcttcgccgctatgaagaagtgtcgatgccggaggtcatcaaagcagtcaacattgcgcagaatacagcatggcgtattaacaagaaagttctcgacgtagcgaatgcaatcacccaatggcagcactgtccagtcgcggatgtgcctgcgatggatcgtggcgaaatgccagctcgtccgttggacatcgataccaacgagattgcacttaaagcgtggaagaaagaagcttccgcgttctaccgcaaagacaaagcacgcgttagccgtcgtctgtcaatggagtttatgttatctcaggcgaacaagtttgcgaattataaagcaatctggtttccgcaaaacatggattggcgtgggcgcgtgtacgctgtcccgatgttcaatcctcagggcaacgatatgacgaaaggcctgctgacctttgcgcaggagaaacccattggtgaagacggcttctattggctcaagattcatggcgcaaatacagctggagtggataaagtaccgtttccacaacgcatcaaatttgttgaggataaccatacgaatattatggaatgcgcgaaagcaccgctggaaaacacttggtgggcggaacaggactcgccgttctgttttctggcgttctgctttgagtatgctggcgtcatcaatcacggtctgtcgtacaactgtagcttgcctcaggcatttgatggtagttgctccggcattcaacatttctcagcgatgttacgcgacgaaattggcggcaaagctgtgaatctcctcccatctgcggaataccaggatatttatcgtatcgtcagcgacaaagttaacgagatgctgaaacaagatctgattaacggtacctctaccaccgtggaaacggtgactgataagaagacaggcgaaattacccaacgcacgaaatacgggaccaaagttatggcacagtggtggttagaacacggtgtgaatcgtggcgtcacgaaacgctcggttatgactttggtgtatgggagcaaagagtttggattccgcgatcaagtgctgagtgacaccattcaaccggcgatcgataacggcaaaggtgacatgtttctgaatccgaatcaggctgctggttacatggcgaaactgatctggaacgcagtgtccgggaccgtagtcgcagcagttgaggcgatgaactggctgaaaagtgcggcgaaattacttgctgctgaagtgaaggatcctaagacggatacagttctgcgtggccgctgcgcagtacattgggtgactcccgacggcttccctgtgtggcaggaatacaagaagcctattcagacgcgcttgaacctgatgttcctcggtcagttccgcttacagcctaccattaacaccaacaaagatagcgagattgatgcacacaaacaggagtctggtatcgctcctaactttgtacacagccaagacggtaaccaccttcgtatgactgtagtgtgggcacacgagaagtacggaatcgaatcttttgcactgattcacgactccttcggtaccattccggctgacgctgcgaacctgttcaaagcagtgcgcgaaactatggtttcgacatatgagtcttgtgatgtactggctgatttctacgaccagttcgctgaccagttgcacgagtctcaacgcgacaaaatgccagcacttccggctaaaggtaacttgaacctccgtgacatcttaaaatcggacttcgcgttcgcg

SEQ ID NO: 560 - protein, 890 aa, synthetic construct
  REGION 1..890: note = Variant of RNA polymerase
MHHHHHHMNTINIAKNDFSDIELAAIPFNTLADHYGERLAREQLALEHESYEMGEARFRKMFERQLKAGEVADNAAAKPLITTLLPKMIARINDWFEEVKAKRGKRPTAFQFLQEIKPEAVAYITIKTTLACLTSADNTTVQAVASAIGRAIEDEARFGRIRDLEAKHVKKNVEEQLNKRVGHVYKKAFMQVVEADMLSKGLLGGEAWSSWHKEDSIHVGVRCIEMLIESTGMVSLHRQNAGVVGQDSETIELAPEYAEAIATRAGALAGISPMFQPCVVPPKPWTGITGGGYWAAGRKPLQLVRTRSLAALRRYEEVSMPEVIKAVNIAQNTAWRINKKVLDVANAITQWQHCPVADVPAMDRGEMPARPLDIDTNEIALKAWKKEASAFYRKDKARVSRRLSMEFMLSQANKFANYKAIWFPQNMDWRGRVYAVPMFNPQGNDMTKGLLTFAQEKPIGEDGFYWLKIHGANTAGVDKVPFPQRIKFVEDNHTNIMECAKAPLENTWWAEQDSPFCFLAFCFEYAGVINHGLSYNCSLPQAFDGSCSGIQHFSAMLRDEIGGKAVNLLPSAEYQDIYRIVSDKVNEMLKQDLINGTSTTVETVTDKKTGEITQRTKYGTKVMAQWWLEHGVNRGVTKRSVMTLVYGSKEFGFRDQVLSDTIQPAIDNGKGDMFLNPNQAAGYMAKLIWNAVSGTVVAAVEAMNWLKSAAKLLAAEVKDPKTDTVLRGRCAVHWVTPDGFPVWQEYKKPIQTRLNLMFLGQFRLQPTINTNKDSEIDAHKQESGIAPNFVHSQDGNHLRMTVVWAHEKYGIESFALIHDSFGTIPADAANLFKAVRETMVSTYESCDVLADFYDQFADQLHESQRDKMPALPAKGNLNLRDILKSDFAFA

SEQ ID NO: 561 - DNA, 2670 bp, synthetic construct
  misc_feature 1..2670: note = Variant of RNA polymerase
  source 1..2670: mol_type = other DNA
atgcaccatcaccatcaccatatgaacacgattaacattgctaagaacgacttctctgacatcgaactggctgctatcccgttcaacactctggctgaccattacggtgagcgtttagctcgcgaacagttggcccttgagcatgagtcttacgagatgggtgaagcacgcttccgcaagatgtttgagcgtcaacttaaagctggtgaggttgcggataacgctgccgccaagcctctcatcactaccctactccctaagatgattgcacgcatcaacgactggtttgaggaagtgaaagctaagcgcggcaagcgcccgacagccttccagttcctgcaagaaatcaagccggaagccgtagcgtacatcaccattaagaccactctggcttgcctaaccagtgcggacaatacaaccgttcaggctgtagcaagcgcaatcggtcgggccattgaggacgaggctcgcttcggtcgtatccgtgaccttgaagctaagcacttcaagaaaaacgttgaggaacaactcaacaagcgcgtagggcacgtctacaagaaagcatttatgcaagttgtcgaggctgacatgctctctaagggtctactcggtggcgaggcgtggtcttcgtggcataaggaagactctattcatgtaggagtacgctgcatcgagatgctcattgagtcaaccggaatggttagcttacaccgccaaaatgctggcgtagtaggtcaagactctgagactatcgaactcgcacctgaatacgctgaggctatcgcaacccgtgcaggtgcgctggctggcatctctccgatgttccaaccttgcgtagttcctcctaagccgtggactggcattactggtggtggctattgggctgcggggcgcaaacccctgcagttagtacgtactcgcagtctggcggcgcttcgccgctatgaagaagtgtcgatgccggaggtcatcaaagcagtcaacattgcgcagaatacagcatggcgtattaacaagaaagttctcgacgtagcgaatgcaatcacccaatggcagcactgtccagtcgcggatgtgcctgcgatggatcgtggcgaaatgccagctcgtccgttggacatcgataccaacgagattgcacttaaagcgtggaagaaagaagcttccgcgttctaccgcaaagacaaagcacgcgttagccgtcgtctgtcaatggagtttatgttatctcaggcgaacaagtttgcgaattataaagcaatctggtttccgcaaaacatggattggcgtgggcgcgtgtacgctgtcccgatgttcaatcctcagggcaacgatatgacgaaaggcctgctgacctttgcgcaggagaaacccattggtgaagacggcttctattggctcaagattcatggcgcaaatacagctggagtggataaagtaccgtttccacaacgcatcaaatttgttgaggataaccatacgaatattatggaatgcgcgaaagcaccgctggaaaacacttggtgggcggaacaggactcgccgttctgttttctggcgttctgctttgagtatgctggcgtcatcaatcacggtctgtcgtacaactgtagcttgcctctggcatttgatggtagttgctccggcattcaacatttctcagcgatgttacgcgacgaaattggcggcaaagctgtgaatctcctcccatctgcggaataccaggatatttatcgtatcgtcagcgacaaagttaacgaggtactgaaacaagatctgattaacggtacctctaccaccgtggaaacggtgactgataagaagacaggcgaaattacccaacgcacgaaatacgggaccaaagttatggcacagtggtggttagaacacggtgtgaatcgtggcgtcacgaaacgctcggttatgactttggtgtatgggagcaaagagtttggattccgcgatcaagtgctgagtgacaccattcaaccggcgatcgataacggcaaaggtgacatgtttctgaatccgaatcaggctgctggttacatggcgaaactgatctggaacgcagtgtccgggaccgtagtcgcagcagttgaggcgatgaactggctgaaaagtgcggcgaaattacttgctgctgaagtgaaggatcctaagacggatacagttctgcgtggccgctgcgcagtacattgggtgactcccgacggcttccctgtgtggcaggaatacaagaagcctattcagacgcgcttgaacctgatgttcctcggtcagttccgcttacagcctaccattaacaccaacaaagatagcgagattgatgcacacaaacaggagtctggtatcgctcctaactttgtacacagccaagacggtaaccaccttcgtatgactgtagtgtgggcacacgagaagtacggaatcgaatcttttgcactgattcacgactccttcggtaccattccggctgacgctgcgaacctgttcaaagcagtgcgcgaaactatggttgacacatatgagtcttgtgatgtactggctgatttctacgaccagttcgctgaccagttgcacgagtctcaattggacaaaatgccagcacttccggctaaaggtaacttgaacctccgtgacatcttaaaatcggacttcgcgttcgcg

SEQ ID NO: 562 - protein, 890 aa, synthetic construct
  REGION 1..890: note = Variant of RNA polymerase
MHHHHHHMNTINIAKNDFSDIELAAIPFNTLADHYGERLAREQLALEHESYEMGEARFRKMFERQLKAGEVADNAAAKPLITTLLPKMIARINDWFEEVKAKRGKRPTAFQFLQEIKPEAVAYITIKTTLACLTSADNTTVQAVASAIGRAIEDEARFGRIRDLEAKHFKKNVEEQLNKRVGHVYKKAFMQVVEADMLSKGLLGGEAWSSWHKEDSIHVGVRCIEMLIESTGMVSLHRQNAGVVGQDSETIELAPEYAEAIATRAGALAGISPMFQPCVVPPKPWTGITGGGYWAAGRKPLQLVRTRSLAALRRYEEVSMPEVIKAVNIAQNTAWRINKKVLDVANAITQWQHCPVADVPAMDRGEMPARPLDIDTNEIALKAWKKEASAFYRKDKARVSRRLSMEFMLSQANKFANYKAIWFPQNMDWRGRVYAVPMFNPQGNDMTKGLLTFAQEKPIGEDGFYWLKIHGANTAGVDKVPFPQRIKFVEDNHTNIMECAKAPLENTWWAEQDSPFCFLAFCFEYAGVINHGLSYNCSLPLAFDGSCSGIQHFSAMLRDEIGGKAVNLLPSAEYQDIYRIVSDKVNEVLKQDLINGTSTTVETVTDKKTGEITQRTKYGTKVMAQWWLEHGVNRGVTKRSVMTLVYGSKEFGFRDQVLSDTIQPAIDNGKGDMFLNPNQAAGYMAKLIWNAVSGTVVAAVEAMNWLKSAAKLLAAEVKDPKTDTVLRGRCAVHWVTPDGFPVWQEYKKPIQTRLNLMFLGQFRLQPTINTNKDSEIDAHKQESGIAPNFVHSQDGNHLRMTVVWAHEKYGIESFALIHDSFGTIPADAANLFKAVRETMVDTYESCDVLADFYDQFADQLHESQLDKMPALPAKGNLNLRDILKSDFAFA

SEQ ID NO: 563 - DNA, 2670 bp, synthetic construct
  misc_feature 1..2670: note = Variant of RNA polymerase
  source 1..2670: mol_type = other DNA
atgcaccatcaccatcaccatatgaacacgattaacattgctaagaacgacttctctgacatcgaactggctgctatcccgttcaacactctggctgaccattacggtgagcgtttagctcgcgaacagttggcccttgagcatgagtcttacgagatgggtgaagcacgcttccgcaagatgtttgagcgtcaacttaaagctggtgaggttgcggataacgctgccgccaagcctctcatcactaccctactccctaagatgattgcacgcatcaacgactggtttgaggaagtgaaagctaagcgcggcaagcgcccgacagccttccagttcctgcaagaaatcaagccggaagccgtagcgtacatcaccattaagaccactctggcttgcctaaccagtgcggacaatacaaccgttcaggctgtagcaagcgcaatcggtcgggccattgaggacgaggctcgcttcggtcgtatccgtgaccttgaagctaagcacttcaagaaaaacgttgaggaacaactcaacaagcgcgtagggcacgtctacaagaaagcatttatgcaagttgtcgaggctgacatgctctctaagggtctactcggtggcgaggcgtggtcttcgtggcataaggaagactctattcatgtaggagtacgctgcatcgagatgctcattgagtcaaccggaatggttagcttacaccgccaaaatgctggcgtagtaggtcaagactctgagactatcgaactcgcacctgaatacgctgaggctatcgcaacccgtgcaggtgcgctggctggcatctctccgatgttccaaccttgcgtagttcctcctaagccgtggactggcattactggtggtggctattgggctgcggggcgcaaacccctgcagttagtacgtactcgcagtctggcggcgcttcgccgctatgaagaagtgtcgatgccggaggtcatcaaagcagtcaacattgcgcagaatacagcatggcgtattaacaagaaagttctcgacgtagcgaatgcaatcacccaatggcagcactgtccagtcgcggatgtgcctgcgatggatcgtggcgaaatgccagctcgtccgttggacatcgataccaacgagattgcacttaaagcgtggaagaaagaagcttccgcgttctaccgcaaagacaaagcacgcgttagccgtcgtctgtcaatggagtttatgttatctcaggcgaacaagtttgcgaattataaagcaatctggtttccgcaaaacatggattggcgtgggcgcgtgtacgctgtcccgatgttcaatcctcagggcaacgatatgacgaaaggcctgctgacctttgcgcaggagaaacccattggtgaagacggcttctattggctcaagattcatggcgcaaatacagctggagtggataaagtaccgtttccacaacgcatcaaatttgttgaggataaccatacgaatattatggaatgcgcgaaagcaccgctggaaaacacttggtgggcggaacaggactcgccgttctgttttctggcgttctgctttgagtatgctggcgtcatcaatcacggtctgtcgtacaactgtagcttgcctctggcatttgatggtagttgctccggcattcaacatttctcagcgatgttacgcgacgaaattggcggcaaagctgtgaatctcctcccatctgcggaataccaggatatttatcgtatcgtcagcgacaaagttaacgaggtgctgaaacaagatctgattaacggtacctctaccaccgtggaaacggtgactgataagaagacaggcgaaattacccaacgcacgaaatacgggaccaaagtaatggcacagtggtggttagaacacggtgtgaatcgtggcgtcacgaaacgctcggttatgactttggtgtatgggagcaaagagtttggattccgcgatcaagtgctgagtgacaccattcaaccggcgatcgataacggcaaaggtgacatgtttctgaatccgaatcaggctgctggttacatggcgaaactgatctggaacgcagtgtccgggaccgtagtcgcagcagttgaggcgatgaactggctgaaaagtgcggcgaaattacttgctgctgaagtgaaggatcctaagacggatacagttctgcgtggccgctgcgcagtacattgggtgactcccgacggcttccctgtgtggcaggaatacaagaagcctattcagacgcgcttgaacctgatgttcctcggtcagttccgcttacagcctaccattaacaccaacaaagatagcgagattgatgcacacaaacaggagtctggtatcgctcctaactttgtacacagccaagacggtaaccaccttcgtatgactgtagtgtgggcacacgagaagtacggaatcgaatcttttgcactgattcacgactccttcggtaccattccggctgacgctgcgaacctgttcaaagcagtgcgcgaaactttcgttgacacatatgagtcttgtgatgtactggctgatttctacgaccagttcgctgaccagttgcacgagtctcaattggacaaaatgccagcacttccggctaaaggtaacttgaacctccgtgacatcttaaaatcggacttcgcgttcgcg

SEQ ID NO: 564 - protein, 890 aa, synthetic construct
  REGION 1..890: note = Variant of RNA polymerase
MHHHHHHMNTINIAKNDFSDIELAAIPFNTLADHYGERLAREQLALEHESYEMGEARFRKMFERQLKAGEVADNAAAKPLITTLLPKMIARINDWFEEVKAKRGKRPTAFQFLQEIKPEAVAYITIKTTLACLTSADNTTVQAVASAIGRAIEDEARFGRIRDLEAKHFKKNVEEQLNKRVGHVYKKAFMQVVEADMLSKGLLGGEAWSSWHKEDSIHVGVRCIEMLIESTGMVSLHRQNAGVVGQDSETIELAPEYAEAIATRAGALAGISPMFQPCVVPPKPWTGITGGGYWAAGRKPLQLVRTRSLAALRRYEEVSMPEVIKAVNIAQNTAWRINKKVLDVANAITQWQHCPVADVPAMDRGEMPARPLDIDTNEIALKAWKKEASAFYRKDKARVSRRLSMEFMLSQANKFANYKAIWFPQNMDWRGRVYAVPMFNPQGNDMTKGLLTFAQEKPIGEDGFYWLKIHGANTAGVDKVPFPQRIKFVEDNHTNIMECAKAPLENTWWAEQDSPFCFLAFCFEYAGVINHGLSYNCSLPLAFDGSCSGIQHFSAMLRDEIGGKAVNLLPSAEYQDIYRIVSDKVNEVLKQDLINGTSTTVETVTDKKTGEITQRTKYGTKVMAQWWLEHGVNRGVTKRSVMTLVYGSKEFGFRDQVLSDTIQPAIDNGKGDMFLNPNQAAGYMAKLIWNAVSGTVVAAVEAMNWLKSAAKLLAAEVKDPKTDTVLRGRCAVHWVTPDGFPVWQEYKKPIQTRLNLMFLGQFRLQPTINTNKDSEIDAHKQESGIAPNFVHSQDGNHLRMTVVWAHEKYGIESFALIHDSFGTIPADAANLFKAVRETFVDTYESCDVLADFYDQFADQLHESQLDKMPALPAKGNLNLRDILKSDFAFA

SEQ ID NO: 565 - DNA, 2670 bp, synthetic construct
  misc_feature 1..2670: note = Variant of RNA polymerase
  source 1..2670: mol_type = other DNA
atgcaccatcaccatcaccatatgaacacgattaacattgctaagaacgacttctctgacatcgaactggctgctatcccgttcaacactctggctgaccattacggtgagcgtttagctcgcgaacagttggcccttgagcatgagtcttacgagatgggtgaagcacgcttccgcaagatgtttgagcgtcaacttaaagctggtgaggttgcggataacgctgccgccaagcctctcatcactaccctactccctaagatgattgcacgcatcaacgactggtttgaggaagtgaaagctaagcgcggcaagcgcccgacagccttccagttcctgcaagaaatcaagccggaagccgtagcgtacatcaccattaagaccactctggcttgcctaaccagtgcggacaatacaaccgttcaggctgtagcaagcgcaatcggtcgggccattgaggacgaggctcgcttcggtcgtatccgtgaccttgaagctaagcacttcaagggcaacgttgaggaacaactcaacaagcgcgtagggcacgtctacaaaaaagcatttatgcaagttgtcgaggctgacatgctctctaagggtctactcggtggcgaggcgtggtcttcgtggcataaggaagactctattcatgtaggagtacgctgcatcgagatgctcattgagtcaaccggaatggttagcttacaccgccaaaatgctggcgtagtaggtcaagactctgagactatcgaactcgcacctgaatacgctgaggctatcgcaacccgtgcaggtgcgctggctggcatctctccgatgttccaaccttgcgtagttcctcctaagccgtggactggcattactggtggtggctattgggctgcggggcgcaaacccctgcagttagtacgtactcgcagtctggcggcgcttcgccgctatgaagaagtgtcgatgccggaggtcatcaaagcagtcaacattgcgcagaatacagcatggcgtattaacaagaaagttctcgacgtagcgaataccatcacccaatggcagcactgtccagtcgcggatgtgcctgcgatggatcgtggcgaaatgccagctcgtccgttggacatcgataccaacgagattgcacttaaagcgtggaagaaagaagcttccgcgttctaccgcaaagacaaagcacgcgttagccgtcgtctgtcaatggagtttatgttatctcaggcgaacaagtttgcgaatgagaaagcaatctggtttccgcaaaacatggattggcgtgggcgcgtgtacgctgtcccgatgttcaatcctcagggcaacgatatgacgaaaggcctgctgacctttgcgcaggagaaacccattggtgaagacggcttctattggctcaagattcatggcgcaaatacagctggagtggataaagtaccgtttccacaacgcatcaaatttgttgaggataaccatacgaatattatggaatgcgcgaaagcaccgctggaaaacacttggtgggcggaacaggactcgccgttctgttttctggcgttctgctttgagtatgctggcgtcatcaatcatggtctgtcgtacaactgtagcttgcctctggcatttgatggtagttgctccggcctgcaacatttctcagcgatgttacgcgacgaaattggcggcaaagctgtgaatctcctcccatctgcggaataccaggatatttatcgtatcgtcagcgacaaagttaacgaggtgctgaaacaagatctgattaacggtacctctaccaccgtggaaacggtgactgataagaagacaggcgaaattacccaacgcacgaaatacgggaccaaagttatggcacagtggtggttagaacacggtgtgaatcgtggcgtcacgaaacgctcggttatgactttggtgtatgggagcaaagagtttggattccgcgatcaagtgctgagtgacaccattcaaccggcgatcgataacggcaaaggtgacatgtttctgaatccgaatcaggctgctggttacatggcgaaactgatctggaacgcagtgtccgggaccgtagtcgcagcagttgaggcgatgaactggctgaaaagtgcggcgaaattacttgctgctgaagtgaaggatcctaagacggatacagttctgcgtggccgctgcgcagtacattgggtgactcccgacggcttccctgtgtggcaggaatacaagaagcctattcagacgcgcttgaacctgatgttcctcggtcagttccgcttacagcctaccattaacaccaacaaagatagcgagattgatgcacacaaacaggagtctggtatcgctcctaactttgtacacagccaagacggtaaccaccttcgtatgactgtagtgtgggcacacgagaagtacggaatcgaatcttttgcactgattcacgactccttcggtaccattccggctgacgctgcgaacctgttcaaagcagtgcgcgaaactatggtttcgacatatgagtcttgtgatgtactggctgatttctacgaccagttcgctgaccagttgcacgagtctcaattggacaaaatgccagcacttccggctaaaggtaacttgaacctccgtgacatcttaaaatcggacttcgcgttcgcg

SEQ ID NO: 566 - protein, 890 aa, synthetic construct
  REGION 1..890: note = Variant of RNA polymerase
MHHHHHHMNTINIAKNDFSDIELAAIPFNTLADHYGERLAREQLALEHESYEMGEARFRKMFERQLKAGEVADNAAAKPLITTLLPKMIARINDWFEEVKAKRGKRPTAFQFLQEIKPEAVAYITIKTTLACLTSADNTTVQAVASAIGRAIEDEARFGRIRDLEAKHFKGNVEEQLNKRVGHVYKKAFMQVVEADMLSKGLLGGEAWSSWHKEDSIHVGVRCIEMLIESTGMVSLHRQNAGVVGQDSETIELAPEYAEAIATRAGALAGISPMFQPCVVPPKPWTGITGGGYWAAGRKPLQLVRTRSLAALRRYEEVSMPEVIKAVNIAQNTAWRINKKVLDVANTITQWQHCPVADVPAMDRGEMPARPLDIDTNEIALKAWKKEASAFYRKDKARVSRRLSMEFMLSQANKFANEKAIWFPQNMDWRGRVYAVPMFNPQGNDMTKGLLTFAQEKPIGEDGFYWLKIHGANTAGVDKVPFPQRIKFVEDNHTNIMECAKAPLENTWWAEQDSPFCFLAFCFEYAGVINHGLSYNCSLPLAFDGSCSGLQHFSAMLRDEIGGKAVNLLPSAEYQDIYRIVSDKVNEVLKQDLINGTSTTVETVTDKKTGEITQRTKYGTKVMAQWWLEHGVNRGVTKRSVMTLVYGSKEFGFRDQVLSDTIQPAIDNGKGDMFLNPNQAAGYMAKLIWNAVSGTVVAAVEAMNWLKSAAKLLAAEVKDPKTDTVLRGRCAVHWVTPDGFPVWQEYKKPIQTRLNLMFLGQFRLQPTINTNKDSEIDAHKQESGIAPNFVHSQDGNHLRMTVVWAHEKYGIESFALIHDSFGTIPADAANLFKAVRETMVSTYESCDVLADFYDQFADQLHESQLDKMPALPAKGNLNLRDILKSDFAFA

SEQ ID NO: 567 - DNA, 2670 bp, synthetic construct
  misc_feature 1..2670: note = Variant of RNA polymerase
  source 1..2670: mol_type = other DNA
atgcaccatcaccatcaccatatgaacacgattaacattgctaagaacgacttctctgacatcgaactggctgctatcccgttcaacactctggctgaccattacggtgagcgtttagctcgcgaacagttggcccttgagcatgagtcttacgagatgggtgaagcacgcttccgcaagatgtttgagcgtcaacttaaagctggtgaggttgcggataacgctgccgccaagcctctcatcactaccctactccctaagatgattgcacgcatcaacgactggtttgaggaagtgaaagctaagcgcggcaagcgcccgacagccttccagttcctgcaagaaatcaagccggaagccgtagcgtacatcaccattaagaccactctggcttgcctaaccagtgcggacaatacaaccgttcaggctgtagcaagcgcaatcggtcgggccattgaggacgaggctcgcttcggtcgtatccgtgaccttgaagctaagcacttcaagggcaacgttgaggaacaactcaacaagcgcgtagggcacccgtacaagaaagcatttatgcaagttgtcgaggctgacatgctctctaagggtctactcggtggcgaggcgtggtcttcgtggcataaggaagactctattcatgtaggagtacgctgcatcgagatgctcattgagtcaaccggaatggttagcttacaccgccaaaatgctggcgtagtaggtcaagactctgagactatcgaactcgcacctgaatacgctgaggctatcgcaacccgtgcaggtgcgctggctggcatctctccgatgttccaaccttgcgtagttcctcctaagccgtggactggcattactggtggtggctattgggctgcggggcgcaaacccctgcagttagtacgtactcgcagtctggcggcgcttcgccgctatgaagaagtgtcgatgccggaggtcatcaaagcagtcaacattgcgcagaatacagcatggcgtattaacaagaaagttctcgacgtagcgaataccatcacccaatggcagcactgtccagtcgcggatgtgcctgcgatggatcgtggcgaaatgccagctcgtccgttggacatcgataccaacgagattgcacttaaagcgtggaagaaagaagcttccgcgttctaccgcaaagacaaagcacgcgttagccgtcgtctgtcaatggagtttatgttatctcaggcgaacaagtttgcgaatgagaaagcaatctggtttccgcaaaacatggattggcgtgggcgcgtgtacgctgtcccgatgttcaatcctcagggcaacgatatgacgaaaggcctgctgacctttgcgcaggagaaacccattggtgaagacggcttctattggctcaagattcatggcgcaaatacagctggagtggataaagtaccgtttccacaacgcatcaaatttgttgaggataaccatacgaatattatggaatgcgcgaaagcaccgctggaaaacacttggtgggcggaacaggactcgccgttctgttttctggcgttctgctttgagtatgctggcgtcatcaatcatggtctgtcgtacaactgtagcttgcctctggcatttgatggtagttgctccggcattcaacatttctcagcgatgttacgcgacgaaattggcggcaaagctgtgaatctcctcccatctgcggaataccaggatatttatcgtatcgtcagcgacaaagttaacgagatgctgaaacaagatctgattaacggtacctctaccaccgtggaaacggtgactgataagaagacaggcgaaattacccaacgcacgaaatacgggaccaaagttatggcacagtggtggttagaacacggtgtgaatcgtggcgtcacgaaacgctcggttatgactttggtgtatgggagcaaagagtttggattccgcgatcaagtgctgagtgacaccattcaaccggcgatcgataacggcaaaggtgacatgtttctgaatccgaatcaggctgctggttacatggcgaaactgatctggaacgcagtgtccgggaccgtagtcgcagcagttgaggcgatgaactggctgaaaagtgcggcgaaattacttgctgctgaagtgaaggatcctaagacggatacagttctgcgtggccgctgcgcagtacattgggtgactcccgacggcttccctgtgtggcaggaatacaagaagcctattcagacgcgcttgaacctgatgttcctcggtcagttccgcttacagcctaccattaacaccaacaaagatagcgagattgatgcacacaaacaggagtctggtatcgctcctaactttgtacacagccaagacggtaaccaccttcgtatgactgtagtgtgggcacacgagaagtacggaatcgaatcttttgcactgattcacgactccttcggtaccattccggctgacgctgcgaacctgttcaaagcagtgcgcgaaactatggtttcgacatatgagtcttgtgatgtactggctgatttctacgaccagttcgctgaccagttgcacgagtctcaattggacaaaatgccagcacttccggctaaaggtaacttgaacctccgtgacatcttaaaatcggacttcgcgttcgcg

SEQ ID NO: 568 - protein, 890 aa, synthetic construct
  REGION 1..890: note = Variant of RNA polymerase
MHHHHHHMNTINIAKNDFSDIELAAIPFNTLADHYGERLAREQLALEHESYEMGEARFRKMFERQLKAGEVADNAAAKPLITTLLPKMIARINDWFEEVKAKRGKRPTAFQFLQEIKPEAVAYITIKTTLACLTSADNTTVQAVASAIGRAIEDEARFGRIRDLEAKHFKGNVEEQLNKRVGHPYKKAFMQVVEADMLSKGLLGGEAWSSWHKEDSIHVGVRCIEMLIESTGMVSLHRQNAGVVGQDSETIELAPEYAEAIATRAGALAGISPMFQPCVVPPKPWTGITGGGYWAAGRKPLQLVRTRSLAALRRYEEVSMPEVIKAVNIAQNTAWRINKKVLDVANTITQWQHCPVADVPAMDRGEMPARPLDIDTNEIALKAWKKEASAFYRKDKARVSRRLSMEFMLSQANKFANEKAIWFPQNMDWRGRVYAVPMFNPQGNDMTKGLLTFAQEKPIGEDGFYWLKIHGANTAGVDKVPFPQRIKFVEDNHTNIMECAKAPLENTWWAEQDSPFCFLAFCFEYAGVINHGLSYNCSLPLAFDGSCSGIQHFSAMLRDEIGGKAVNLLPSAEYQDIYRIVSDKVNEMLKQDLINGTSTTVETVTDKKTGEITQRTKYGTKVMAQWWLEHGVNRGVTKRSVMTLVYGSKEFGFRDQVLSDTIQPAIDNGKGDMFLNPNQAAGYMAKLIWNAVSGTVVAAVEAMNWLKSAAKLLAAEVKDPKTDTVLRGRCAVHWVTPDGFPVWQEYKKPIQTRLNLMFLGQFRLQPTINTNKDSEIDAHKQESGIAPNFVHSQDGNHLRMTVVWAHEKYGIESFALIHDSFGTIPADAANLFKAVRETMVSTYESCDVLADFYDQFADQLHESQLDKMPALPAKGNLNLRDILKSDFAFA

SEQ ID NO: 569 - DNA, 2670 bp, synthetic construct
  misc_feature 1..2670: note = Variant of RNA polymerase
  source 1..2670: mol_type = other DNA
atgcaccatcaccatcaccatatgaacacgattaacattgctaagaacgacttctctgacatcgaactggctgctatcccgttcaacactctggctgaccattacggtgagcgtttagctcgcgaacagttggcccttgagcatgagtcttacgagatgggtgaagcacgcttccgcaagatgtttgagcgtcaacttaaagctggtgaggttgcggataacgctgccgccaagcctctcatcactaccctactccctaagatgattgcacgcatcaacgactggtttgaggaagtgaaagctaagcgcggcaagcgcccgacagccttccagttcctgcaagaaatcaagccggaagccgtagcgtacatcaccattaagaccactctggcttgcctaaccagtgcggacaatacaaccgttcaggctgtagcaagcgcaatcggtcgggccattgaggacgaggctcgcttcggtcgtatccgtgaccttgaagctaagcacttcaagaaaaacgttgaggaacaactcaacaagcgcgtagggcacgtctacaagaaagcatttatgcaagttgtcgagcacgacatgctctctaagggtctactcggtggcgaggcgtggtcttcgtggcataaggaagactctattcatgtaggagtacgctgcatcgagatgctcattgagtcaaccggaatggttagcttacaccgccaaaatgctggcgtagtaggtcaagactctgagactatcgaactcgcacctgaatacgctgaggctatcgcaacccgtgcaggtgcgctggctggcatctctccgatgttccaaccttgcgtagttcctcctaagccgtggactggcattactggtggtggctattgggctgcggggcgcaaacccctgcagttagtacgtactcgcagtctggcggcgcttcgccgctatgaagaagtgtcgatgccggaggtcatcaaagcagtcaacattgcgcagaatacagcatggcgtattaacaagaaagttctcgacgtagcgaatgcaatcacccaatggcagcactgtccagtcgcggatgtgcctgcgatggatcgtggcgaaatgccagctcgtccgttggacatcgataccaacgagattgcacttaaagcgtggaagaaagaagcttccgcgttctaccgcaaagacaaagcacgcgttagccgtcgtctgtcaatggagtttatgttatctcaggcgaacaagtttgcgaattataaagcaatctggtttccgcaaaacatggattggcgtgggcgcgtgtacgctgtcccgatgttcaatcctcagggcaacgatatgacgaaaggcctgctgacctttgcgcaggagaaacccattggtgaagacggcttctattggctcaagattcatggcgcaaatacagctggagtggataaagtaccgtttccacaacgcatcaaatttgttgaggataaccatacgaatattatggaatgcgcgaaagcaccgctggaaaacacttggtgggcggaacaggactcgccgttctgttttctggcgttctgctttgagtatgctggcgtcatcaatcacggtctgtcgtacaactgtagcttgcctctggcatttgatggtagttgctccggcattcaacatttctcagcgatgttacgcgacgaaattggcgccaaagctgtgaatctcctcccatctgcggaataccaggatatttatcgtatcgtcagcgacaaagttaacgaggcgctgaaacaagatctgattaacggtacctctaccaccgtggaaacggtgactgataagaagacaggcgaaattacccaacgcacgaaatacgggaccaaagttatggcacagtggtggttagaacacggtgtgaatcgtggcgtcacgaaacgctcggttatgactttggtgtatgggagcaaagagtttggattccgcgatcaagtgctgagtgacaccattcaaccggcgatcgataacggcaaaggtgacatgtttctgaatccgaatcaggctgctggttacatggcgaaactgatctggaacgcagtgtccgggaccgtagtcgcagcagttgaggcgatgaactggctgaaaagtgcggcgaaattacttgctgctgaagtgaaggatcctaagacggatacagttctgcgtggccgctgcgcagtacattgggtgactcccgacggcttccctgtgtggcaggaatacaagaagcctattcagacgcgcttgaacctgatgttcctcggtcagttccgcttacagcctaccattaacaccaacaaagatagcgagattgatgcacacaaacaggagtctggtatcgctcctaactttgtacacagccaagacggtaaccaccttcgtatgactgtagtgtgggcacacgagaagtacggaatcgaatcttttgcactgattcacgactccttcggtaccattccggctgacgctgcgaacctgttcaaagcagtgcgcgaaactatggtttcgacatatgagtcttgtgatgtactggctgatttctacgaccagttcgctgaccagttgcacgagtctcaattggacaaaatgccagcacttccggctaaaggtaacttgaacctccgtgacatcttaaaatcggacttcgcgttcgcg

SEQ ID NO: 570 - protein, 890 aa, synthetic construct
  REGION 1..890: note = Variant of RNA polymerase
MHHHHHHMNTINIAKNDFSDIELAAIPFNTLADHYGERLAREQLALEHESYEMGEARFRKMFERQLKAGEVADNAAAKPLITTLLPKMIARINDWFEEVKAKRGKRPTAFQFLQEIKPEAVAYITIKTTLACLTSADNTTVQAVASAIGRAIEDEARFGRIRDLEAKHFKKNVEEQLNKRVGHVYKKAFMQVVEHDMLSKGLLGGEAWSSWHKEDSIHVGVRCIEMLIESTGMVSLHRQNAGVVGQDSETIELAPEYAEAIATRAGALAGISPMFQPCVVPPKPWTGITGGGYWAAGRKPLQLVRTRSLAALRRYEEVSMPEVIKAVNIAQNTAWRINKKVLDVANAITQWQHCPVADVPAMDRGEMPARPLDIDTNEIALKAWKKEASAFYRKDKARVSRRLSMEFMLSQANKFANYKAIWFPQNMDWRGRVYAVPMFNPQGNDMTKGLLTFAQEKPIGEDGFYWLKIHGANTAGVDKVPFPQRIKFVEDNHTNIMECAKAPLENTWWAEQDSPFCFLAFCFEYAGVINHGLSYNCSLPLAFDGSCSGIQHFSAMLRDEIGAKAVNLLPSAEYQDIYRIVSDKVNEALKQDLINGTSTTVETVTDKKTGEITQRTKYGTKVMAQWWLEHGVNRGVTKRSVMTLVYGSKEFGFRDQVLSDTIQPAIDNGKGDMFLNPNQAAGYMAKLIWNAVSGTVVAAVEAMNWLKSAAKLLAAEVKDPKTDTVLRGRCAVHWVTPDGFPVWQEYKKPIQTRLNLMFLGQFRLQPTINTNKDSEIDAHKQESGIAPNFVHSQDGNHLRMTVVWAHEKYGIESFALIHDSFGTIPADAANLFKAVRETMVSTYESCDVLADFYDQFADQLHESQLDKMPALPAKGNLNLRDILKSDFAFA

SEQ ID NO: 571 - DNA, 2670 bp, synthetic construct
  misc_feature 1..2670: note = Variant of RNA polymerase
  source 1..2670: mol_type = other DNA
atgcaccatcaccatcaccatatgaacacgattaacattgctaagaacgacttctctgacatcgaactggctgctatcccgttcaacactctggctgaccattacggtgagcgtttagctcgcgaacagttggcccttgagcatgagtcttacgagatgggtgaagcacgcttccgcaagatgtttgagcgtcaacttaaagctggtgaggttgcggataacgctgccgccaagcctctcatcactaccctactccctaagatgattgcacgcatcaacgactggtttgaggaagtgaaagctaagcgcggcaagcgcccgacagccttccagttcctgcaagaaatcaagccggaagccgtagcgtacatcaccattaagaccactctggcttgcctaaccagtgcggacaatacaaccgttcaggctgtagcaagcgcaatcggtcgggccattgaggacgaggctcgcttcggtcgtatccgtgaccttgaagctaagcacttcaagaagaacgttgaggaacaactcaacaagcgcgtagggcacgtctacaaagtagcatttatgcaagttgtcgagaccgacatgctctctaagggtctactcggtggcgaggcgtggtcttcgtggcataaggaagactctattcatgtaggagtacgctgcatcgagatgctcattgagtcaaccggaatggttagcttacaccgccaaaatgctggcgtagtaggtcaagactctgagactatcgaactcgcacctgaatacgctgaggctatcgcaacccgtgcaggtgcgctggctggcatctctccgatgttccaaccttgcgtagttcctcctaagccgtggactggcattactggtggtggctattgggctgcggggcgcaaacccctgcagttagtacgtactcgcagtctggcggcgcttcgccgctatgaagaagtgtcgatgccggaggtcatcaaagcagtcaacattgcgcagaatacagcatggcgtattaacaagaaagttctcgacgtagcgaatgccatcacccaatggcagcactgtccagtcgcggatgtgcctgcgatggatcgtggcgaaatgccagctcgtccgttggacatcgataccaacgagattgcacttaaagcgtggaagaaagaagcttccgcgttctaccgcaaagacaaagcacgcgttagccgtcgtctgtcaatggagtttatgttatctcaggcgaacaagtttgcgaattataaagcaatctggtttccgcaaaacatggattggcgtgggcgcgtgtacgctgtcccgatgttcaatcctcagggcaacgatatgacgaaaggcctgctgacctttgcgcaggagaaacccattggtgaagacggcttctattggctcaagattcatggcgcaaatacagctggagtggataaagtaccgtttccacaacgcatcaaatttgttgaggataaccatacgaatattatggaatgcgcgaaagcaccgctggaaaacacttggtgggcggaacaggactcgccgttctgttttctggcgttctgctttgagtatgctggcgtcatcaatagtggtctgtcgtacaactgtagcttgcctctggcatttgatggtagttgctccggcctgcaacatttctcagcgatgttacgcgacgaaattggcggcaaagctgtgaatctcctcccatctgcggaataccaggatatttatcgtatcgtcagcgacaaagttaacgaggcgctgaaacaagatctgattaacggtacctctaccaccgtggaaacggtgactgataagaagacaggcgaaattacccaacgcacgaaatacgggaccaaagttatggcacagtggtggttagaacacggtgtgaatcgtggcgtcacgaaacgctcggttatgactttggtgtatgggagcaaagagtttggattccgcgatcaagtgctgagtgacaccattcaaccggcgatcgataacggcaaaggtgacatgtttctgaatccgaatcaggctgctggttacatggcgaaactgatctggaacgcagtgtccgggaccgtagtcgcagcagttgaggcgatgaactggctgaaaagtgcggcgaaattacttgctgctgaagtgaaggatcctaagacggatacagttctgcgtggccgctgcgcagtacattgggtgactcccgacggcttccctgtgtggcaggaatacaagaagcctattcagacgcgcttgaacctgatgttcctcggtcagttccgcttacagcctaccattaacaccaacaaagatagcgagattgatgcacacaaacaggagtctggtatcgctcctaactttgtacacagccaagacggtaaccaccttcgtatgactgtagtgtgggcacacgagaagtacggaatcgaatcttttgcactgattcacgactccttcggtaccattccggctgacgctgcgaacctgttcaaagcagtgcgcgaaactatggtttcgacatatgagtcttgtgatgtactggctgatttctacgaccagttcgctgaccagttgcacgagtctcaattggacaaaatgccagcacttccggctaaaggtaacttgaacctccgtgacatcttaaaatcggacttcgcgttcgcg

SEQ ID NO: 572 - protein, 890 aa, synthetic construct
  REGION 1..890: note = Variant of RNA polymerase
MHHHHHHMNTINIAKNDFSDIELAAIPFNTLADHYGERLAREQLALEHESYEMGEARFRKMFERQLKAGEVADNAAAKPLITTLLPKMIARINDWFEEVKAKRGKRPTAFQFLQEIKPEAVAYITIKTTLACLTSADNTTVQAVASAIGRAIEDEARFGRIRDLEAKHFKKNVEEQLNKRVGHVYKVAFMQVVETDMLSKGLLGGEAWSSWHKEDSIHVGVRCIEMLIESTGMVSLHRQNAGVVGQDSETIELAPEYAEAIATRAGALAGISPMFQPCVVPPKPWTGITGGGYWAAGRKPLQLVRTRSLAALRRYEEVSMPEVIKAVNIAQNTAWRINKKVLDVANAITQWQHCPVADVPAMDRGEMPARPLDIDTNEIALKAWKKEASAFYRKDKARVSRRLSMEFMLSQANKFANYKAIWFPQNMDWRGRVYAVPMFNPQGNDMTKGLLTFAQEKPIGEDGFYWLKIHGANTAGVDKVPFPQRIKFVEDNHTNIMECAKAPLENTWWAEQDSPFCFLAFCFEYAGVINSGLSYNCSLPLAFDGSCSGLQHFSAMLRDEIGGKAVNLLPSAEYQDIYRIVSDKVNEALKQDLINGTSTTVETVTDKKTGEITQRTKYGTKVMAQWWLEHGVNRGVTKRSVMTLVYGSKEFGFRDQVLSDTIQPAIDNGKGDMFLNPNQAAGYMAKLIWNAVSGTVVAAVEAMNWLKSAAKLLAAEVKDPKTDTVLRGRCAVHWVTPDGFPVWQEYKKPIQTRLNLMFLGQFRLQPTINTNKDSEIDAHKQESGIAPNFVHSQDGNHLRMTVVWAHEKYGIESFALIHDSFGTIPADAANLFKAVRETMVSTYESCDVLADFYDQFADQLHESQLDKMPALPAKGNLNLRDILKSDFAFA

SEQ ID NO: 573 - DNA, 2670 bp, synthetic construct
  misc_feature 1..2670: note = Variant of RNA polymerase
  source 1..2670: mol_type = other DNA
atgcaccatcaccatcaccatatgaacacgattaacattgctaagaacgacttctctgacatcgaactggctgctatcccgttcaacactctggctgaccattacggtgagcgtttagctcgcgaacagttggcccttgagcatgagtcttacgagatgggtgaagcacgcttccgcaagatgtttgagcgtcaacttaaagctggtgaggttgcggataacgctgccgccaagcctctcatcactaccctactccctaagatgattgcacgcatcaacgactggtttgaggaagtgaaagctaagcgcggcaagcgcccgacagccttccagttcctgcaagaaatcaagccggaagccgtagcgtacatcaccattaagaccactctggcttgcctaaccagtgcggacaatacaaccgttcaggctgtagcaagcgcaatcggtcgggccattgaggacgaggctcgcttcggtcgtatccgtgaccttgaagctaagcacttcaagaaaaacgttgaggaacaactcaacaagcgcgtagggcacgtgtacaagaaagcatttatgcaagttgtcgaggctgacatgctctctaagggtctactcggtggcgaggcgtggtcttcgtggcataaggaagactctattcatgtaggagtacgctgcatcgagatgctcattgagtcaaccggaatggttagcttacaccgccaaaatgctggcgtagtaggtcaagactctgagactatcgaactcgcacctgaatacgctgaggctatcgcaacccgtgcaggtgcgctggctggcatctctccgatgttccaaccttgcgtagttcctcctaagccgtggactggcattactggtggtggctattgggctgcggggcgcaaacccctgcagttagtacgtactcgcagtctggcggcgcttcgccgctatgaagaagtgtcgatgccggaggtcatcaaagcagtcaacattgcgcagaatacagcatggcgtattaacaagaaagttctcgacgtagcgaataccatcacccaatggcagcactgtccagtcgcggatgtgcctgcgatggatcgtggcgaaatgccagctcgtccgttggacatcgataccaacgagattgcacttaaagcgtggaagaaagaagcttccgcgttctaccgcaaagacaaagcacgcgttagccgtcgtctgtcaatggagtttatgttatctcaggcgaacaagtttgcgaattataaagcaatctggtttccgcaaaacatggattggcgtgggcgcgtgtacgctgtcccgatgttcaatcctcagggcaacgatatgacgaaaggcctgctgacctttgcgcaggagaaacccattggtgaagacggcttctattggctcaagattcatggcgcaaatacagctggagtggataaagtaccgtttccacaacgcatcaaatttgttgaggataaccatacgaatattatggaatgcgcgaaagcaccgctggaaaacacttggtgggcggaacaggactcgccgttctgttttctggcgttctgctttgagtatgctggcgtcatcaatcatggtctgtcgtacaactgtagcttgcctctggcatttgatggtagttgctccggcctgcaacatttctcagcgatgttacgcgacgaaattggcggcaaagctgtgaatctcctcccatctgcggaataccaggatatttatcgtatcgtcagcgacaaagttaacgagatgctgaaacaagatctgattaacggtacctctaccaccgtggaaacggtgactgataagaagacaggcgaaattacccaacgcacgaaatacgggaccaaagttatggcacagtggtggttagaacacggtgtgaatcgtggcgtcacgaaacgctcggttatgactttggtgtatgggagcaaagagtttggattccgcgatcaagtgctgagtgacaccattcaaccggcgatcgataacggcaaaggtgacatgtttctgaatccgaatcaggctgctggttacatggcgaaactgatctggaacgcagtgtccgggaccgtagtcgcagcagttgaggcgatgaactggctgaaaagtgcggcgaaattacttgctgctgaagtgaaggatcctaagacggatacagttctgcgtggccgctgcgcagtacattgggtgactcccgacggcttccctgtgtggcaggaatacaagaagcctattcagacgcgcttgaacctgatgttcctcggtcagttccgcttacagcctaccattaacaccaacaaagatagcgagattgatgcacacaaacaggagtctggtatcgctcctaactttgtacacagccaagacggtaaccaccttcgtatgactgtagtgtgggcacacgagaagtacggaatcgaatcttttgcactgattcacgactccttcggtaccattccggctgacgctgcgaacctgttcaaagcagtgcgcgaaactatggtttcgacatatgagtcttgtgatgtactggctgatttctacgaccagttcgctgaccagttgcacgagtctcaattggacaaaatgccagcacttccggctaaaggtaacttgaacctccgtgacatcttaaaatcggacttcgcgttcgcg

SEQ ID NO: 574 - protein, 890 aa, synthetic construct
  REGION 1..890: note = Variant of RNA polymerase
MHHHHHHMNTINIAKNDFSDIELAAIPFNTLADHYGERLAREQLALEHESYEMGEARFRKMFERQLKAGEVADNAAAKPLITTLLPKMIARINDWFEEVKAKRGKRPTAFQFLQEIKPEAVAYITIKTTLACLTSADNTTVQAVASAIGRAIEDEARFGRIRDLEAKHFKKNVEEQLNKRVGHVYKKAFMQVVEADMLSKGLLGGEAWSSWHKEDSIHVGVRCIEMLIESTGMVSLHRQNAGVVGQDSETIELAPEYAEAIATRAGALAGISPMFQPCVVPPKPWTGITGGGYWAAGRKPLQLVRTRSLAALRRYEEVSMPEVIKAVNIAQNTAWRINKKVLDVANTITQWQHCPVADVPAMDRGEMPARPLDIDTNEIALKAWKKEASAFYRKDKARVSRRLSMEFMLSQANKFANYKAIWFPQNMDWRGRVYAVPMFNPQGNDMTKGLLTFAQEKPIGEDGFYWLKIHGANTAGVDKVPFPQRIKFVEDNHTNIMECAKAPLENTWWAEQDSPFCFLAFCFEYAGVINHGLSYNCSLPLAFDGSCSGLQHFSAMLRDEIGGKAVNLLPSAEYQDIYRIVSDKVNEMLKQDLINGTSTTVETVTDKKTGEITQRTKYGTKVMAQWWLEHGVNRGVTKRSVMTLVYGSKEFGFRDQVLSDTIQPAIDNGKGDMFLNPNQAAGYMAKLIWNAVSGTVVAAVEAMNWLKSAAKLLAAEVKDPKTDTVLRGRCAVHWVTPDGFPVWQEYKKPIQTRLNLMFLGQFRLQPTINTNKDSEIDAHKQESGIAPNFVHSQDGNHLRMTVVWAHEKYGIESFALIHDSFGTIPADAANLFKAVRETMVSTYESCDVLADFYDQFADQLHESQLDKMPALPAKGNLNLRDILKSDFAFA

SEQ ID NO: 575 - DNA, 2670 bp, synthetic construct
  misc_feature 1..2670: note = Variant of RNA polymerase
  source 1..2670: mol_type = other DNA
atgcaccatcaccatcaccatatgaacacgattaacattgctaagaacgacttctctgacatcgaactggctgctatcccgttcaacactctggctgaccattacggtgagcgtttagctcgcgaacagttggcccttgagcatgagtcttacgagatgggtgaagcacgcttccgcaagatgtttgagcgtcaacttaaagctggtgaggttgcggataacgctgccgccaagcctctcatcactaccctactccctaagatgattgcacgcatcaacgactggtttgaggaagtgaaagctaagcgcggcaagcgcccgacagccttccagttcctgcaagaaatcaagccggaagccgtagcgtacatcaccattaagaccactctggcttgcctaaccagtgcggacaatacaaccgttcaggctgtagcaagcgcaatcggtcgggccattgaggacgaggctcgcttcggtcgtatccgtgaccttgaagctaagcacttcaagaaaaacgttgaggaacaactcaacaagcgcgtagggcacgtctacaagaaagcatttatgcaagttgtcgaggctgacatgctctctaagggtctactcggtggcgaggcgtggtcttcgtggcataaggaagactctattcatgtaggagtacgctgcatcgagatgctcattgagtcaaccggaatggttagcttacaccgccaaaatgctggcgtagtaggtcaagactctgagactatcgaactcgcacctgaatacgctgaggctatcgcaacccgtgcaggtgcgctggctggcatctctccgatgttccaaccttgcgtagttcctcctaagccgtggactggcattactggtggtggctattgggctgcggggcgcaaacccctgcagttagtacgtactcgcagtctggcggcgcttcgccgctatgaagaagtgtcgatgccggaggtcatcaaagcagtcaacattgcgcagaatacagcatggcgtattaacaagaaagttctcgacgtagcgaatgcaatcacccaatggcagcactgtccagtcgcggatgtgcctgcgatggatcgtggcgaaatgccagctcgtccgttggacatcgataccaacgagattgcacttaaagcgtggaagaaagaagcttccgcgttctaccgcaaagacaaagcacgcgttagccgtcgtctgtcaatggagtttatgttatctcaggcgaacaagtttgcgaattataaagcaatctggtttccgcaaaacatggattggcgtgggcgcgtgtacgctgtcccgatgttcaatcctcagggcaacgatatgacgaaaggcctgctgacctttgcgcaggagaaacccattggtgaagacggcttctattggctcaagattcatggcgcaaatacagctggagtggataaagtaccgtttccacaacgcatcaaatttgttgaggataaccatacgaatattatggaatgcgcgaaagcaccgctggaaaacacttggtgggcggaacaggactcgccgttctgttttctggcgttctgctttgagtatgctggcgtcatcaatcacggtctgtcgtacaactgtagcttgcctcaggcatttgatggtagttgctccggcattcaacatttctcagcgatgttacgcgacgaaattggcggcaaagctgtgaatctcctcccatctgcggaataccaggatatttatcgtatcgtcagcgacaaagttaacgaggtactgaaacaagatctgattaacggtacctctaccaccgtggaaacggtgactgataagaagacaggcgaaattacccaacgcacgaaatacgggaccaaagttatggcacagtggtggttagaacacggtgtgaatcgtggcgtcacgaaacgctcggttatgactttggtgtatgggagcaaagagtttggattccgcgatcaagtgctgagtgacaccattcaaccggcgatcgataacggcaaaggtgacatgtttctgaatccgaatcaggctgctggttacatggcgaaactgatctggaacgcagtgtccgggaccgtagtcgcagcagttgaggcgatgaactggctgaaaagtgcggcgaaattacttgctgctgaagtgaaggatcctaagacggatacagttctgcgtggccgctgcgcagtacattgggtgactcccgacggcttccctgtgtggcaggaatacaagaagcctattcagacgcgcttgaacctgatgttcctcggtcagttccgcttacagcctaccattaacaccaacaaagatagcgagattgatgcacacaaacaggagtctggtatcgctcctaactttgtacacagccaagacggtaaccaccttcgtatgactgtagtgtgggcacacgagaagtacggaatcgaatcttttgcactgattcacgactccttcggtaccattccggctgacgctgcgaacctgttcaaagcagtgcgcgaaactatggtttcgacatatgagtcttgtgatgtactggctgatttctacgaccagttcgctgaccagttgcacgagtctcaacgcgacaaaatgccagcacttccggctaaaggtaacttgaacctccgtgacatcttaaaatcggacttcgcgttcgcg

SEQ ID NO: 576 - protein, 890 aa, synthetic construct
  REGION 1..890: note = Variant of RNA polymerase
MHHHHHHMNTINIAKNDFSDIELAAIPFNTLADHYGERLAREQLALEHESYEMGEARFRKMFERQLKAGEVADNAAAKPLITTLLPKMIARINDWFEEVKAKRGKRPTAFQFLQEIKPEAVAYITIKTTLACLTSADNTTVQAVASAIGRAIEDEARFGRIRDLEAKHFKKNVEEQLNKRVGHVYKKAFMQVVEADMLSKGLLGGEAWSSWHKEDSIHVGVRCIEMLIESTGMVSLHRQNAGVVGQDSETIELAPEYAEAIATRAGALAGISPMFQPCVVPPKPWTGITGGGYWAAGRKPLQLVRTRSLAALRRYEEVSMPEVIKAVNIAQNTAWRINKKVLDVANAITQWQHCPVADVPAMDRGEMPARPLDIDTNEIALKAWKKEASAFYRKDKARVSRRLSMEFMLSQANKFANYKAIWFPQNMDWRGRVYAVPMFNPQGNDMTKGLLTFAQEKPIGEDGFYWLKIHGANTAGVDKVPFPQRIKFVEDNHTNIMECAKAPLENTWWAEQDSPFCFLAFCFEYAGVINHGLSYNCSLPQAFDGSCSGIQHFSAMLRDEIGGKAVNLLPSAEYQDIYRIVSDKVNEVLKQDLINGTSTTVETVTDKKTGEITQRTKYGTKVMAQWWLEHGVNRGVTKRSVMTLVYGSKEFGFRDQVLSDTIQPAIDNGKGDMFLNPNQAAGYMAKLIWNAVSGTVVAAVEAMNWLKSAAKLLAAEVKDPKTDTVLRGRCAVHWVTPDGFPVWQEYKKPIQTRLNLMFLGQFRLQPTINTNKDSEIDAHKQESGIAPNFVHSQDGNHLRMTVVWAHEKYGIESFALIHDSFGTIPADAANLFKAVRETMVSTYESCDVLADFYDQFADQLHESQRDKMPALPAKGNLNLRDILKSDFAFA

SEQ ID NO: 577 - DNA, 2670 bp, synthetic construct
  misc_feature 1..2670: note = Variant of RNA polymerase
  source 1..2670: mol_type = other DNA
atgcaccatcaccatcaccatatgaacacgattaacattgctaagaacgacttctctgacatcgaactggctgctatcccgttcaacactctggctgaccattacggtgagcgtttagctcgcgaacagttggcccttgagcatgagtcttacgagatgggtgaagcacgcttccgcaagatgtttgagcgtcaacttaaagctggtgaggttgcggataacgctgccgccaagcctctcatcactaccctactccctaagatgattgcacgcatcaacgactggtttgaggaagtgaaagctaagcgcggcaagcgcccgacagccttccagttcctgcaagaaatcaagccggaagccgtagcgtacatcaccattaagaccactctggcttgcctaaccagtgcggacaatacaaccgttcaggctgtagcaagcgcaatcggtcgggccattgaggacgaggctcgcttcggtcgtatccgtgaccttgaagctaagcacttcaagaaaaacgttgaggaacaactcaacaagcgcgtagggcacgtctacaagaaagcatttatgcaagttgtcgaggctgacatgctctctaagggtctactcggtggcgaggcgtggtcttcgtggcataaggaagactctattcatgtaggagtacgctgcatcgagatgctcattgagtcaaccggaatggttagcttacaccgccaaaatgctggcgtagtaggtcaagactctgagactatcgaactcgcacctgaatacgctgaggctatcgcaacccgtgcaggtgcgctggctggcatctctccgatgttccaaccttgcgtagttcctcctaagccgtggactggcattactggtggtggctattgggctgcggggcgcaaacccctgcagttagtacgtactcgcagtctggcggcgcttcgccgctatgaagaagtgtcgatgccggaggtcatcaaagcagtcaacattgcgcagaatacagcatggcgtattaacaagaaagttctcgacgtagcgaataccatcacccaatggcagcactgtccagtcgcggatgtgcctgcgatggatcgtggcgaaatgccagctcgtccgttggacatcgataccaacgagattgcacttaaagcgtggaagaaagaagcttccgcgttctaccgcaaagacaaagcacgcgttagccgtcgtctgtcaatggagtttatgttatctcaggcgaacaagtttgcgaattataaagcaatctggtttccgcaaaacatggattggcgtgggcgcgtgtacgctgtcccgatgttcaatcctcagggcaacgatatgacgaaaggcctgctgacctttgcgcaggagaaacccattggtgaagacggcttctattggctcaagattcatggcgcaaatacagctggagtggataaagtaccgtttccacaacgcatcaaatttgttgaggataaccatacgaatattatggaatgcgcgaaagcaccgctggaaaacacttggtgggcggaacaggactcgccgttctgttttctggcgttctgctttgagtatgctggcgtcatcaatagtggtctgtcgtacaactgtagcttgcctctggcatttgatggtagttgctccggcattcaacatttctcagcgatgttacgcgacgaaattggcgccaaagctgtgaatctcctcccatctgcggaataccaggatatttatcgtatcgtcagcgacaaagttaacgagcgtctgaaacaagatctgattaacggtacctctaccaccgtggaaacggtgactgataagaagacaggcgaaattacccaacgcacgaaatacgggaccaaagttatggcacagtggtggttagaacacggtgtgaatcgtggcgtcacgaaacgctcggttatgactttggtgtatgggagcaaagagtttggattccgcgatcaagtgctgagtgacaccattcaaccggcgatcgataacggcaaaggtgacatgtttctgaatccgaatcaggctgctggttacatggcgaaactgatctggaacgcagtgtccgggaccgtagtcgcagcagttgaggcgatgaactggctgaaaagtgcggcgaaattacttgctgctgaagtgaaggatcctaagacggatacagttctgcgtggccgctgcgcagtacattgggtgactcccgacggcttccctgtgtggcaggaatacaagaagcctattcagacgcgcttgaacctgatgttcctcggtcagttccgcttacagcctaccattaacaccaacaaagatagcgagattgatgcacacaaacaggagtctggtatcgctcctaactttgtacacagccaagacggtaaccaccttcgtatgactgtagtgtgggcacacgagaagtacggaatcgaatcttttgcactgattcacgactccttcggtaccattccggctgacgctgcgaacctgttcaaagcagtgcgcgaaactatggtttcgacatatgagtcttgtgatgtactggctgatttctacgaccagttcgctgaccagttgcacgagtctcaattggacaaaatgccagcacttccggctaaaggtaacttgaacctccgtgacatcttaaaatcggacttcgcgttcgcg

SEQ ID NO: 578 - protein, 890 aa, synthetic construct
  REGION 1..890: note = Variant of RNA polymerase
MHHHHHHMNTINIAKNDFSDIELAAIPFNTLADHYGERLAREQLALEHESYEMGEARFRKMFERQLKAGEVADNAAAKPLITTLLPKMIARINDWFEEVKAKRGKRPTAFQFLQEIKPEAVAYITIKTTLACLTSADNTTVQAVASAIGRAIEDEARFGRIRDLEAKHFKKNVEEQLNKRVGHVYKKAFMQVVEADMLSKGLLGGEAWSSWHKEDSIHVGVRCIEMLIESTGMVSLHRQNAGVVGQDSETIELAPEYAEAIATRAGALAGISPMFQPCVVPPKPWTGITGGGYWAAGRKPLQLVRTRSLAALRRYEEVSMPEVIKAVNIAQNTAWRINKKVLDVANTITQWQHCPVADVPAMDRGEMPARPLDIDTNEIALKAWKKEASAFYRKDKARVSRRLSMEFMLSQANKFANYKAIWFPQNMDWRGRVYAVPMFNPQGNDMTKGLLTFAQEKPIGEDGFYWLKIHGANTAGVDKVPFPQRIKFVEDNHTNIMECAKAPLENTWWAEQDSPFCFLAFCFEYAGVINSGLSYNCSLPLAFDGSCSGIQHFSAMLRDEIGAKAVNLLPSAEYQDIYRIVSDKVNERLKQDLINGTSTTVETVTDKKTGEITQRTKYGTKVMAQWWLEHGVNRGVTKRSVMTLVYGSKEFGFRDQVLSDTIQPAIDNGKGDMFLNPNQAAGYMAKLIWNAVSGTVVAAVEAMNWLKSAAKLLAAEVKDPKTDTVLRGRCAVHWVTPDGFPVWQEYKKPIQTRLNLMFLGQFRLQPTINTNKDSEIDAHKQESGIAPNFVHSQDGNHLRMTVVWAHEKYGIESFALIHDSFGTIPADAANLFKAVRETMVSTYESCDVLADFYDQFADQLHESQLDKMPALPAKGNLNLRDILKSDFAFA

SEQ ID NO: 579 - DNA, 2670 bp, synthetic construct
  misc_feature 1..2670: note = Variant of RNA polymerase
  source 1..2670: mol_type = other DNA
atgcaccatcaccatcaccatatgaacacgattaacattgctaagaacgacttctctgacatcgaactggctgctatcccgttcaacactctggctgaccattacggtgagcgtttagctcgcgaacagttggcccttgagcatgagtcttacgagatgggtgaagcacgcttccgcaagatgtttgagcgtcaacttaaagctggtgaggttgcggataacgctgccgccaagcctctcatcactaccctactccctaagatgattgcacgcatcaacgactggtttgaggaagtgaaagctaagcgcggcaagcgcccgacagccttccagttcctgcaagaaatcaagccggaagccgtagcgtacatcaccattaagaccactctggcttgcctaaccagtgcggacaatacaaccgttcaggctgtagcaagcgcaatcggtcgggccattgaggacgaggctcgcttcggtcgtatccgtgaccttgaagctaagcacttcaagaaaaacgttgaggaacaactcaacaagcgcgtagggcacgtctacaagaaagcatttatgcaagttgtcgaggctgacatgctctctaagggtctactcggtggcgaggcgtggtcttcgtggcataaggaagactctattcatgtaggagtacgctgcatcgagatgctcattgagtcaaccggaatggttagcttacaccgccaaaatgctggcgtagtaggtcaagactctgagactatcgaactcgcacctgaatacgctgaggctatcgcaacccgtgcaggtgcgctggctggcatctctccgatgttccaaccttgcgtagttcctcctaagccgtggactggcattactggtggtggctattgggctgcggggcgcaaacccctgcagttagtacgtactcgcagtctggcggcgcttcgccgctatgaagaagtgtcgatgccggaggtcatcaaagcagtcaacattgcgcagaatacagcatggcgtattaacaagaaagttctcgacgtagcgaatgcaatcacccaatggcagcactgtccagtcgcggatgtgcctgcgatggatcgtggcgaaatgccagctcgtccgttggacatcgataccaacgagattgcacttaaagcgtggaagaaagaagcttccgcgttctaccgcaaagacaaagcacgcgttagccgtcgtctgtcaatggagtttatgttatctcaggcgaacaagtttgcgaattataacgcaatctggtttccgcaaaacatggattggcgtgggcgcgtgtacgctgtcccgatgttcaatcctcagggcaacgatatgacgaaaggcctgctgacctttgcgcaggagaaacccattggtgaagacggcttctattggctcaagattcatggcgcaaatacagctggagtggataaagtaccgtttccacaacgcatcaaatttgttgaggataaccatacgaatattatggaatgcgcgaaagcaccgctggaaaacacttggtgggcggaacaggactcgccgttctgttttctggcgttctgctttgagtatgctggcgtcatcaatcacggtctgtcgtacaactgtagcttgcctcaggcatttgatggtagttgctccggcattcaacatttctcagcgatgttacgcgacgaaattggcggcaaagctgtgaatctcctcccatctgcggaataccaggatatttatcgtatcgtcagcgacaaagttaacgaggtactgaaacaagatctgattaacggtacctctaccaccgtggaaacggtgactgataagaagacaggcgaaattacccaacgcacgaaatacgggaccaaagttatggcacagtggtggttagaacacggtgtgaatcgtggcgtcacgaaacgctcggttatgactttggtgtatgggagcaaagagtttggattccgcgatcaagtgctgagtgacaccattcaaccggcgatcgataacggcaaaggtgacatgtttctgaatccgaatcaggctgctggttacatggcgaaactgatctggaacgcagtgtccgggaccgtagtcgcagcagttgaggcgatgaactggctgaaaagtgcggcgaaattacttgctgctgaagtgaaggatccaaagacggacacagttctgcgtggccgctgcgcagtacattgggtgactcccgacggcttccctgtgtggcaggaatacaagaagcctattcagacgcgcttgaacctgatgttcctcggtcagttccgcttacagcctaccattaacaccaacaaagatagcgagattgatgcacacaaacaggagtctggtatcgctcctaactttgtacacagccaagacggtaaccaccttcgtatgactgtagtgtgggcacacgagaagtacggaatcgaatcttttgcactgattcacgactccttcggtaccattccggctgacgctgcgaacctgttcaaagcagtgcgcgaaactatggtttcgacatatgagtcttgtgatgtactggctgatttctacgaccagttcgctgaccagttgcacgagtctcaacgcgacaaaatgccagcacttccggctaaaggtaacttgaacctccgtgacatcttaaaatcggacttcgcgttcgcg

SEQ ID NO: 580 - protein, 890 aa, synthetic construct
  REGION 1..890: note = Variant of RNA polymerase
MHHHHHHMNTINIAKNDFSDIELAAIPFNTLADHYGERLAREQLALEHESYEMGEARFRKMFERQLKAGEVADNAAAKPLITTLLPKMIARINDWFEEVKAKRGKRPTAFQFLQEIKPEAVAYITIKTTLACLTSADNTTVQAVASAIGRAIEDEARFGRIRDLEAKHFKKNVEEQLNKRVGHVYKKAFMQVVEADMLSKGLLGGEAWSSWHKEDSIHVGVRCIEMLIESTGMVSLHRQNAGVVGQDSETIELAPEYAEAIATRAGALAGISPMFQPCVVPPKPWTGITGGGYWAAGRKPLQLVRTRSLAALRRYEEVSMPEVIKAVNIAQNTAWRINKKVLDVANAITQWQHCPVADVPAMDRGEMPARPLDIDTNEIALKAWKKEASAFYRKDKARVSRRLSMEFMLSQANKFANYNAIWFPQNMDWRGRVYAVPMFNPQGNDMTKGLLTFAQEKPIGEDGFYWLKIHGANTAGVDKVPFPQRIKFVEDNHTNIMECAKAPLENTWWAEQDSPFCFLAFCFEYAGVINHGLSYNCSLPQAFDGSCSGIQHFSAMLRDEIGGKAVNLLPSAEYQDIYRIVSDKVNEVLKQDLINGTSTTVETVTDKKTGEITQRTKYGTKVMAQWWLEHGVNRGVTKRSVMTLVYGSKEFGFRDQVLSDTIQPAIDNGKGDMFLNPNQAAGYMAKLIWNAVSGTVVAAVEAMNWLKSAAKLLAAEVKDPKTDTVLRGRCAVHWVTPDGFPVWQEYKKPIQTRLNLMFLGQFRLQPTINTNKDSEIDAHKQESGIAPNFVHSQDGNHLRMTVVWAHEKYGIESFALIHDSFGTIPADAANLFKAVRETMVSTYESCDVLADFYDQFADQLHESQRDKMPALPAKGNLNLRDILKSDFAFA

SEQ ID NO: 581 - DNA, 2670 bp, synthetic construct
  misc_feature 1..2670: note = Variant of RNA polymerase
  source 1..2670: mol_type = other DNA
atgcaccatcaccatcaccatatgaacacgattaacattgctaagaacgacttctctgacatcgaactggctgctatcccgttcaacactctggctgaccattacggtgagcgtttagctcgcgaacagttggcccttgagcatgagtcttacgagatgggtgaagcacgcttccgcaagatgtttgagcgtcaacttaaagctggtgaggttgcggataacgctgccgccaagcctctcatcactaccctactccctaagatgattgcacgcatcaacgactggtttgaggaagtgaaagctaagcgcggcaagcgcccgacagccttccagttcctgcaagaaatcaagccggaagccgtagcgtacatcaccattaagaccactctggcttgcctaaccagtgcggacaatacaaccgttcaggctgtagcaagcgcaatcggtcgggccattgaggacgaggctcgcttcggtcgtatccgtgaccttgaagctaagcacttcaagaaaaacgttgaggaacaactcaacaagcgcgtagggcacgtctacaaagcagcatttatgcaagttgtcgaggctgacatgctctctaagggtctactcggtggcgaggcgtggtcttcgtggcataaggaagactctattcatgtaggagtacgctgcatcgagatgctcattgagtcaaccggaatggttagcttacaccgccaaaatgctggcgtagtaggtcaagactctgagactatcgaactcgcacctgaatacgctgaggctatcgcaacccgtgcaggtgcgctggctggcatctctccgatgttccaaccttgcgtagttcctcctaagccgtggactggcattactggtggtggctattgggctgcggggcgcaaacccctgcagttagtacgtactcgcagtctggcggcgcttcgccgctatgaagaagtgtcgatgccggaggtcatcaaagcagtcaacattgcgcagaatacagcatggcgtattaacaagaaagttctcgacgtagcgaataccatcacccaatggcagcactgtccagtcgcggatgtgcctgcgatggatcgtggcgaaatgccagctcgtccgttggacatcgataccaacgagattgcacttaaagcgtggaagaaagaagcttccgcgttctaccgcaaagacaaagcacgcgttagccgtcgtctgtcaatggagtttatgttatctcaggcgaacaagtttgcgaatgagaaagcaatctggtttccgcaaaacatggattggcgtgggcgcgtgtacgctgtcccgatgttcaatcctcagggcaacgatatgacgaaaggcctgctgacctttgcgcaggagaaacccattggtgaagacggcttctattggctcaagattcatggcgcaaatacagctggagtggataaagtaccgtttccacaacgcatcaaatttgttgaggataaccatacgaatattatggaatgcgcgaaagcaccgctggaaaacacttggtgggcggaacaggactcgccgttctgttttctggcgttctgctttgagtatgctggcgtcatcaatagtggtctgtcgtacaactgtagcttgcctctggcatttgatggtagttgctccggcctgcaacatttctcagcgatgttacgcgacgaaattggcggcaaagctgtgaatctcctcccatctgcggaataccaggatatttatcgtatcgtcagcgacaaagttaacgaggtactgaaacaagatctgattaacggtacctctaccaccgtggaaacggtgactgataagaagacaggcgaaattacccaacgcacgaaatacgggaccaaagttatggcacagtggtggttagaacacggtgtgaatcgtggcgtcacgaaacgctcggttatgactttggtgtatgggagcaaagagtttggattccgcgatcaagtgctgagtgacaccattcaaccggcgatcgataacggcaaaggtgacatgtttctgaatccgaatcaggctgctggttacatggcgaaactgatctggaacgcagtgtccgggaccgtagtcgcagcagttgaggcgatgaactggctgaaaagtgcggcgaaattacttgctgctgaagtgaaggatcctaagacggatacagttctgcgtggccgctgcgcagtacattgggtgactcccgacggcttccctgtgtggcaggaatacaagaagcctattcagacgcgcttgaacctgatgttcctcggtcagttccgcttacagcctaccattaacaccaacaaagatagcgagattgatgcacacaaacaggagtctggtatcgctcctaactttgtacacagccaagacggtaaccaccttcgtatgactgtagtgtgggcacacgagaagtacggaatcgaatcttttgcactgattcacgactccttcggtaccattccggctgacgctgcgaacctgttcaaagcagtgcgcgaaactatggtttcgacatatgagtcttgtgatgtactggctgatttctacgaccagttcgctgaccagttgcacgagtctcaattggacaaaatgccagcacttccggctaaaggtaacttgaacctccgtgacatcttaaaatcggacttcgcgttcgcg

SEQ ID NO: 582 - protein, 890 aa, synthetic construct
  REGION 1..890: note = Variant of RNA polymerase
MHHHHHHMNTINIAKNDFSDIELAAIPFNTLADHYGERLAREQLALEHESYEMGEARFRKMFERQLKAGEVADNAAAKPLITTLLPKMIARINDWFEEVKAKRGKRPTAFQFLQEIKPEAVAYITIKTTLACLTSADNTTVQAVASAIGRAIEDEARFGRIRDLEAKHFKKNVEEQLNKRVGHVYKAAFMQVVEADMLSKGLLGGEAWSSWHKEDSIHVGVRCIEMLIESTGMVSLHRQNAGVVGQDSETIELAPEYAEAIATRAGALAGISPMFQPCVVPPKPWTGITGGGYWAAGRKPLQLVRTRSLAALRRYEEVSMPEVIKAVNIAQNTAWRINKKVLDVANTITQWQHCPVADVPAMDRGEMPARPLDIDTNEIALKAWKKEASAFYRKDKARVSRRLSMEFMLSQANKFANEKAIWFPQNMDWRGRVYAVPMFNPQGNDMTKGLLTFAQEKPIGEDGFYWLKIHGANTAGVDKVPFPQRIKFVEDNHTNIMECAKAPLENTWWAEQDSPFCFLAFCFEYAGVINSGLSYNCSLPLAFDGSCSGLQHFSAMLRDEIGGKAVNLLPSAEYQDIYRIVSDKVNEVLKQDLINGTSTTVETVTDKKTGEITQRTKYGTKVMAQWWLEHGVNRGVTKRSVMTLVYGSKEFGFRDQVLSDTIQPAIDNGKGDMFLNPNQAAGYMAKLIWNAVSGTVVAAVEAMNWLKSAAKLLAAEVKDPKTDTVLRGRCAVHWVTPDGFPVWQEYKKPIQTRLNLMFLGQFRLQPTINTNKDSEIDAHKQESGIAPNFVHSQDGNHLRMTVVWAHEKYGIESFALIHDSFGTIPADAANLFKAVRETMVSTYESCDVLADFYDQFADQLHESQLDKMPALPAKGNLNLRDILKSDFAFA

SEQ ID NO: 583 - DNA, 2670 bp, synthetic construct
  misc_feature 1..2670: note = Variant of RNA polymerase
  source 1..2670: mol_type = other DNA
atgcaccatcaccatcaccatatgaacacgattaacattgctaagaacgacttctctgacatcgaactggctgctatcccgttcaacactctggctgaccattacggtgagcgtttagctcgcgaacagttggcccttgagcatgagtcttacgagatgggtgaagcacgcttccgcaagatgtttgagcgtcaacttaaagctggtgaggttgcggataacgctgccgccaagcctctcatcactaccctactccctaagatgattgcacgcatcaacgactggtttgaggaagtgaaagctaagcgcggcaagcgcccgacagccttccagttcctgcaagaaatcaagccggaagccgtagcgtacatcaccattaagaccactctggcttgcctaaccagtgcggacaatacaaccgttcaggctgtagcaagcgcaatcggtcgggccattgaggacgaggctcgcttcggtcgtatccgtgaccttgaagctaagcacgtcaagaaaaacgttgaggaacaactcaacaagcgcgtagggcacgtctacaagaaagcatttatgcaagttgtcgaggctgacatgctctctaagggtctactcggtggcgaggcgtggtcttcgtggcataaggaagactctattcatgtaggagtacgctgcatcgagatgctcattgagtcaaccggaatggttagcttacaccgccaaaatgctggcgtagtaggtcaagactctgagactatcgaactcgcacctgaatacgctgaggctatcgcaacccgtgcaggtgcgctggctggcatctctccgatgttccaaccttgcgtagttcctcctaagccgtggactggcattactggtggtggctattgggctgcggggcgcaaacccctgcagttagtacgtactcgcagtctggcggcgcttcgccgctatgaagaagtgtcgatgccggaggtcatcaaagcagtcaacattgcgcagaatacagcatggcgtattaacaagaaagttctcgacgtagcgaatgcaatcacccaatggcagcactgtccagtcgcggatgtgcctgcgatggatcgtggcgaaatgccagctcgtccgttggacatcgataccaacgagattgcacttaaagcgtggaagaaagaagcttccgcgttctaccgcaaagacaaagcacgcgttagccgtcgtctgtcaatggagtttatgttatctcaggcgaacaagtttgcgaattataacgcaatctggtttccgcaaaacatggattggcgtgggcgcgtgtacgctgtcccgatgttcaatcctcagggcaacgatatgacgaaaggcctgctgacctttgcgcaggagaaacccattggtgaagacggcttctattggctcaagattcatggcgcaaatacagctggagtggataaagtaccgtttccacaacgcatcaaatttgttgaggataaccatacgaatattatggaatgcgcgaaagcaccgctggaaaacacttggtgggcggaacaggactcgccgttctgttttctggcgttctgctttgagtatgctggcgtcatcaatcacggtctgtcgtacaactgtagcttgcctctggcatttgatggtagttgctccggcattcaacatttctcagcgatgttacgcgacgaaattggcggcaaagctgtgaatctcctcccatctgcggaataccaggatatttatcgtatcgtcagcgacaaagttaacgaggtgctgaaacaagatctgattaacggtacctctaccaccgtggaaacggtgactgataagaagacaggcgaaattacccaacgcacgaaatacgggaccaaagttatggcacagtggtggttagaacacggtgtgaatcgtggcgtcacgaaacgctcggttatgactttggtgtatgggagcaaagagtttggattccgcgatcaagtgctgagtgacaccattcaaccggcgatcgataacggcaaaggtgacatgtttctgaatccgaatcaggctgctggttacatggcgaaactgatctggaacgcagtgtccgggaccgtagtcgcagcagttgaggcgatgaactggctgaaaagtgcggcgaaattacttgctgctgaagtgaaggatcctaagacggatacagttctgcgtggccgctgcgcagtacattgggtgactcccgacggcttccctgtgtggcaggaatacaagaagcctattcagacgcgcttgaacctgatgttcctcggtcagttccgcttacagcctaccattaacaccaacaaagatagcgagattgatgcacacaaacaggagtctggtatcgctcctaactttgtacacagccaagacggtaaccaccttcgtatgactgtagtgtgggcacacgagaagtacggaatcgaatcttttgcactgattcacgactccttcggtaccattccggctgacgctgcgaacctgttcaaagcagtgcgcgaaactatggtttcgacatatgagtcttgtgatgtactggctgatttctacgaccagttcgctgaccagttgcacgagtctcaattggacaaaatgccagcacttccggctaaaggtaacttgaacctccgtgacatcttaaaatcggacttcgcgttcgcg

SEQ ID NO: 584 - protein, 890 aa, synthetic construct
  REGION 1..890: note = Variant of RNA polymerase
MHHHHHHMNTINIAKNDFSDIELAAIPFNTLADHYGERLAREQLALEHESYEMGEARFRKMFERQLKAGEVADNAAAKPLITTLLPKMIARINDWFEEVKAKRGKRPTAFQFLQEIKPEAVAYITIKTTLACLTSADNTTVQAVASAIGRAIEDEARFGRIRDLEAKHVKKNVEEQLNKRVGHVYKKAFMQVVEADMLSKGLLGGEAWSSWHKEDSIHVGVRCIEMLIESTGMVSLHRQNAGVVGQDSETIELAPEYAEAIATRAGALAGISPMFQPCVVPPKPWTGITGGGYWAAGRKPLQLVRTRSLAALRRYEEVSMPEVIKAVNIAQNTAWRINKKVLDVANAITQWQHCPVADVPAMDRGEMPARPLDIDTNEIALKAWKKEASAFYRKDKARVSRRLSMEFMLSQANKFANYNAIWFPQNMDWRGRVYAVPMFNPQGNDMTKGLLTFAQEKPIGEDGFYWLKIHGANTAGVDKVPFPQRIKFVEDNHTNIMECAKAPLENTWWAEQDSPFCFLAFCFEYAGVINHGLSYNCSLPLAFDGSCSGIQHFSAMLRDEIGGKAVNLLPSAEYQDIYRIVSDKVNEVLKQDLINGTSTTVETVTDKKTGEITQRTKYGTKVMAQWWLEHGVNRGVTKRSVMTLVYGSKEFGFRDQVLSDTIQPAIDNGKGDMFLNPNQAAGYMAKLIWNAVSGTVVAAVEAMNWLKSAAKLLAAEVKDPKTDTVLRGRCAVHWVTPDGFPVWQEYKKPIQTRLNLMFLGQFRLQPTINTNKDSEIDAHKQESGIAPNFVHSQDGNHLRMTVVWAHEKYGIESFALIHDSFGTIPADAANLFKAVRETMVSTYESCDVLADFYDQFADQLHESQLDKMPALPAKGNLNLRDILKSDFAFA

SEQ ID NO: 585 - DNA, 2670 bp, synthetic construct
  misc_feature 1..2670: note = Variant of RNA polymerase
  source 1..2670: mol_type = other DNA
atgcaccatcaccatcaccatatgaacacgattaacattgctaagaacgacttctctgacatcgaactggctgctatcccgttcaacactctggctgaccattacggtgagcgtttagctcgcgaacagttggcccttgagcatgagtcttacgagatgggtgaagcacgcttccgcaagatgtttgagcgtcaacttaaagctggtgaggttgcggataacgctgccgccaagcctctcatcactaccctactccctaagatgattgcacgcatcaacgactggtttgaggaagtgaaagctaagcgcggcaagcgcccgacagccttccagttcctgcaagaaatcaagccggaagccgtagcgtacatcaccattaagaccactctggcttgcctaaccagtgcggacaatacaaccgttcaggctgtagcaagcgcaatcggtcgggccattgaggacgaggctcgcttcggtcgtatccgtgaccttgaagctaagcacttcaagaaaaatgttgaggaacaactcaacaagcgcgtagggcacgtctacaaagtagcatttatgcaagttgtcgaggctgacatgctctctaagggtctactcggtggcgaggcgtggtcttcgtggcataaggaagactctattcatgtaggagtacgctgcatcgagatgctcattgagtcaaccggaatggttagcttacaccgccaaaatgctggcgtagtaggtcaagactctgagactatcgaactcgcacctgaatacgctgaggctatcgcaacccgtgcaggtgcgctggctggcatctctccgatgttccaaccttgcgtagttcctcctaagccgtggactggcattactggtggtggctattgggctgcggggcgcaaacccctgcagttagtacgtactcgcagtctggcggcgcttcgccgctatgaagaagtgtcgatgccggaggtcatcaaagcagtcaacattgcgcagaatacagcatggcgtattaacaagaaagttctcgacgtagcgaataccatcacccaatggcagcactgtccagtcgcggatgtgcctgcgatggatcgtggcgaaatgccagctcgtccgttggacatcgataccaacgagattgcacttaaagcgtggaagaaagaagcttccgcgttctaccgcaaagacaaagcacgcgttagccgtcgtctgtcaatggagtttatgttatctcaggcgaacaagtttgcgaattataaagcaatctggtttccgcaaaacatggattggcgtgggcgcgtgtacgctgtcccgatgttcaatcctcagggcaacgatatgacgaaaggcctgctgacctttgcgcaggagaaacccattggtgaagacggcttctattggctcaagattcatggcgcaaatacagctggagtggataaagtaccgtttccacaacgcatcaaatttgttgaggataaccatacgaatattatggaatgcgcgaaagcaccgctggaaaacacttggtgggcggaacaggactcgccgttctgttttctggcgttctgctttgagtatgctggcgtcatcaatagtggtctgtcgtacaactgtagcttgcctctggcatttgatggtagttgctccggcattcaacatttctcagcgatgttacgcgacgaaattggcggcaaagctgtgaatctcctcccatctgcggaataccaggatatttatcgtatcgtcagcgacaaagttaacgagatgctgaaacaagatctgattaacggtacctctaccaccgtggaaacggtgactgataagaagacaggcgaaattacccaacgcacgaaatacgggaccaaagttatggcacagtggtggttagaacacggtgtgaatcgtggcgtcacgaaacgctcggttatgactttggtgtatgggagcaaagagtttggattccgcgatcaagtgctgagtgacaccattcaaccggcgatcgataacggcaaaggtgacatgtttctgaatccgaatcaggctgctggttacatggcgaaactgatctggaacgcagtgtccgggaccgtagtcgcagcagttgaggcgatgaactggctgaaaagtgcggcgaaattacttgctgctgaagtgaaggatcctaagacggatacagttctgcgtggccgctgcgcagtacattgggtgactcccgacggcttccctgtgtggcaggaatacaagaagcctattcagacgcgcttgaacctgatgttcctcggtcagttccgcttacagcctaccattaacaccaacaaagatagcgagattgatgcacacaaacaggagtctggtatcgctcctaactttgtacacagccaagacggtaaccaccttcgtatgactgtagtgtgggcacacgagaagtacggaatcgaatcttttgcactgattcacgactccttcggtaccattccggctgacgctgcgaacctgttcaaagcagtgcgcgaaactatggtttcgacatatgagtcttgtgatgtactggctgatttctacgaccagttcgctgaccagttgcacgagtctcaattggacaaaatgccagcacttccggctaaaggtaacttgaacctccgtgacatcttaaaatcggacttcgcgttcgcg

SEQ ID NO: 586 - protein, 890 aa, synthetic construct
  REGION 1..890: note = Variant of RNA polymerase
MHHHHHHMNTINIAKNDFSDIELAAIPFNTLADHYGERLAREQLALEHESYEMGEARFRKMFERQLKAGEVADNAAAKPLITTLLPKMIARINDWFEEVKAKRGKRPTAFQFLQEIKPEAVAYITIKTTLACLTSADNTTVQAVASAIGRAIEDEARFGRIRDLEAKHFKKNVEEQLNKRVGHVYKVAFMQVVEADMLSKGLLGGEAWSSWHKEDSIHVGVRCIEMLIESTGMVSLHRQNAGVVGQDSETIELAPEYAEAIATRAGALAGISPMFQPCVVPPKPWTGITGGGYWAAGRKPLQLVRTRSLAALRRYEEVSMPEVIKAVNIAQNTAWRINKKVLDVANTITQWQHCPVADVPAMDRGEMPARPLDIDTNEIALKAWKKEASAFYRKDKARVSRRLSMEFMLSQANKFANYKAIWFPQNMDWRGRVYAVPMFNPQGNDMTKGLLTFAQEKPIGEDGFYWLKIHGANTAGVDKVPFPQRIKFVEDNHTNIMECAKAPLENTWWAEQDSPFCFLAFCFEYAGVINSGLSYNCSLPLAFDGSCSGIQHFSAMLRDEIGGKAVNLLPSAEYQDIYRIVSDKVNEMLKQDLINGTSTTVETVTDKKTGEITQRTKYGTKVMAQWWLEHGVNRGVTKRSVMTLVYGSKEFGFRDQVLSDTIQPAIDNGKGDMFLNPNQAAGYMAKLIWNAVSGTVVAAVEAMNWLKSAAKLLAAEVKDPKTDTVLRGRCAVHWVTPDGFPVWQEYKKPIQTRLNLMFLGQFRLQPTINTNKDSEIDAHKQESGIAPNFVHSQDGNHLRMTVVWAHEKYGIESFALIHDSFGTIPADAANLFKAVRETMVSTYESCDVLADFYDQFADQLHESQLDKMPALPAKGNLNLRDILKSDFAFA

SEQ ID NO: 587 - DNA, 2670 bp, synthetic construct
  misc_feature 1..2670: note = Variant of RNA polymerase
  source 1..2670: mol_type = other DNA
atgcaccatcaccatcaccatatgaacacgattaacattgctaagaacgacttctctgacatcgaactggctgctatcccgttcaacactctggctgaccattacggtgagcgtttagctcgcgaacagttggcccttgagcatgagtcttacgagatgggtgaagcacgcttccgcaagatgtttgagcgtcaacttaaagctggtgaggttgcggataacgctgccgccaagcctctcatcactaccctactccctaagatgattgcacgcatcaacgactggtttgaggaagtgaaagctaagcgcggcaagcgcccgacagccttccagttcctgcaagaaatcaagccggaagccgtagcgtacatcaccattaagaccactctggcttgcctaaccagtgcggacaatacaaccgttcaggctgtagcaagcgcaatcggtcgggccattgaggacgaggctcgcttcggtcgtatccgtgaccttgaagctaagcacttcaagaagaacgttgaggaacaactcaacaagcgcgtagggcacgtctaccaaaaagcatttatgcaagttgtcgaggctgacatgctctctaagggtctactcggtggcgaggcgtggtcttcgtggcataaggaagactctattcatgtaggagtacgctgcatcgagatgctcattgagtcaaccggaatggttagcttacaccgccaaaatgctggcgtagtaggtcaagactctgagactatcgaactcgcacctgaatacgctgaggctatcgcaacccgtgcaggtgcgctggctggcatctctccgatgttccaaccttgcgtagttcctcctaagccgtggactggcattactggtggtggctattgggctgcggggcgcaaacccctgcagttagtacgtactcgcagtctggcggcgcttcgccgctatgaagaagtgtcgatgccggaggtcatcaaagcagtcaacattgcgcagaatacagcatggcgtattaacaagaaagttctcgacgtagcgaataccatcacccaatggcagcactgtccagtcgcggatgtgcctgcgatggatcgtggcgaaatgccagctcgtccgttggacatcgataccaacgagattgcacttaaagcgtggaagaaagaagcttccgcgttctaccgcaaagacaaagcacgcgttagccgtcgtctgtcaatggagtttatgttatctcaggcgaacaagtttgcgaattataaagcaatctggtttccgcaaaacatggattggcgtgggcgcgtgtacgctgtcccgatgttcaatcctcagggcaacgatatgacgaaaggcctgctgacctttgcgcaggagaaacccattggtgaagacggcttctattggctcaagattcatggcgcaaatacagctggagtggataaagtaccgtttccacaacgcatcaaatttgttgaggataaccatacgaatattatggaatgcgcgaaagcaccgctggaaaacacttggtgggcggaacaggactcgccgttctgttttctggcgttctgctttgagtatgctggcgtcatcaatcatggtctgtcgtacaactgtagcttgcctctggcatttgatggtagttgctccggcctgcaacatttctcagcgatgttacgcgacgaaattggcggcaaagctgtgaatctcctcccatctgcggaataccaggatatttatcgtatcgtcagcgacaaagttaacgagcgtctgaaacaagatctgattaacggtacctctaccaccgtggaaacggtgactgataagaagacaggcgaaattacccaacgcacgaaatacgggaccaaagttatggcacagtggtggttagaacacggtgtgaatcgtggcgtcacgaaacgctcggttatgactttggtgtatgggagcaaagagtttggattccgcgatcaagtgctgagtgacaccattcaaccggcgatcgataacggcaaaggtgacatgtttctgaatccgaatcaggctgctggttacatggcgaaactgatctggaacgcagtgtccgggaccgtagtcgcagcagttgaggcgatgaactggctgaaaagtgcggcgaaattacttgctgctgaagtgaaggatcctaagacggatacagttctgcgtggccgctgcgcagtacattgggtgactcccgacggcttccctgtgtggcaggaatacaagaagcctattcagacgcgcttgaacctgatgttcctcggtcagttccgcttacagcctaccattaacaccaacaaagatagcgagattgatgcacacaaacaggagtctggtatcgctcctaactttgtacacagccaagacggtaaccaccttcgtatgactgtagtgtgggcacacgagaagtacggaatcgaatcttttgcactgattcacgactccttcggtaccattccggctgacgctgcgaacctgttcaaagcagtgcgcgaaactatggtttcgacatatgagtcttgtgatgtactggctgatttctacgaccagttcgctgaccagttgcacgagtctcaattggacaaaatgccagcacttccggctaaaggtaacttgaacctccgtgacatcttaaaatcggacttcgcgttcgcg

SEQ ID NO: 588 - protein, 890 aa, synthetic construct
  REGION 1..890: note = Variant of RNA polymerase
MHHHHHHMNTINIAKNDFSDIELAAIPFNTLADHYGERLAREQLALEHESYEMGEARFRKMFERQLKAGEVADNAAAKPLITTLLPKMIARINDWFEEVKAKRGKRPTAFQFLQEIKPEAVAYITIKTTLACLTSADNTTVQAVASAIGRAIEDEARFGRIRDLEAKHFKKNVEEQLNKRVGHVYQKAFMQVVEADMLSKGLLGGEAWSSWHKEDSIHVGVRCIEMLIESTGMVSLHRQNAGVVGQDSETIELAPEYAEAIATRAGALAGISPMFQPCVVPPKPWTGITGGGYWAAGRKPLQLVRTRSLAALRRYEEVSMPEVIKAVNIAQNTAWRINKKVLDVANTITQWQHCPVADVPAMDRGEMPARPLDIDTNEIALKAWKKEASAFYRKDKARVSRRLSMEFMLSQANKFANYKAIWFPQNMDWRGRVYAVPMFNPQGNDMTKGLLTFAQEKPIGEDGFYWLKIHGANTAGVDKVPFPQRIKFVEDNHTNIMECAKAPLENTWWAEQDSPFCFLAFCFEYAGVINHGLSYNCSLPLAFDGSCSGLQHFSAMLRDEIGGKAVNLLPSAEYQDIYRIVSDKVNERLKQDLINGTSTTVETVTDKKTGEITQRTKYGTKVMAQWWLEHGVNRGVTKRSVMTLVYGSKEFGFRDQVLSDTIQPAIDNGKGDMFLNPNQAAGYMAKLIWNAVSGTVVAAVEAMNWLKSAAKLLAAEVKDPKTDTVLRGRCAVHWVTPDGFPVWQEYKKPIQTRLNLMFLGQFRLQPTINTNKDSEIDAHKQESGIAPNFVHSQDGNHLRMTVVWAHEKYGIESFALIHDSFGTIPADAANLFKAVRETMVSTYESCDVLADFYDQFADQLHESQLDKMPALPAKGNLNLRDILKSDFAFA

SEQ ID NO: 589 - DNA, 2670 bp, synthetic construct
  misc_feature 1..2670: note = Variant of RNA polymerase
  source 1..2670: mol_type = other DNA
atgcaccatcaccatcaccatatgaacacgattaacattgctaagaacgacttctctgacatcgaactggctgctatcccgttcaacactctggctgaccattacggtgagcgtttagctcgcgaacagttggcccttgagcatgagtcttacgagatgggtgaagcacgcttccgcaagatgtttgagcgtcaacttaaagctggtgaggttgcggataacgctgccgccaagcctctcatcactaccctactccctaagatgattgcacgcatcaacgactggtttgaggaagtgaaagctaagcgcggcaagcgcccgacagccttccagttcctgcaagaaatcaagccggaagccgtagcgtacatcaccattaagaccactctggcttgcctaaccagtgcggacaatacaaccgttcaggctgtagcaagcgcaatcggtcgggccattgaggacgaggctcgcttcggtcgtatccgtgaccttgaagctaagcacttcaagaaaaacgttgaggaacaactcaacaagcgcgtagggcacgtctacaagaaagcatttatgcaagttgtcgaggctgacatgctctctaagggtctactcggtggcgaggcgtggtcttcgtggcataaggaagactctattcatgtaggagtacgctgcatcgagatgctcattgagtcaaccggaatggttagcttacaccgccaaaatgctggcgtagtaggtcaagactctgagactatcgaactcgcacctgaatacgctgaggctatcgcaacccgtgcaggtgcgctggctggcatctctccgatgttccaaccttgcgtagttcctcctaagccgtggactggcattactggtggtggctattgggctgcggggcgcaaacccctgcagttagtacgtactcgcagtctggcggcgcttcgccgctatgaagaagtgtcgatgccggaggtcatcaaagcagtcaacattgcgcagaatacagcatggcgtattaacaagaaagttctcgacgtagcgaatgcaatcacccaatggcagcactgtccagtcgcggatgtgcctgcgatggatcgtggcgaaatgccagctcgtccgttggacatcgataccaacgagattgcacttaaagcgtggaagaaagaagcttccgcgttctaccgcaaagacaaagcacgcgttagccgtcgtctgtcaatggagtttatgttatctcaggcgaacaagtttgcgaattataacgcaatctggtttccgcaaaacatggattggcgtgggcgcgtgtacgctgtcccgatgttcaatcctcagggcaacgatatgacgaaaggcctgctgacctttgcgcaggagaaacccattggtgaagacggcttctattggctcaagattcatggcgcaaatacagctggagtggataaagtaccgtttccacaacgcatcaaatttgttgaggataaccatacgaatattatggaatgcgcgaaagcaccgctggaaaacacttggtgggcggaacaggactcgccgttctgttttctggcgttctgctttgagtatgctggcgtcatcaatcacggtctgtcgtacaactgtagcttgcctctggcatttgatggtagttgctccggcattcaacatttctcagcgatgttacgcgacgaaattggcggcaaagctgtgaatctcctcccatctgcggaataccaggatatttatcgtatcgtcagcgacaaagttaacgaggtactgaaacaagatctgattaacggtacctctaccaccgtggaaacggtgactgataagaagacaggcgaaattacccaacgcacgaaatacgggaccaaagttatggcacagtggtggttagaacacggtgtgaatcgtggcgtcacgaaacgctcggttatgactttggtgtatgggagcaaagagtttggattccgcgatcaagtgctgagtgacaccattcaaccggcgatcgataacggcaaaggtgacatgtttctgaatccgaatcaggctgctggttacatggcgaaactgatctggaacgcagtgtccgggaccgtagtcgcagcagttgaggcgatgaactggctgaaaagtgcggcgaaattacttgctgctgaagtgaaggatcctaagacgggcacagttctgcgtggccgctgcgcagtacattgggtgactcccgacggcttccctgtgtggcaggaatacaagaagcctattcagacgcgcttgaacctgatgttcctcggtcagttccgcttacagcctaccattaacaccaacaaagatagcgagattgatgcacacaaacaggagtctggtatcgctcctaactttgtacacagccaagacggtaaccaccttcgtatgactgtagtgtgggcacacgagaagtacggaatcgaatcttttgcactgattcacgactccttcggtaccattccggctgacgctgcgaacctgttcaaagcagtgcgcgaaactatggtttcgacatatgagtcttgtgatgtactggctgatttctacgaccagttcgctgaccagttgcacgagtctcaattggacaaaatgccagcacttccggctaaaggtaacttgaacctccgtgacatcttaaaatcggacttcgcgttcgcg

SEQ ID NO: 590 - protein, 890 aa, synthetic construct
  REGION 1..890: note = Variant of RNA polymerase
MHHHHHHMNTINIAKNDFSDIELAAIPFNTLADHYGERLAREQLALEHESYEMGEARFRKMFERQLKAGEVADNAAAKPLITTLLPKMIARINDWFEEVKAKRGKRPTAFQFLQEIKPEAVAYITIKTTLACLTSADNTTVQAVASAIGRAIEDEARFGRIRDLEAKHFKKNVEEQLNKRVGHVYKKAFMQVVEADMLSKGLLGGEAWSSWHKEDSIHVGVRCIEMLIESTGMVSLHRQNAGVVGQDSETIELAPEYAEAIATRAGALAGISPMFQPCVVPPKPWTGITGGGYWAAGRKPLQLVRTRSLAALRRYEEVSMPEVIKAVNIAQNTAWRINKKVLDVANAITQWQHCPVADVPAMDRGEMPARPLDIDTNEIALKAWKKEASAFYRKDKARVSRRLSMEFMLSQANKFANYNAIWFPQNMDWRGRVYAVPMFNPQGNDMTKGLLTFAQEKPIGEDGFYWLKIHGANTAGVDKVPFPQRIKFVEDNHTNIMECAKAPLENTWWAEQDSPFCFLAFCFEYAGVINHGLSYNCSLPLAFDGSCSGIQHFSAMLRDEIGGKAVNLLPSAEYQDIYRIVSDKVNEVLKQDLINGTSTTVETVTDKKTGEITQRTKYGTKVMAQWWLEHGVNRGVTKRSVMTLVYGSKEFGFRDQVLSDTIQPAIDNGKGDMFLNPNQAAGYMAKLIWNAVSGTVVAAVEAMNWLKSAAKLLAAEVKDPKTGTVLRGRCAVHWVTPDGFPVWQEYKKPIQTRLNLMFLGQFRLQPTINTNKDSEIDAHKQESGIAPNFVHSQDGNHLRMTVVWAHEKYGIESFALIHDSFGTIPADAANLFKAVRETMVSTYESCDVLADFYDQFADQLHESQLDKMPALPAKGNLNLRDILKSDFAFA

SEQ ID NO: 591 - DNA, 2670 bp, synthetic construct
  misc_feature 1..2670: note = Variant of RNA polymerase
  source 1..2670: mol_type = other DNA
atgcaccatcaccatcaccatatgaacacgattaacattgctaagaacgacttctctgacatcgaactggctgctatcccgttcaacactctggctgaccattacggtgagcgtttagctcgcgaacagttggcccttgagcatgagtcttacgagatgggtgaagcacgcttccgcaagatgtttgagcgtcaacttaaagctggtgaggttgcggataacgctgccgccaagcctctcatcactaccctactccctaagatgattgcacgcatcaacgactggtttgaggaagtgaaagctaagcgcggcaagcgcccgacagccttccagttcctgcaagaaatcaagccggaagccgtagcgtacatcaccattaagaccactctggcttgcctaaccagtgcggacaatacaaccgttcaggctgtagcaagcgcaatcggtcgggccattgaggacgaggctcgcttcggtcgtatccgtgaccttgaagctaagcacttcaagaagaacgttgaggaacaactcaacaagcgcgtagggcacgtgtacaagaaagcatttatgcaagttgtcgaggctgacatgctctctaagggtctactcggtggcgaggcgtggtcttcgtggcataaggaagactctattcatgtaggagtacgctgcatcgagatgctcattgagtcaaccggaatggttagcttacaccgccaaaatgctggcgtagtaggtcaagactctgagactatcgaactcgcacctgaatacgctgaggctatcgcaacccgtgcaggtgcgctggctggcatctctccgatgttccaaccttgcgtagttcctcctaagccgtggactggcattactggtggtggctattgggctgcggggcgcaaacccctgcagttagtacgtactcgcagtctggcggcgcttcgccgctatgaagaagtgtcgatgccggaggtcatcaaagcagtcaacattgcgcagaatacagcatggcgtattaacaagaaagttctcgacgtagcgaatgccatcacccaatggcagcactgtccagtcgcggatgtgcctgcgatggatcgtggcgaaatgccagctcgtccgttggacatcgataccaacgagattgcacttaaagcgtggaagaaagaagcttccgcgttctaccgcaaagacaaagcacgcgttagccgtcgtctgtcaatggagtttatgttatctcaggcgaacaagtttgcgaattataaagcaatctggtttccgcaaaacatggattggcgtgggcgcgtgtacgctgtcccgatgttcaatcctcagggcaacgatatgacgaaaggcctgctgacctttgcgcaggagaaacccattggtgaagacggcttctattggctcaagattcatggcgcaaatacagctggagtggataaagtaccgtttccacaacgcatcaaatttgttgaggataaccatacgaatattatggaatgcgcgaaagcaccgctggaaaacacttggtgggcggaacaggactcgccgttctgttttctggcgttctgctttgagtatgctggcgtcatcaatcatggtctgtcgtacaactgtagcttgcctctggcatttgatggtagttgctccggcatccaacatttctcagcgatgttacgcgacgaaattggcgccaaagctgtgaatctcctcccatctgcggaataccaggatatttatcgtatcgtcagcgacaaagttaacgagatgctgaaacaagatctgattaacggtacctctaccaccgtggaaacggtgactgataagaagacaggcgaaattacccaacgcacgaaatacgggaccaaagttatggcacagtggtggttagaacacggtgtgaatcgtggcgtcacgaaacgctcggttatgactttggtgtatgggagcaaagagtttggattccgcgatcaagtgctgagtgacaccattcaaccggcgatcgataacggcaaaggtgacatgtttctgaatccgaatcaggctgctggttacatggcgaaactgatctggaacgcagtgtccgggaccgtagtcgcagcagttgaggcgatgaactggctgaaaagtgcggcgaaattacttgctgctgaagtgaaggatcctaagacggatacagttctgcgtggccgctgcgcagtacattgggtgactcccgacggcttccctgtgtggcaggaatacaagaagcctattcagacgcgcttgaacctgatgttcctcggtcagttccgcttacagcctaccattaacaccaacaaagatagcgagattgatgcacacaaacaggagtctggtatcgctcctaactttgtacacagccaagacggtaaccaccttcgtatgactgtagtgtgggcacacgagaagtacggaatcgaatcttttgcactgattcacgactccttcggtaccattccggctgacgctgcgaacctgttcaaagcagtgcgcgaaactatggtttcgacatatgagtcttgtgatgtactggctgatttctacgaccagttcgctgaccagttgcacgagtctcaattggacaaaatgccagcacttccggctaaaggtaacttgaacctccgtgacatcttaaaatcggacttcgcgttcgcg

SEQ ID NO: 592 - protein, 890 aa, synthetic construct
  REGION 1..890: note = Variant of RNA polymerase
MHHHHHHMNTINIAKNDFSDIELAAIPFNTLADHYGERLAREQLALEHESYEMGEARFRKMFERQLKAGEVADNAAAKPLITTLLPKMIARINDWFEEVKAKRGKRPTAFQFLQEIKPEAVAYITIKTTLACLTSADNTTVQAVASAIGRAIEDEARFGRIRDLEAKHFKKNVEEQLNKRVGHVYKKAFMQVVEADMLSKGLLGGEAWSSWHKEDSIHVGVRCIEMLIESTGMVSLHRQNAGVVGQDSETIELAPEYAEAIATRAGALAGISPMFQPCVVPPKPWTGITGGGYWAAGRKPLQLVRTRSLAALRRYEEVSMPEVIKAVNIAQNTAWRINKKVLDVANAITQWQHCPVADVPAMDRGEMPARPLDIDTNEIALKAWKKEASAFYRKDKARVSRRLSMEFMLSQANKFANYKAIWFPQNMDWRGRVYAVPMFNPQGNDMTKGLLTFAQEKPIGEDGFYWLKIHGANTAGVDKVPFPQRIKFVEDNHTNIMECAKAPLENTWWAEQDSPFCFLAFCFEYAGVINHGLSYNCSLPLAFDGSCSGIQHFSAMLRDEIGAKAVNLLPSAEYQDIYRIVSDKVNEMLKQDLINGTSTTVETVTDKKTGEITQRTKYGTKVMAQWWLEHGVNRGVTKRSVMTLVYGSKEFGFRDQVLSDTIQPAIDNGKGDMFLNPNQAAGYMAKLIWNAVSGTVVAAVEAMNWLKSAAKLLAAEVKDPKTDTVLRGRCAVHWVTPDGFPVWQEYKKPIQTRLNLMFLGQFRLQPTINTNKDSEIDAHKQESGIAPNFVHSQDGNHLRMTVVWAHEKYGIESFALIHDSFGTIPADAANLFKAVRETMVSTYESCDVLADFYDQFADQLHESQLDKMPALPAKGNLNLRDILKSDFAFA

SEQ ID NO: 593 - DNA, 2670 bp, synthetic construct
  misc_feature 1..2670: note = Variant of RNA polymerase
  source 1..2670: mol_type = other DNA
atgcaccatcaccatcaccatatgaacacgattaacattgctaagaacgacttctctgacatcgaactggctgctatcccgttcaacactctggctgaccattacggtgagcgtttagctcgcgaacagttggcccttgagcatgagtcttacgagatgggtgaagcacgcttccgcaagatgtttgagcgtcaacttaaagctggtgaggttgcggataacgctgccgccaagcctctcatcactaccctactccctaagatgattgcacgcatcaacgactggtttgaggaagtgaaagctaagcgcggcaagcgcccgacagccttccagttcctgcaagaaatcaagccggaagccgtagcgtacatcaccattaagaccactctggcttgcctaaccagtgcggacaatacaaccgttcaggctgtagcaagcgcaatcggtcgggccattgaggacgaggctcgcttcggtcgtatccgtgaccttgaagctaagcacttcaagaaaaatgttgaggaacaactcaacaagcgcgtagggcacccgtacaagaaagcatttatgcaagttgtcgaggctgacatgctctctaagggtctactcggtggcgaggcgtggtcttcgtggcataaggaagactctattcatgtaggagtacgctgcatcgagatgctcattgagtcaaccggaatggttagcttacaccgccaaaatgctggcgtagtaggtcaagactctgagactatcgaactcgcacctgaatacgctgaggctatcgcaacccgtgcaggtgcgctggctggcatctctccgatgttccaaccttgcgtagttcctcctaagccgtggactggcattactggtggtggctattgggctgcggggcgcaaacccctgcagttagtacgtactcgcagtctggcggcgcttcgccgctatgaagaagtgtcgatgccggaggtcatcaaagcagtcaacattgcgcagaatacagcatggcgtattaacaagaaagttctcgacgtagcgaatgccatcacccaatggcagcactgtccagtcgcggatgtgcctgcgatggatcgtggcgaaatgccagctcgtccgttggacatcgataccaacgagattgcacttaaagcgtggaagaaagaagcttccgcgttctaccgcaaagacaaagcacgcgttagccgtcgtctgtcaatggagtttatgttatctcaggcgaacaagtttgcgaatgagaaagcaatctggtttccgcaaaacatggattggcgtgggcgcgtgtacgctgtcccgatgttcaatcctcagggcaacgatatgacgaaaggcctgctgacctttgcgcaggagaaacccattggtgaagacggcttctattggctcaagattcatggcgcaaatacagctggagtggataaagtaccgtttccacaacgcatcaaatttgttgaggataaccatacgaatattatggaatgcgcgaaagcaccgctggaaaacacttggtgggcggaacaggactcgccgttctgttttctggcgttctgctttgagtatgctggcgtcatcaatcatggtctgtcgtacaactgtagcttgcctctggcatttgatggtagttgctccggcctgcaacatttctcagcgatgttacgcgacgaaattggcggcaaagctgtgaatctcctcccatctgcggaataccaggatatttatcgtatcgtcagcgacaaagttaacgagatgctgaaacaagatctgattaacggtacctctaccaccgtggaaacggtgactgataagaagacaggcgaaattacccaacgcacgaaatacgggaccaaagttatggcacagtggtggttagaacacggtgtgaatcgtggcgtcacgaaacgctcggttatgactttggtgtatgggagcaaagagtttggattccgcgatcaagtgctgagtgacaccattcaaccggcgatcgataacggcaaaggtgacatgtttctgaatccgaatcaggctgctggttacatggcgaaactgatctggaacgcagtgtccgggaccgtagtcgcagcagttgaggcgatgaactggctgaaaagtgcggcgaaattacttgctgctgaagtgaaggatcctaagacggatacagttctgcgtggccgctgcgcagtacattgggtgactcccgacggcttccctgtgtggcaggaatacaagaagcctattcagacgcgcttgaacctgatgttcctcggtcagttccgcttacagcctaccattaacaccaacaaagatagcgagattgatgcacacaaacaggagtctggtatcgctcctaactttgtacacagccaagacggtaaccaccttcgtatgactgtagtgtgggcacacgagaagtacggaatcgaatcttttgcactgattcacgactccttcggtaccattccggctgacgctgcgaacctgttcaaagcagtgcgcgaaactatggtttcgacatatgagtcttgtgatgtactggctgatttctacgaccagttcgctgaccagttgcacgagtctcaattggacaaaatgccagcacttccggctaaaggtaacttgaacctccgtgacatcttaaaatcggacttcgcgttcgcg

SEQ ID NO: 594 - protein, 890 aa, synthetic construct
  REGION 1..890: note = Variant of RNA polymerase
MHHHHHHMNTINIAKNDFSDIELAAIPFNTLADHYGERLAREQLALEHESYEMGEARFRKMFERQLKAGEVADNAAAKPLITTLLPKMIARINDWFEEVKAKRGKRPTAFQFLQEIKPEAVAYITIKTTLACLTSADNTTVQAVASAIGRAIEDEARFGRIRDLEAKHFKKNVEEQLNKRVGHPYKKAFMQVVEADMLSKGLLGGEAWSSWHKEDSIHVGVRCIEMLIESTGMVSLHRQNAGVVGQDSETIELAPEYAEAIATRAGALAGISPMFQPCVVPPKPWTGITGGGYWAAGRKPLQLVRTRSLAALRRYEEVSMPEVIKAVNIAQNTAWRINKKVLDVANAITQWQHCPVADVPAMDRGEMPARPLDIDTNEIALKAWKKEASAFYRKDKARVSRRLSMEFMLSQANKFANEKAIWFPQNMDWRGRVYAVPMFNPQGNDMTKGLLTFAQEKPIGEDGFYWLKIHGANTAGVDKVPFPQRIKFVEDNHTNIMECAKAPLENTWWAEQDSPFCFLAFCFEYAGVINHGLSYNCSLPLAFDGSCSGLQHFSAMLRDEIGGKAVNLLPSAEYQDIYRIVSDKVNEMLKQDLINGTSTTVETVTDKKTGEITQRTKYGTKVMAQWWLEHGVNRGVTKRSVMTLVYGSKEFGFRDQVLSDTIQPAIDNGKGDMFLNPNQAAGYMAKLIWNAVSGTVVAAVEAMNWLKSAAKLLAAEVKDPKTDTVLRGRCAVHWVTPDGFPVWQEYKKPIQTRLNLMFLGQFRLQPTINTNKDSEIDAHKQESGIAPNFVHSQDGNHLRMTVVWAHEKYGIESFALIHDSFGTIPADAANLFKAVRETMVSTYESCDVLADFYDQFADQLHESQLDKMPALPAKGNLNLRDILKSDFAFA

SEQ ID NO: 595 - DNA, 2670 bp, synthetic construct
  misc_feature 1..2670: note = Variant of RNA polymerase
  source 1..2670: mol_type = other DNA
atgcaccatcaccatcaccatatgaacacgattaacattgctaagaacgacttctctgacatcgaactggctgctatcccgttcaacactctggctgaccattacggtgagcgtttagctcgcgaacagttggcccttgagcatgagtcttacgagatgggtgaagcacgcttccgcaagatgtttgagcgtcaacttaaagctggtgaggttgcggataacgctgccgccaagcctctcatcactaccctactccctaagatgattgcacgcatcaacgactggtttgaggaagtgaaagctaagcgcggcaagcgcccgacagccttccagttcctgcaagaaatcaagccggaagccgtagcgtacatcaccattaagaccactctggcttgcctaaccagtgcggacaatacaaccgttcaggctgtagcaagcgcaatcggtcgggccattgaggacgaggctcgcttcggtcgtatccgtgaccttgaagctaagcacttcaagaaaaacgttgaggaacaactcaacaagcgcgtcgggcacgtctacaagaaagcatttatgcaagttgtcgaggctgacatgctctctaagggtctactcggtggcgaggcgtggtcttcgtggcataaggaagactctattcatgtaggagtacgctgcatcgagatgctcattgagtcaaccggaatggttagcttacaccgccaaaatgctggcgtagtaggtcaagactctgagactatcgaactcgcacctgaatacgctgaggctatcgcaacccgtgcaggtgcgctggctggcatctctccgatgttccaaccttgcgtagttcctcctaagccgtggactggcattactggtggtggctattgggctgcggggcgcaaacccctgcagttagtacgtactcgcagtctggcggcgcttcgccgctatgaagaagtgtcgatgccggaggtcatcaaagcagtcaacattgcgcagaatacagcatggcgtattaacaagaaagttctcgacgtagcgaatgcaatcacccaatggcagcactgtccagtcgcggatgtgcctgcgatggatcgtggcgaaatgccagctcgtccgttggacatcgataccaacgagattgcacttaaagcgtggaagaaagaagcttccgcgttctaccgcaaagacaaagcacgcgttagccgtcgtctgtcaatggagtttatgttatctcaggcgaacaagtttgcgaattataaagcaatctggtttccgcaaaacatggattggcgtgggcgcgtgtacgctgtcccgatgttcaatcctcagggcaacgatatgacgaaaggcctgctgacctttgcgcaggagaaacccattggtgaagacggcttctattggctcaagattcatggcgcaaatacagctggagtggataaagtaccgtttccacaacgcatcaaatttgttgaggataaccatacgaatattatggaatgcgcgaaagcaccgctggaaaacacttggtgggcggaacaggactcgccgttctgttttctggcgttctgctttgagtatgctggcgtcatcaatcacggtctgtcgtacaactgtagcttgcctctggcatttgatggtagttgctccggcattcaacatttctcagcgatgttacgcgacgaaattggcggcaaagctgtgaatctcctcccatctgcggaataccaggatatttatcgtatcgtcagcgacaaagttaacgaggtactgaaacaagatctgattaacggtacctctaccaccgtggaaacggtgactgataagaagacaggcgaaattacccaacgcacgaaatacgggaccaaagttatggcacagtggtggttagaacacggtgtgaatcgtggcgtcacgaaacgctcggttatgactttggtgtatgggagcaaagagtttggattccgcgatcaagtgctgagtgacaccattcaaccggcgatcgataacggcaaaggtgacatgtttctgaatccgaatcaggctgctggttacatggcgaaactgatctggaacgcagtgtccgggaccgtagtcgcagcagttgaggcgatgaactggctgaaaagtgcggcgaaattacttgctgctgaagtgaaggatccaaagacgggcacagttctgcgtggccgctgcgcagtacattgggtgactcccgacggcttccctgtgtggcaggaatacaagaagcctattcagacgcgcttgaacctgatgttcctcggtcagttccgcttacagcctaccattaacaccaacaaagatagcgagattgatgcacacaaacaggagtctggtatcgctcctaactttgtacacagccaagacggtaaccaccttcgtatgactgtagtgtgggcacacgagaagtacggaatcgaatcttttgcactgattcacgactccttcggtaccattccggctgacgctgcgaacctgttcaaagcagtgcgcgaaactatggttagcacatatgagtcttgtgatgtactggctgatttctacgaccagttcgctgaccagttgcacgagtctcaattggacaaaatgccagcacttccggctaaaggtaacttgaacctccgtgacatcttaaaatcggacttcgcgttcgcg

SEQ ID NO: 596 - protein, 890 aa, synthetic construct
  REGION 1..890: note = Variant of RNA polymerase
MHHHHHHMNTINIAKNDFSDIELAAIPFNTLADHYGERLAREQLALEHESYEMGEARFRKMFERQLKAGEVADNAAAKPLITTLLPKMIARINDWFEEVKAKRGKRPTAFQFLQEIKPEAVAYITIKTTLACLTSADNTTVQAVASAIGRAIEDEARFGRIRDLEAKHFKKNVEEQLNKRVGHVYKKAFMQVVEADMLSKGLLGGEAWSSWHKEDSIHVGVRCIEMLIESTGMVSLHRQNAGVVGQDSETIELAPEYAEAIATRAGALAGISPMFQPCVVPPKPWTGITGGGYWAAGRKPLQLVRTRSLAALRRYEEVSMPEVIKAVNIAQNTAWRINKKVLDVANAITQWQHCPVADVPAMDRGEMPARPLDIDTNEIALKAWKKEASAFYRKDKARVSRRLSMEFMLSQANKFANYKAIWFPQNMDWRGRVYAVPMFNPQGNDMTKGLLTFAQEKPIGEDGFYWLKIHGANTAGVDKVPFPQRIKFVEDNHTNIMECAKAPLENTWWAEQDSPFCFLAFCFEYAGVINHGLSYNCSLPLAFDGSCSGIQHFSAMLRDEIGGKAVNLLPSAEYQDIYRIVSDKVNEVLKQDLINGTSTTVETVTDKKTGEITQRTKYGTKVMAQWWLEHGVNRGVTKRSVMTLVYGSKEFGFRDQVLSDTIQPAIDNGKGDMFLNPNQAAGYMAKLIWNAVSGTVVAAVEAMNWLKSAAKLLAAEVKDPKTGTVLRGRCAVHWVTPDGFPVWQEYKKPIQTRLNLMFLGQFRLQPTINTNKDSEIDAHKQESGIAPNFVHSQDGNHLRMTVVWAHEKYGIESFALIHDSFGTIPADAANLFKAVRETMVSTYESCDVLADFYDQFADQLHESQLDKMPALPAKGNLNLRDILKSDFAFA

SEQ ID NO: 597 - DNA, 2670 bp, synthetic construct
  misc_feature 1..2670: note = Variant of RNA polymerase
  source 1..2670: mol_type = other DNA
atgcaccatcaccatcaccatatgaacacgattaacattgctaagaacgacttctctgacatcgaactggctgctatcccgttcaacactctggctgaccattacggtgagcgtttagctcgcgaacagttggcccttgagcatgagtcttacgagatgggtgaagcacgcttccgcaagatgtttgagcgtcaacttaaagctggtgaggttgcggataacgctgccgccaagcctctcatcactaccctactccctaagatgattgcacgcatcaacgactggtttgaggaagtgaaagctaagcgcggcaagcgcccgacagccttccagttcctgcaagaaatcaagccggaagccgtagcgtacatcaccattaagaccactctggcttgcctaaccagtgcggacaatacaaccgttcaggctgtagcaagcgcaatcggtcgggccattgaggacgaggctcgcttcggtcgtatccgtgaccttgaagctaagcacttcaagaaaattgttgaggaacaactcaacaagcgcgtagggcacgtctacaagaaagcatttatgcaagttgtcgaggctgacatgctctctaagggtctactcggtggcgaggcgtggtcttcgtggcataaggaagactctattcatgtaggagtacgctgcatcgagatgctcattgagtcaaccggaatggttagcttacaccgccaaaatgctggcgtagtaggtcaagactctgagactatcgaactcgcacctgaatacgctgaggctatcgcaacccgtgcaggtgcgctggctggcatctctccgatgttccaaccttgcgtagttcctcctaagccgtggactggcattactggtggtggctattgggctgcggggcgcaaacccctgcagttagtacgtactcgcagtctggcggcgcttcgccgctatgaagaagtgtcgatgccggaggtcatcaaagcagtcaacattgcgcagaatacagcatggcgtattaacaagaaagttctcgacgtagcgaatgccatcacccaatggcagcactgtccagtcgcggatgtgcctgcgatggatcgtggcgaaatgccagctcgtccgttggacatcgataccaacgagattgcacttaaagcgtggaagaaagaagcttccgcgttctaccgcaaagacaaagcacgcgttagccgtcgtctgtcaatggagtttatgttatctcaggcgaacaagtttgcgaatgagaaagcaatctggtttccgcaaaacatggattggcgtgggcgcgtgtacgctgtcccgatgttcaatcctcagggcaacgatatgacgaaaggcctgctgacctttgcgcaggagaaacccattggtgaagacggcttctattggctcaagattcatggcgcaaatacagctggagtggataaagtaccgtttccacaacgcatcaaatttgttgaggataaccatacgaatattatggaatgcgcgaaagcaccgctggaaaacacttggtgggcggaacaggactcgccgttctgttttctggcgttctgctttgagtatgctggcgtcatcaatcacggtctgtcgtacaactgtagcttgcctctggcatttgatggtagttgctccggcctgcaacatttctcagcgatgttacgcgacgaaattggcggcaaagctgtgaatctcctcccatctgcggaataccaggatatttatcgtatcgtcagcgacaaagttaacgagatgctgaaacaagatctgattaacggtacctctaccaccgtggaaacggtgactgataagaagacaggcgaaattacccaacgcacgaaatacgggaccaaagttatggcacagtggtggttagaacacggtgtgaatcgtggcgtcacgaaacgctcggttatgactttggtgtatgggagcaaagagtttggattccgcgatcaagtgctgagtgacaccattcaaccggcgatcgataacggcaaaggtgacatgtttctgaatccgaatcaggctgctggttacatggcgaaactgatctggaacgcagtgtccgggaccgtagtcgcagcagttgaggcgatgaactggctgaaaagtgcggcgaaattacttgctgctgaagtgaaggatcctaagacggatacagttctgcgtggccgctgcgcagtacattgggtgactcccgacggcttccctgtgtggcaggaatacaagaagcctattcagacgcgcttgaacctgatgttcctcggtcagttccgcttacagcctaccattaacaccaacaaagatagcgagattgatgcacacaaacaggagtctggtatcgctcctaactttgtacacagccaagacggtaaccaccttcgtatgactgtagtgtgggcacacgagaagtacggaatcgaatcttttgcactgattcacgactccttcggtaccattccggctgacgctgcgaacctgttcaaagcagtgcgcgaaactatggtttcgacatatgagtcttgtgatgtactggctgatttctacgaccagttcgctgaccagttgcacgagtctcaattggacaaaatgccagcacttccggctaaaggtaacttgaacctccgtgacatcttaaaatcggacttcgcgttcgcg

SEQ ID NO: 598 - protein, 890 aa, synthetic construct
  REGION 1..890: note = Variant of RNA polymerase
MHHHHHHMNTINIAKNDFSDIELAAIPFNTLADHYGERLAREQLALEHESYEMGEARFRKMFERQLKAGEVADNAAAKPLITTLLPKMIARINDWFEEVKAKRGKRPTAFQFLQEIKPEAVAYITIKTTLACLTSADNTTVQAVASAIGRAIEDEARFGRIRDLEAKHFKKIVEEQLNKRVGHVYKKAFMQVVEADMLSKGLLGGEAWSSWHKEDSIHVGVRCIEMLIESTGMVSLHRQNAGVVGQDSETIELAPEYAEAIATRAGALAGISPMFQPCVVPPKPWTGITGGGYWAAGRKPLQLVRTRSLAALRRYEEVSMPEVIKAVNIAQNTAWRINKKVLDVANAITQWQHCPVADVPAMDRGEMPARPLDIDTNEIALKAWKKEASAFYRKDKARVSRRLSMEFMLSQANKFANEKAIWFPQNMDWRGRVYAVPMFNPQGNDMTKGLLTFAQEKPIGEDGFYWLKIHGANTAGVDKVPFPQRIKFVEDNHTNIMECAKAPLENTWWAEQDSPFCFLAFCFEYAGVINHGLSYNCSLPLAFDGSCSGLQHFSAMLRDEIGGKAVNLLPSAEYQDIYRIVSDKVNEMLKQDLINGTSTTVETVTDKKTGEITQRTKYGTKVMAQWWLEHGVNRGVTKRSVMTLVYGSKEFGFRDQVLSDTIQPAIDNGKGDMFLNPNQAAGYMAKLIWNAVSGTVVAAVEAMNWLKSAAKLLAAEVKDPKTDTVLRGRCAVHWVTPDGFPVWQEYKKPIQTRLNLMFLGQFRLQPTINTNKDSEIDAHKQESGIAPNFVHSQDGNHLRMTVVWAHEKYGIESFALIHDSFGTIPADAANLFKAVRETMVSTYESCDVLADFYDQFADQLHESQLDKMPALPAKGNLNLRDILKSDFAFA

SEQ ID NO: 599 - DNA, 2670 bp, synthetic construct
  misc_feature 1..2670: note = Variant of RNA polymerase
  source 1..2670: mol_type = other DNA
atgcaccatcaccatcaccatatgaacacgattaacattgctaagaacgacttctctgacatcgaactggctgctatcccgttcaacactctggctgaccattacggtgagcgtttagctcgcgaacagttggcccttgagcatgagtcttacgagatgggtgaagcacgcttccgcaagatgtttgagcgtcaacttaaagctggtgaggttgcggataacgctgccgccaagcctctcatcactaccctactccctaagatgattgcacgcatcaacgactggtttgaggaagtgaaagctaagcgcggcaagcgcccgacagccttccagttcctgcaagaaatcaagccggaagccgtagcgtacatcaccattaagaccactctggcttgcctaaccagtgcggacaatacaaccgttcaggctgtagcaagcgcaatcggtcgggccattgaggacgaggctcgcttcggtcgtatccgtgaccttgaagctaagcacttcaagggcaacgttgaggaacaactcaacaagcgcgtagggcacgtctaccaaaaagcatttatgcaagttgtcgaggctgacatgctctctaagggtctactcggtggcgaggcgtggtcttcgtggcataaggaagactctattcatgtaggagtacgctgcatcgagatgctcattgagtcaaccggaatggttagcttacaccgccaaaatgctggcgtagtaggtcaagactctgagactatcgaactcgcacctgaatacgctgaggctatcgcaacccgtgcaggtgcgctggctggcatctctccgatgttccaaccttgcgtagttcctcctaagccgtggactggcattactggtggtggctattgggctgcggggcgcaaacccctgcagttagtacgtactcgcagtctggcggcgcttcgccgctatgaagaagtgtcgatgccggaggtcatcaaagcagtcaacattgcgcagaatacagcatggcgtattaacaagaaagttctcgacgtagcgaatgcaatcacccaatggcagcactgtccagtcgcggatgtgcctgcgatggatcgtggcgaaatgccagctcgtccgttggacatcgataccaacgagattgcacttaaagcgtggaagaaagaagcttccgcgttctaccgcaaagacaaagcacgcgttagccgtcgtctgtcaatggagtttatgttatctcaggcgaacaagtttgcgaatgagaaagcaatctggtttccgcaaaacatggattggcgtgggcgcgtgtacgctgtcccgatgttcaatcctcagggcaacgatatgacgaaaggcctgctgacctttgcgcaggagaaacccattggtgaagacggcttctattggctcaagattcatggcgcaaatacagctggagtggataaagtaccgtttccacaacgcatcaaatttgttgaggataaccatacgaatattatggaatgcgcgaaagcaccgctggaaaacacttggtgggcggaacaggactcgccgttctgttttctggcgttctgctttgagtatgctggcgtcatcaatcatggtctgtcgtacaactgtagcttgcctctggcatttgatggtagttgctccggcctgcaacatttctcagcgatgttacgcgacgaaattggcggcaaagctgtgaatctcctcccatctgcggaataccaggatatttatcgtatcgtcagcgacaaagttaacgagatgctgaaacaagatctgattaacggtacctctaccaccgtggaaacggtgactgataagaagacaggcgaaattacccaacgcacgaaatacgggaccaaagttatggcacagtggtggttagaacacggtgtgaatcgtggcgtcacgaaacgctcggttatgactttggtgtatgggagcaaagagtttggattccgcgatcaagtgctgagtgacaccattcaaccggcgatcgataacggcaaaggtgacatgtttctgaatccgaatcaggctgctggttacatggcgaaactgatctggaacgcagtgtccgggaccgtagtcgcagcagttgaggcgatgaactggctgaaaagtgcggcgaaattacttgctgctgaagtgaaggatcctaagacggatacagttctgcgtggccgctgcgcagtacattgggtgactcccgacggcttccctgtgtggcaggaatacaagaagcctattcagacgcgcttgaacctgatgttcctcggtcagttccgcttacagcctaccattaacaccaacaaagatagcgagattgatgcacacaaacaggagtctggtatcgctcctaactttgtacacagccaagacggtaaccaccttcgtatgactgtagtgtgggcacacgagaagtacggaatcgaatcttttgcactgattcacgactccttcggtaccattccggctgacgctgcgaacctgttcaaagcagtgcgcgaaactatggtttcgacatatgagtcttgtgatgtactggctgatttctacgaccagttcgctgaccagttgcacgagtctcaattggacaaaatgccagcacttccggctaaaggtaacttgaacctccgtgacatcttaaaatcggacttcgcgttcgcg

SEQ ID NO: 600 - protein, 890 aa, synthetic construct
  REGION 1..890: note = Variant of RNA polymerase
MHHHHHHMNTINIAKNDFSDIELAAIPFNTLADHYGERLAREQLALEHESYEMGEARFRKMFERQLKAGEVADNAAAKPLITTLLPKMIARINDWFEEVKAKRGKRPTAFQFLQEIKPEAVAYITIKTTLACLTSADNTTVQAVASAIGRAIEDEARFGRIRDLEAKHFKGNVEEQLNKRVGHVYQKAFMQVVEADMLSKGLLGGEAWSSWHKEDSIHVGVRCIEMLIESTGMVSLHRQNAGVVGQDSETIELAPEYAEAIATRAGALAGISPMFQPCVVPPKPWTGITGGGYWAAGRKPLQLVRTRSLAALRRYEEVSMPEVIKAVNIAQNTAWRINKKVLDVANAITQWQHCPVADVPAMDRGEMPARPLDIDTNEIALKAWKKEASAFYRKDKARVSRRLSMEFMLSQANKFANEKAIWFPQNMDWRGRVYAVPMFNPQGNDMTKGLLTFAQEKPIGEDGFYWLKIHGANTAGVDKVPFPQRIKFVEDNHTNIMECAKAPLENTWWAEQDSPFCFLAFCFEYAGVINHGLSYNCSLPLAFDGSCSGLQHFSAMLRDEIGGKAVNLLPSAEYQDIYRIVSDKVNEMLKQDLINGTSTTVETVTDKKTGEITQRTKYGTKVMAQWWLEHGVNRGVTKRSVMTLVYGSKEFGFRDQVLSDTIQPAIDNGKGDMFLNPNQAAGYMAKLIWNAVSGTVVAAVEAMNWLKSAAKLLAAEVKDPKTDTVLRGRCAVHWVTPDGFPVWQEYKKPIQTRLNLMFLGQFRLQPTINTNKDSEIDAHKQESGIAPNFVHSQDGNHLRMTVVWAHEKYGIESFALIHDSFGTIPADAANLFKAVRETMVSTYESCDVLADFYDQFADQLHESQLDKMPALPAKGNLNLRDILKSDFAFA

SEQ ID NO: 601 - DNA, 2670 bp, synthetic construct
  misc_feature 1..2670: note = Variant of RNA polymerase
  source 1..2670: mol_type = other DNA
atgcaccatcaccatcaccatatgaacacgattaacattgctaagaacgacttctctgacatcgaactggctgctatcccgttcaacactctggctgaccattacggtgagcgtttagctcgcgaacagttggcccttgagcatgagtcttacgagatgggtgaagcacgcttccgcaagatgtttgagcgtcaacttaaagctggtgaggttgcggataacgctgccgccaagcctctcatcactaccctactccctaagatgattgcacgcatcaacgactggtttgaggaagtgaaagctaagcgcggcaagcgcccgacagccttccagttcctgcaagaaatcaagccggaagccgtagcgtacatcaccattaagaccactctggcttgcctaaccagtgcggacaatacaaccgttcaggctgtagcaagcgcaatcggtcgggccattgaggacgaggctcgcttcggtcgtatccgtgaccttgaagctaagcacttcaagaaaaacgttgaggaacaactcaacaagcgcgtagggcacgtctacaaaaaagcatttatgcaagttgtcgaggctgacatgctctctaagggtctactcggtggcgaggcgtggtcttcgtggcataaggaagactctattcatgtaggagtacgctgcatcgagatgctcattgagtcaaccggaatggttagcttacaccgccaaaatgctggcgtagtaggtcaagactctgagactatcgaactcgcacctgaatacgctgaggctatcgcaacccgtgcaggtgcgctggctggcatctctccgatgttccaaccttgcgtagttcctcctaagccgtggactggcattactggtggtggctattgggctgcggggcgcaaacccctgcagttagtacgtactcgcagtctggcggcgcttcgccgctatgaagaagtgtcgatgccggaggtcatcaaagcagtcaacattgcgcagaatacagcatggcgtattaacaagaaagttctcgacgtagcgaataccatcacccaatggcagcactgtccagtcgcggatgtgcctgcgatggatcgtggcgaaatgccagctcgtccgttggacatcgataccaacgagattgcacttaaagcgtggaagaaagaagcttccgcgttctaccgcaaagacaaagcacgcgttagccgtcgtctgtcaatggagtttatgttatctcaggcgaacaagtttgcgaattataaagcaatctggtttccgcaaaacatggattggcgtgggcgcgtgtacgctgtcccgatgttcaatcctcagggcaacgatatgacgaaaggcctgctgacctttgcgcaggagaaacccattggtgaagacggcttctattggctcaagattcatggcgcaaatacagctggagtggataaagtaccgtttccacaacgcatcaaatttgttgaggataaccatacgaatattatggaatgcgcgaaagcaccgctggaaaacacttggtgggcggaacaggactcgccgttctgttttctggcgttctgctttgagtatgctggcgtcatcaatcatggtctgtcgtacaactgtagcttgcctctggcatttgatggtagttgctccggcctgcaacatttctcagcgatgttacgcgacgaaattggcgccaaagctgtgaatctcctcccatctgcggaataccaggatatttatcgtatcgtcagcgacaaagttaacgaggtactgaaacaagatctgattaacggtacctctaccaccgtggaaacggtgactgataagaagacaggcgaaattacccaacgcacgaaatacgggaccaaagttatggcacagtggtggttagaacacggtgtgaatcgtggcgtcacgaaacgctcggttatgactttggtgtatgggagcaaagagtttggattccgcgatcaagtgctgagtgacaccattcaaccggcgatcgataacggcaaaggtgacatgtttctgaatccgaatcaggctgctggttacatggcgaaactgatctggaacgcagtgtccgggaccgtagtcgcagcagttgaggcgatgaactggctgaaaagtgcggcgaaattacttgctgctgaagtgaaggatcctaagacggatacagttctgcgtggccgctgcgcagtacattgggtgactcccgacggcttccctgtgtggcaggaatacaagaagcctattcagacgcgcttgaacctgatgttcctcggtcagttccgcttacagcctaccattaacaccaacaaagatagcgagattgatgcacacaaacaggagtctggtatcgctcctaactttgtacacagccaagacggtaaccaccttcgtatgactgtagtgtgggcacacgagaagtacggaatcgaatcttttgcactgattcacgactccttcggtaccattccggctgacgctgcgaacctgttcaaagcagtgcgcgaaactatggtttcgacatatgagtcttgtgatgtactggctgatttctacgaccagttcgctgaccagttgcacgagtctcaattggacaaaatgccagcacttccggctaaaggtaacttgaacctccgtgacatcttaaaatcggacttcgcgttcgcg

SEQ ID NO: 602 - protein, 890 aa, synthetic construct
  REGION 1..890: note = Variant of RNA polymerase
MHHHHHHMNTINIAKNDFSDIELAAIPFNTLADHYGERLAREQLALEHESYEMGEARFRKMFERQLKAGEVADNAAAKPLITTLLPKMIARINDWFEEVKAKRGKRPTAFQFLQEIKPEAVAYITIKTTLACLTSADNTTVQAVASAIGRAIEDEARFGRIRDLEAKHFKKNVEEQLNKRVGHVYKKAFMQVVEADMLSKGLLGGEAWSSWHKEDSIHVGVRCIEMLIESTGMVSLHRQNAGVVGQDSETIELAPEYAEAIATRAGALAGISPMFQPCVVPPKPWTGITGGGYWAAGRKPLQLVRTRSLAALRRYEEVSMPEVIKAVNIAQNTAWRINKKVLDVANTITQWQHCPVADVPAMDRGEMPARPLDIDTNEIALKAWKKEASAFYRKDKARVSRRLSMEFMLSQANKFANYKAIWFPQNMDWRGRVYAVPMFNPQGNDMTKGLLTFAQEKPIGEDGFYWLKIHGANTAGVDKVPFPQRIKFVEDNHTNIMECAKAPLENTWWAEQDSPFCFLAFCFEYAGVINHGLSYNCSLPLAFDGSCSGLQHFSAMLRDEIGAKAVNLLPSAEYQDIYRIVSDKVNEVLKQDLINGTSTTVETVTDKKTGEITQRTKYGTKVMAQWWLEHGVNRGVTKRSVMTLVYGSKEFGFRDQVLSDTIQPAIDNGKGDMFLNPNQAAGYMAKLIWNAVSGTVVAAVEAMNWLKSAAKLLAAEVKDPKTDTVLRGRCAVHWVTPDGFPVWQEYKKPIQTRLNLMFLGQFRLQPTINTNKDSEIDAHKQESGIAPNFVHSQDGNHLRMTVVWAHEKYGIESFALIHDSFGTIPADAANLFKAVRETMVSTYESCDVLADFYDQFADQLHESQLDKMPALPAKGNLNLRDILKSDFAFA

SEQ ID NO: 603 - DNA, 2670 bp, synthetic construct
  misc_feature 1..2670: note = Variant of RNA polymerase
  source 1..2670: mol_type = other DNA
atgcaccatcaccatcaccatatgaacacgattaacattgctaagaacgacttctctgacatcgaactggctgctatcccgttcaacactctggctgaccattacggtgagcgtttagctcgcgaacagttggcccttgagcatgagtcttacgagatgggtgaagcacgcttccgcaagatgtttgagcgtcaacttaaagctggtgaggttgcggataacgctgccgccaagcctctcatcactaccctactccctaagatgattgcacgcatcaacgactggtttgaggaagtgaaagctaagcgcggcaagcgcccgacagccttccagttcctgcaagaaatcaagccggaagccgtagcgtacatcaccattaagaccactctggcttgcctaaccagtgcggacaatacaaccgttcaggctgtagcaagcgcaatcggtcgggccattgaggacgaggctcgcttcggtcgtatccgtgaccttgaagctaagcacttcaagaaaaacgttgaggaacaactcaacaagcgcgtagggcacgtctacaagaaagcatttatgcaagttgtcgaggctgacatgctctctaagggtctactcggtggcgaggcgtggtcttcgtggcataaggaagactctattcatgtaggagtacgctgcatcgagatgctcattgagtcaaccggaatggttagcttacaccgccaaaatgctggcgtagtaggtcaagactctgagactatcgaactcgcacctgaatacgctgaggctatcgcaacccgtgcaggtgcgctggctggcatctctccgatgttccaaccttgcgtagttcctcctaagccgtggactggcattactggtggtggctattgggctgcggggcgcaaacccctgcagttagtacgtactcgcagtctggcggcgcttcgccgctatgaagaagtgtcgatgccggaggtcatcaaagcagtcaacattgcgcagaatacagcatggcgtattaacaagaaagttctcgacgtagcgaatgcaatcacccaatggcagcactgtccagtcgcggatgtgcctgcgatggatcgtggcgaaatgccagctcgtccgttggacatcgataccaacgagattgcacttaaagcgtggaagaaagaagcttccgcgttctaccgcaaagacaaagcacgcgttagccgtcgtctgtcaatggagtttatgttatctcaggcgaacaagtttgcgaattataaagcaatctggtttccgcaaaacatggattggcgtgggcgcgtgtacgctgtcccgatgttcaatcctcagggcaacgatatgacgaaaggcctgctgacctttgcgcaggagaaacccattggtgaagacggcttctattggctcaagattcatggcgcaaatacagctggagtggataaagtaccgtttccacaacgcatcaaatttgttgaggataaccatacgaatattatggaatgcgcgaaagcaccgctggaaaacacttggtgggcggaacaggactcgccgttctgttttctggcgttctgctttgagtatgctggcgtcatcaatcacggtctgtcgtacaactgtagcttgcctctggcatttgatggtagttgctccggcattcaacatttctcagcgatgttacgcgacgaaattggcggcaaagctgtgaatctcctcccatctgcggaataccaggatatttatcgtatcgtcagcgacaaagttaacgaggtactgaaacaagatctgattaacggtacctctaccaccgtggaaacggtgactgataagaagacaggcgaaattacccaacgcacgaaatacgggaccaaagaaatggcacagtggtggttagaacacggtgtgaatcgtggcgtcacgaaacgctcggttatgactttggtgtatgggagcaaagagtttggattccgcgatcaagtgctgagtgacaccattcaaccggcgatcgataacggcaaaggtgacatgtttctgaatccgaatcaggctgctggttacatggcgaaactgatctggaacgcagtgtccgggaccgtagtcgcagcagttgaggcgatgaactggctgaaaagtgcggcgaaattacttgctgctgaagtgaaggatcctaagacggatacagttctgcgtggccgctgcgcagtacattgggtgactcccgacggcttccctgtgtggcaggaatacaagaagcctattcagacgcgcttgaacctgatgttcctcggtcagttccgcttacagcctaccattaacaccaacaaagatagcgagattgatgcacacaaacaggagtctggtatcgctcctaactttgtacacagccaagacggtaaccaccttcgtatgactgtagtgtgggcacacgagaagtacggaatcgaatcttttgcactgattcacgactccttcggtaccattccggctgacgctgcgaacctgttcaaagcagtgcgcgaaactatggttagcacatatgagtcttgtgatgtactggctgatttctacgaccagttcgctgaccagttgcacgagtctcaattggacaaaatgccagcacttccggctaaaggtaacttgaacctccgtgacatcttaaaatcggacttcgcgttcgcg

SEQ ID NO: 604 - protein, 890 aa, synthetic construct
  REGION 1..890: note = Variant of RNA polymerase
MHHHHHHMNTINIAKNDFSDIELAAIPFNTLADHYGERLAREQLALEHESYEMGEARFRKMFERQLKAGEVADNAAAKPLITTLLPKMIARINDWFEEVKAKRGKRPTAFQFLQEIKPEAVAYITIKTTLACLTSADNTTVQAVASAIGRAIEDEARFGRIRDLEAKHFKKNVEEQLNKRVGHVYKKAFMQVVEADMLSKGLLGGEAWSSWHKEDSIHVGVRCIEMLIESTGMVSLHRQNAGVVGQDSETIELAPEYAEAIATRAGALAGISPMFQPCVVPPKPWTGITGGGYWAAGRKPLQLVRTRSLAALRRYEEVSMPEVIKAVNIAQNTAWRINKKVLDVANAITQWQHCPVADVPAMDRGEMPARPLDIDTNEIALKAWKKEASAFYRKDKARVSRRLSMEFMLSQANKFANYKAIWFPQNMDWRGRVYAVPMFNPQGNDMTKGLLTFAQEKPIGEDGFYWLKIHGANTAGVDKVPFPQRIKFVEDNHTNIMECAKAPLENTWWAEQDSPFCFLAFCFEYAGVINHGLSYNCSLPLAFDGSCSGIQHFSAMLRDEIGGKAVNLLPSAEYQDIYRIVSDKVNEVLKQDLINGTSTTVETVTDKKTGEITQRTKYGTKEMAQWWLEHGVNRGVTKRSVMTLVYGSKEFGFRDQVLSDTIQPAIDNGKGDMFLNPNQAAGYMAKLIWNAVSGTVVAAVEAMNWLKSAAKLLAAEVKDPKTDTVLRGRCAVHWVTPDGFPVWQEYKKPIQTRLNLMFLGQFRLQPTINTNKDSEIDAHKQESGIAPNFVHSQDGNHLRMTVVWAHEKYGIESFALIHDSFGTIPADAANLFKAVRETMVSTYESCDVLADFYDQFADQLHESQLDKMPALPAKGNLNLRDILKSDFAFA

SEQ ID NO: 605 - DNA, 2670 bp, synthetic construct
  misc_feature 1..2670: note = Variant of RNA polymerase
  source 1..2670: mol_type = other DNA
atgcaccatcaccatcaccatatgaacacgattaacattgctaagaacgacttctctgacatcgaactggctgctatcccgttcaacactctggctgaccattacggtgagcgtttagctcgcgaacagttggcccttgagcatgagtcttacgagatgggtgaagcacgcttccgcaagatgtttgagcgtcaacttaaagctggtgaggttgcggataacgctgccgccaagcctctcatcactaccctactccctaagatgattgcacgcatcaacgactggtttgaggaagtgaaagctaagcgcggcaaacgcccgacagccttccagttcctgcaagaaatcaagccggaagccgtagcgtacatcaccattaagaccactctggcttgcctaaccagtgcggacaatacaaccgttcaggctgtagcaagcgcaatcggtcgggccattgaggacgaggctcgcttcggtcgtatccgtgaccttgaagctaagcacttcaagaaaaacgttgaggaacaactcaacaagcgcgtagggcacgtctacaagaaagcatttatgcaagttgtcgaggctgacatgctctctaagggtctactcggtggcgaggcgtggtcttcgtggcataaggaagactctattcatgtaggagtacgctgcatcgagatgctcattgagtcaaccggaatggttagcttacaccgccaaaatgctggcgtagtaggtcaagactctgagactatcgaactcgcacctgaatacgctgaggctatcgcaacccgtgcaggtgcgctggctggcatctctccgatgttccaaccttgcgtagttcctcctaagccgtggactggcattactggtggtggctattgggctgcggggcgcaaacccctgcagttagtacgtactcgcagtctggcggcgcttcgccgctatgaagaagtgtcgatgccggaggtcatcaaagcagtcaacattgcgcagaatacagcatggcgtattaacaagaaagttctcgacgtagcgaatgcaatcacccaatggcagcactgtccagtcgcggatgtgcctgcgatggatcgtggcgaaatgccagctcgtccgttggacatcgataccaacgagattgcacttaaagcgtggaagaaagaagcttccgcgttctaccgcaaagacaaagcacgcgttagccgtcgtctgtcaatggagtttatgttatctcaggcgaacaagtttgcgaattataaagcaatctggtttccgcaaaacatggattggcgtgggcgcgtgtacgctgtcccgatgttcaatcctcagggcaacgatatgacgaaaggcctgctgacctttgcgcaggagaaacccattggtgaagacggcttctattggctcaagattcatggcgcaaatacagctggagtggataaagtaccgtttccacaacgcatcaaatttgttgaggataaccatacgaatattatggaatgcgcgaaagcaccgctggaaaacacttggtgggcggaacaggactcgccgttctgttttctggcgttctgctttgagtatgctggcgtcatcaatcacggtctgtcgtacaactgtagcttgcctcaggcatttgatggtagttgctccggcattcaacatttctcagcgatgttacgcgacgaaattggcggcaaagctgtgaatctcctcccatctgcggaataccaggatatttatcgtatcgtcagcgacaaagttaacgaggtactgaaacaagatctgattaacggtacctctaccaccgtggaaacggtgactgataagaagacaggcgaaattacccaacgcacgaaatacgggaccaaagttatggcacagtggtggttagaacacggtgtgaatcgtggcgtcacgaaacgctcggttatgactttggtgtatgggagcaaagagtttggattccgcgatcaagtgctgagtgacaccattcaaccggcgatcgataacggcaaaggtgacatgtttctgaatccgaatcaggctgctggttacatggcgaaactgatctggaacgcagtgtccgggaccgtagtcgcagcagttgaggcgatgaactggctgaaaagtgcggcgaaattacttgctgctgaagtgaaggatccaaagacgggcacagttctgcgtggccgctgcgcagtacattgggtgactcccgacggcttccctgtgtggcaggaatacaagaagcctattcagacgcgcttgaacctgatgttcctcggtcagttccgcttacagcctaccattaacaccaacaaagatagcgagattgatgcacacaaacaggagtctggtatcgctcctaactttgtacacagccaagacggtaaccaccttcgtatgactgtagtgtgggcacacgagaagtacggaatcgaatcttttgcactgattcacgactccttcggtaccattccggctgacgctgcgaacctgttcaaagcagtgcgcgaaactatggttagcacatatgagtcttgtgatgtactggctgatttctacgaccagttcgctgaccagttgcacgagtctcaattggacaaaatgccagcacttccggctaaaggtaacttgaacctccgtgacatcttaaaatcggacttcgcgttcgcg

SEQ ID NO: 606 - protein, 890 aa, synthetic construct
  REGION 1..890: note = Variant of RNA polymerase
MHHHHHHMNTINIAKNDFSDIELAAIPFNTLADHYGERLAREQLALEHESYEMGEARFRKMFERQLKAGEVADNAAAKPLITTLLPKMIARINDWFEEVKAKRGKRPTAFQFLQEIKPEAVAYITIKTTLACLTSADNTTVQAVASAIGRAIEDEARFGRIRDLEAKHFKKNVEEQLNKRVGHVYKKAFMQVVEADMLSKGLLGGEAWSSWHKEDSIHVGVRCIEMLIESTGMVSLHRQNAGVVGQDSETIELAPEYAEAIATRAGALAGISPMFQPCVVPPKPWTGITGGGYWAAGRKPLQLVRTRSLAALRRYEEVSMPEVIKAVNIAQNTAWRINKKVLDVANAITQWQHCPVADVPAMDRGEMPARPLDIDTNEIALKAWKKEASAFYRKDKARVSRRLSMEFMLSQANKFANYKAIWFPQNMDWRGRVYAVPMFNPQGNDMTKGLLTFAQEKPIGEDGFYWLKIHGANTAGVDKVPFPQRIKFVEDNHTNIMECAKAPLENTWWAEQDSPFCFLAFCFEYAGVINHGLSYNCSLPQAFDGSCSGIQHFSAMLRDEIGGKAVNLLPSAEYQDIYRIVSDKVNEVLKQDLINGTSTTVETVTDKKTGEITQRTKYGTKVMAQWWLEHGVNRGVTKRSVMTLVYGSKEFGFRDQVLSDTIQPAIDNGKGDMFLNPNQAAGYMAKLIWNAVSGTVVAAVEAMNWLKSAAKLLAAEVKDPKTGTVLRGRCAVHWVTPDGFPVWQEYKKPIQTRLNLMFLGQFRLQPTINTNKDSEIDAHKQESGIAPNFVHSQDGNHLRMTVVWAHEKYGIESFALIHDSFGTIPADAANLFKAVRETMVSTYESCDVLADFYDQFADQLHESQLDKMPALPAKGNLNLRDILKSDFAFA

SEQ ID NO: 607 - DNA, 2670 bp, synthetic construct
  misc_feature 1..2670: note = Variant of RNA polymerase
  source 1..2670: mol_type = other DNA
atgcaccatcaccatcaccatatgaacacgattaacattgctaagaacgacttctctgacatcgaactggctgctatcccgttcaacactctggctgaccattacggtgagcgtttagctcgcgaacagttggcccttgagcatgagtcttacgagatgggtgaagcacgcttccgcaagatgtttgagcgtcaacttaaagctggtgaggttgcggataacgctgccgccaagcctctcatcactaccctactccctaagatgattgcacgcatcaacgactggtttgaggaagtgaaagctaagcgcggcaagcgcccgacagccttccagttcctgcaagaaatcaagccggaagccgtagcgtacatcaccattaagaccactctggcttgcctaaccagtgcggacaatacaaccgttcaggctgtagcaagcgcaatcggtcgggccattgaggacgaggctcgcttcggtcgtatccgtgaccttgaagctaagcacttcaagaaaaacgttgaggaacaactcaacaagcgcgtagggcacgtctacaagaaagcatttatgcaagttgtcgaggctgacatgctctctaagggtctactcggtggcgaggcgtggtcttcgtggcataaggaagactctattcatgtaggagtacgctgcatcgagatgctcattgagtcaaccggaatggttagcttacaccgccaaaatgctggcgtagtaggtcaagactctgagactatcgaactcgcacctgaatacgctgaggctatcgcaacccgtgcaggtgcgctggctggcatctctccgatgttccaaccttgcgtagttcctcctaagccgtggactggcattactggtggtggctattgggctgcggggcgcaaacccctgcagttagtacgtactcgcagtctggcggcgcttcgccgctatgaagaagtgtcgatgccggaggtcatcaaagcagtcaacattgcgcagaatacagcatggcgtattaacaagaaagttctcgacgtagcgaatgcaatcacccaatggcagcactgtccagtcgcggatgtgcctgcgatggatcgtggcgaaatgccagctcgtccgttggacatcgataccaacgagattgcacttaaagcgtggaagaaagaagcttccgcgttctaccgcaaagacaaagcacgcgttagccgtcgtctgtcaatggagtttatgttatctcaggcgaacaagtttgcgaattataacgcaatctggtttccgcaaaacatggattggcgtgggcgcgtgtacgctgtcccgatgttcaatcctcagggcaacgatatgacgaaaggcctgctgacctttgcgcaggagaaacccattggtgaagacggcttctattggctcaagattcatggcgcaaatacagctggagtggataaagtaccgtttccacaacgcatcaaatttgttgaggataaccatacgaatattatggaatgcgcgaaagcaccgctggaaaacacttggtgggcggaacaggactcgccgttctgttttctggcgttctgctttgagtatgctggcgtcatcaatcacggtctgtcgtacaactgtagcttgcctcaggcatttgatggtagttgctccggcattcaacatttctcagcgatgttacgcgacgaaattggcggcaaagctgtgaatctcctcccatctgcggaataccaggatatttatcgtatcgtcagcgacaaagttaacgaggtactgaaacaagatctgattaacggtacctctaccaccgtggaaacggtgactgataagaagacaggcgaaattacccaacgcacgaaatacgggaccaaagtaatggcacagtggtggttagaacacggtgtgaatcgtggcgtcacgaaacgctcggttatgactttggtgtatgggagcaaagagtttggattccgcgatcaagtgctgagtgacaccattcaaccggcgatcgataacggcaaaggtgacatgtttctgaatccgaatcaggctgctggttacatggcgaaactgatctggaacgcagtgtccgggaccgtagtcgcagcagttgaggcgatgaactggctgaaaagtgcggcgaaattacttgctgctgaagtgaaggatcctaagacggatacagttctgcgtggccgctgcgcagtacattgggtgactcccgacggcttccctgtgtggcaggaatacaagaagcctattcagacgcgcttgaacctgatgttcctcggtcagttccgcttacagcctaccattaacaccaacaaagatagcgagattgatgcacacaaacaggagtctggtatcgctcctaactttgtacacagccaagacggtaaccaccttcgtatgactgtagtgtgggcacacgagaagtacggaatcgaatcttttgcactgattcacgactccttcggtaccattccggctgacgctgcgaacctgttcaaagcagtgcgcgaaactttcgttgacacatatgagtcttgtgatgtactggctgatttctacgaccagttcgctgaccagttgcacgagtctcaattggacaaaatgccagcacttccggctaaaggtaacttgaacctccgtgacatcttaaaatcggacttcgcgttcgcg

SEQ ID NO: 608 - protein, 890 aa, synthetic construct
  REGION 1..890: note = Variant of RNA polymerase
MHHHHHHMNTINIAKNDFSDIELAAIPFNTLADHYGERLAREQLALEHESYEMGEARFRKMFERQLKAGEVADNAAAKPLITTLLPKMIARINDWFEEVKAKRGKRPTAFQFLQEIKPEAVAYITIKTTLACLTSADNTTVQAVASAIGRAIEDEARFGRIRDLEAKHFKKNVEEQLNKRVGHVYKKAFMQVVEADMLSKGLLGGEAWSSWHKEDSIHVGVRCIEMLIESTGMVSLHRQNAGVVGQDSETIELAPEYAEAIATRAGALAGISPMFQPCVVPPKPWTGITGGGYWAAGRKPLQLVRTRSLAALRRYEEVSMPEVIKAVNIAQNTAWRINKKVLDVANAITQWQHCPVADVPAMDRGEMPARPLDIDTNEIALKAWKKEASAFYRKDKARVSRRLSMEFMLSQANKFANYNAIWFPQNMDWRGRVYAVPMFNPQGNDMTKGLLTFAQEKPIGEDGFYWLKIHGANTAGVDKVPFPQRIKFVEDNHTNIMECAKAPLENTWWAEQDSPFCFLAFCFEYAGVINHGLSYNCSLPQAFDGSCSGIQHFSAMLRDEIGGKAVNLLPSAEYQDIYRIVSDKVNEVLKQDLINGTSTTVETVTDKKTGEITQRTKYGTKVMAQWWLEHGVNRGVTKRSVMTLVYGSKEFGFRDQVLSDTIQPAIDNGKGDMFLNPNQAAGYMAKLIWNAVSGTVVAAVEAMNWLKSAAKLLAAEVKDPKTDTVLRGRCAVHWVTPDGFPVWQEYKKPIQTRLNLMFLGQFRLQPTINTNKDSEIDAHKQESGIAPNFVHSQDGNHLRMTVVWAHEKYGIESFALIHDSFGTIPADAANLFKAVRETFVDTYESCDVLADFYDQFADQLHESQLDKMPALPAKGNLNLRDILKSDFAFA

SEQ ID NO: 609 - DNA, 2670 bp, synthetic construct
  misc_feature 1..2670: note = Variant of RNA polymerase
  source 1..2670: mol_type = other DNA
atgcaccatcaccatcaccatatgaacacgattaacattgctaagaacgacttctctgacatcgaactggctgctatcccgttcaacactctggctgaccattacggtgagcgtttagctcgcgaacagttggcccttgagcatgagtcttacgagatgggtgaagcacgcttccgcaagatgtttgagcgtcaacttaaagctggtgaggttgcggataacgctgccgccaagcctctcatcactaccctactccctaagatgattgcacgcatcaacgactggtttgaggaagtgaaagctaagcgcggcaagcgcccgacagccttccagttcctgcaagaaatcaagccggaagccgtagcgtacatcaccattaagaccactctggcttgcctaaccagtgcggacaatacaaccgttcaggctgtagcaagcgcaatcggtcgggccattgaggacgaggctcgcttcggtcgtatccgtgaccttgaagctaagcacttcaagggcaacgttgaggaacaactcaacaagcgcgtagggcacgtctacaaaaaagcatttatgcaagttgtcgaggctgacatgctctctaagggtctactcggtggcgaggcgtggtcttcgtggcataaggaagactctattcatgtaggagtacgctgcatcgagatgctcattgagtcaaccggaatggttagcttacaccgccaaaatgctggcgtagtaggtcaagactctgagactatcgaactcgcacctgaatacgctgaggctatcgcaacccgtgcaggtgcgctggctggcatctctccgatgttccaaccttgcgtagttcctcctaagccgtggactggcattactggtggtggctattgggctgcggggcgcaaacccctgcagttagtacgtactcgcagtctggcggcgcttcgccgctatgaagaagtgtcgatgccggaggtcatcaaagcagtcaacattgcgcagaatacagcatggcgtattaacaagaaagttctcgacgtagcgaatgcaatcacccaatggcagcactgtccagtcgcggatgtgcctgcgatggatcgtggcgaaatgccagctcgtccgttggacatcgataccaacgagattgcacttaaagcgtggaagaaagaagcttccgcgttctaccgcaaagacaaagcacgcgttagccgtcgtctgtcaatggagtttatgttatctcaggcgaacaagtttgcgaatgagaaagcaatctggtttccgcaaaacatggattggcgtgggcgcgtgtacgctgtcccgatgttcaatcctcagggcaacgatatgacgaaaggcctgctgacctttgcgcaggagaaacccattggtgaagacggcttctattggctcaagattcatggcgcaaatacagctggagtggataaagtaccgtttccacaacgcatcaaatttgttgaggataaccatacgaatattatggaatgcgcgaaagcaccgctggaaaacacttggtgggcggaacaggactcgccgttctgttttctggcgttctgctttgagtatgctggcgtcatcaatagtggtctgtcgtacaactgtagcttgcctctggcatttgatggtagttgctccggcctgcaacatttctcagcgatgttacgcgacgaaattggcggcaaagctgtgaatctcctcccatctgcggaataccaggatatttatcgtatcgtcagcgacaaagttaacgaggtgctgaaacaagatctgattaacggtacctctaccaccgtggaaacggtgactgataagaagacaggcgaaattacccaacgcacgaaatacgggaccaaagttatggcacagtggtggttagaacacggtgtgaatcgtggcgtcacgaaacgctcggttatgactttggtgtatgggagcaaagagtttggattccgcgatcaagtgctgagtgacaccattcaaccggcgatcgataacggcaaaggtgacatgtttctgaatccgaatcaggctgctggttacatggcgaaactgatctggaacgcagtgtccgggaccgtagtcgcagcagttgaggcgatgaactggctgaaaagtgcggcgaaattacttgctgctgaagtgaaggatcctaagacggatacagttctgcgtggccgctgcgcagtacattgggtgactcccgacggcttccctgtgtggcaggaatacaagaagcctattcagacgcgcttgaacctgatgttcctcggtcagttccgcttacagcctaccattaacaccaacaaagatagcgagattgatgcacacaaacaggagtctggtatcgctcctaactttgtacacagccaagacggtaaccaccttcgtatgactgtagtgtgggcacacgagaagtacggaatcgaatcttttgcactgattcacgactccttcggtaccattccggctgacgctgcgaacctgttcaaagcagtgcgcgaaactatggtttcgacatatgagtcttgtgatgtactggctgatttctacgaccagttcgctgaccagttgcacgagtctcaattggacaaaatgccagcacttccggctaaaggtaacttgaacctccgtgacatcttaaaatcggacttcgcgttcgcg

SEQ ID NO: 610 - protein, 890 aa, synthetic construct
  REGION 1..890: note = Variant of RNA polymerase
MHHHHHHMNTINIAKNDFSDIELAAIPFNTLADHYGERLAREQLALEHESYEMGEARFRKMFERQLKAGEVADNAAAKPLITTLLPKMIARINDWFEEVKAKRGKRPTAFQFLQEIKPEAVAYITIKTTLACLTSADNTTVQAVASAIGRAIEDEARFGRIRDLEAKHFKGNVEEQLNKRVGHVYKKAFMQVVEADMLSKGLLGGEAWSSWHKEDSIHVGVRCIEMLIESTGMVSLHRQNAGVVGQDSETIELAPEYAEAIATRAGALAGISPMFQPCVVPPKPWTGITGGGYWAAGRKPLQLVRTRSLAALRRYEEVSMPEVIKAVNIAQNTAWRINKKVLDVANAITQWQHCPVADVPAMDRGEMPARPLDIDTNEIALKAWKKEASAFYRKDKARVSRRLSMEFMLSQANKFANEKAIWFPQNMDWRGRVYAVPMFNPQGNDMTKGLLTFAQEKPIGEDGFYWLKIHGANTAGVDKVPFPQRIKFVEDNHTNIMECAKAPLENTWWAEQDSPFCFLAFCFEYAGVINSGLSYNCSLPLAFDGSCSGLQHFSAMLRDEIGGKAVNLLPSAEYQDIYRIVSDKVNEVLKQDLINGTSTTVETVTDKKTGEITQRTKYGTKVMAQWWLEHGVNRGVTKRSVMTLVYGSKEFGFRDQVLSDTIQPAIDNGKGDMFLNPNQAAGYMAKLIWNAVSGTVVAAVEAMNWLKSAAKLLAAEVKDPKTDTVLRGRCAVHWVTPDGFPVWQEYKKPIQTRLNLMFLGQFRLQPTINTNKDSEIDAHKQESGIAPNFVHSQDGNHLRMTVVWAHEKYGIESFALIHDSFGTIPADAANLFKAVRETMVSTYESCDVLADFYDQFADQLHESQLDKMPALPAKGNLNLRDILKSDFAFA

SEQ ID NO: 611 - DNA, 2670 bp, synthetic construct
  misc_feature 1..2670: note = Variant of RNA polymerase
  source 1..2670: mol_type = other DNA
atgcaccatcaccatcaccatatgaacacgattaacattgctaagaacgacttctctgacatcgaactggctgctatcccgttcaacactctggctgaccattacggtgagcgtttagctcgcgaacagttggcccttgagcatgagtcttacgagatgggtgaagcacgcttccgcaagatgtttgagcgtcaacttaaagctggtgaggttgcggataacgctgccgccaagcctctcatcactaccctactccctaagatgattgcacgcatcaacgactggtttgaggaagtgaaagctaagcgcggcaagcgcccgacagccttccagttcctgcaagaaatcaagccggaagccgtagcgtacatcaccattaagaccactctggcttgcctaaccagtgcggacaatacaaccgttcaggctgtagcaagcgcaatcggtcgggccattgaggacgaggctcgcttcggtcgtatccgtgaccttgaagctaagcacttcaagggcaacgttgaggaacaactcaacaagcgcgtagggcacgtctacaagaaagcatttatgcaagttgtcgaggctgacatgctctctaagggtctactcggtggcgaggcgtggtcttcgtggcataaggaagactctattcatgtaggagtacgctgcatcgagatgctcattgagtcaaccggaatggttagcttacaccgccaaaatgctggcgtagtaggtcaagactctgagactatcgaactcgcacctgaatacgctgaggctatcgcaacccgtgcaggtgcgctggctggcatctctccgatgttccaaccttgcgtagttcctcctaagccgtggactggcattactggtggtggctattgggctgcggggcgcaaacccctgcagttagtacgtactcgcagtctggcggcgcttcgccgctatgaagaagtgtcgatgccggaggtcatcaaagcagtcaacattgcgcagaatacagcatggcgtattaacaagaaagttctcgacgtagcgaatgcaatcacccaatggcagcactgtccagtcgcggatgtgcctgcgatggatcgtggcgaaatgccagctcgtccgttggacatcgataccaacgagattgcacttaaagcgtggaagaaagaagcttccgcgttctaccgcaaagacaaagcacgcgttagccgtcgtctgtcaatggagtttatgttatctcaggcgaacaagtttgcgaattataaagcaatctggtttccgcaaaacatggattggcgtgggcgcgtgtacgctgtcccgatgttcaatcctcagggcaacgatatgacgaaaggcctgctgacctttgcgcaggagaaacccattggtgaagacggcttctattggctcaagattcatggcgcaaatacagctggagtggataaagtaccgtttccacaacgcatcaaatttgttgaggataaccatacgaatattatggaatgcgcgaaagcaccgctggaaaacacttggtgggcggaacaggactcgccgttctgttttctggcgttctgctttgagtatgctggcgtcatcaatagtggtctgtcgtacaactgtagcttgcctctggcatttgatggtagttgctccggcatccaacatttctcagcgatgttacgcgacgaaattggcggcaaagctgtgaatctcctcccatctgcggaataccaggatatttatcgtatcgtcagcgacaaagttaacgaggcgctgaaacaagatctgattaacggtacctctaccaccgtggaaacggtgactgataagaagacaggcgaaattacccaacgcacgaaatacgggaccaaagttatggcacagtggtggttagaacacggtgtgaatcgtggcgtcacgaaacgctcggttatgactttggtgtatgggagcaaagagtttggattccgcgatcaagtgctgagtgacaccattcaaccggcgatcgataacggcaaaggtgacatgtttctgaatccgaatcaggctgctggttacatggcgaaactgatctggaacgcagtgtccgggaccgtagtcgcagcagttgaggcgatgaactggctgaaaagtgcggcgaaattacttgctgctgaagtgaaggatcctaagacggatacagttctgcgtggccgctgcgcagtacattgggtgactcccgacggcttccctgtgtggcaggaatacaagaagcctattcagacgcgcttgaacctgatgttcctcggtcagttccgcttacagcctaccattaacaccaacaaagatagcgagattgatgcacacaaacaggagtctggtatcgctcctaactttgtacacagccaagacggtaaccaccttcgtatgactgtagtgtgggcacacgagaagtacggaatcgaatcttttgcactgattcacgactccttcggtaccattccggctgacgctgcgaacctgttcaaagcagtgcgcgaaactatggtttcgacatatgagtcttgtgatgtactggctgatttctacgaccagttcgctgaccagttgcacgagtctcaattggacaaaatgccagcacttccggctaaaggtaacttgaacctccgtgacatcttaaaatcggacttcgcgttcgcg

SEQ ID NO: 612 - protein, 890 aa, synthetic construct
  REGION 1..890: note = Variant of RNA polymerase
MHHHHHHMNTINIAKNDFSDIELAAIPFNTLADHYGERLAREQLALEHESYEMGEARFRKMFERQLKAGEVADNAAAKPLITTLLPKMIARINDWFEEVKAKRGKRPTAFQFLQEIKPEAVAYITIKTTLACLTSADNTTVQAVASAIGRAIEDEARFGRIRDLEAKHFKGNVEEQLNKRVGHVYKKAFMQVVEADMLSKGLLGGEAWSSWHKEDSIHVGVRCIEMLIESTGMVSLHRQNAGVVGQDSETIELAPEYAEAIATRAGALAGISPMFQPCVVPPKPWTGITGGGYWAAGRKPLQLVRTRSLAALRRYEEVSMPEVIKAVNIAQNTAWRINKKVLDVANAITQWQHCPVADVPAMDRGEMPARPLDIDTNEIALKAWKKEASAFYRKDKARVSRRLSMEFMLSQANKFANYKAIWFPQNMDWRGRVYAVPMFNPQGNDMTKGLLTFAQEKPIGEDGFYWLKIHGANTAGVDKVPFPQRIKFVEDNHTNIMECAKAPLENTWWAEQDSPFCFLAFCFEYAGVINSGLSYNCSLPLAFDGSCSGIQHFSAMLRDEIGGKAVNLLPSAEYQDIYRIVSDKVNEALKQDLINGTSTTVETVTDKKTGEITQRTKYGTKVMAQWWLEHGVNRGVTKRSVMTLVYGSKEFGFRDQVLSDTIQPAIDNGKGDMFLNPNQAAGYMAKLIWNAVSGTVVAAVEAMNWLKSAAKLLAAEVKDPKTDTVLRGRCAVHWVTPDGFPVWQEYKKPIQTRLNLMFLGQFRLQPTINTNKDSEIDAHKQESGIAPNFVHSQDGNHLRMTVVWAHEKYGIESFALIHDSFGTIPADAANLFKAVRETMVSTYESCDVLADFYDQFADQLHESQLDKMPALPAKGNLNLRDILKSDFAFA

SEQ ID NO: 613 - DNA, 2670 bp, synthetic construct
  misc_feature 1..2670: note = Variant of RNA polymerase
  source 1..2670: mol_type = other DNA
atgcaccatcaccatcaccatatgaacacgattaacattgctaagaacgacttctctgacatcgaactggctgctatcccgttcaacactctggctgaccattacggtgagcgtttagctcgcgaacagttggcccttgagcatgagtcttacgagatgggtgaagcacgcttccgcaagatgtttgagcgtcaacttaaagctggtgaggttgcggataacgctgccgccaagcctctcatcactaccctactccctaagatgattgcacgcatcaacgactggtttgaggaagtgaaagctaagcgcggcaagcgcccgacagccttccagttcctgcaagaaatcaagccggaagccgtagcgtacatcaccattaagaccactctggcttgcctaaccagtgcggacaatacaaccgttcaggctgtagcaagcgcaatcggtcgggccattgaggacgaggctcgcttcggtcgtatccgtgaccttgaagctaagcacttcaagaagaacgttgaggaacaactcaacaagcgcgtagggcacgtctaccaaaaagcatttatgcaagttgtcgaggctgacatgctctctaagggtctactcggtggcgaggcgtggtcttcgtggcataaggaagactctattcatgtaggagtacgctgcatcgagatgctcattgagtcaaccggaatggttagcttacaccgccaaaatgctggcgtagtaggtcaagactctgagactatcgaactcgcacctgaatacgctgaggctatcgcaacccgtgcaggtgcgctggctggcatctctccgatgttccaaccttgcgtagttcctcctaagccgtggactggcattactggtggtggctattgggctgcggggcgcaaacccctgcagttagtacgtactcgcagtctggcggcgcttcgccgctatgaagaagtgtcgatgccggaggtcatcaaagcagtcaacattgcgcagaatacagcatggcgtattaacaagaaagttctcgacgtagcgaataccatcacccaatggcagcactgtccagtcgcggatgtgcctgcgatggatcgtggcgaaatgccagctcgtccgttggacatcgataccaacgagattgcacttaaagcgtggaagaaagaagcttccgcgttctaccgcaaagacaaagcacgcgttagccgtcgtctgtcaatggagtttatgttatctcaggcgaacaagtttgcgaattataaagcaatctggtttccgcaaaacatggattggcgtgggcgcgtgtacgctgtcccgatgttcaatcctcagggcaacgatatgacgaaaggcctgctgacctttgcgcaggagaaacccattggtgaagacggcttctattggctcaagattcatggcgcaaatacagctggagtggataaagtaccgtttccacaacgcatcaaatttgttgaggataaccatacgaatattatggaatgcgcgaaagcaccgctggaaaacacttggtgggcggaacaggactcgccgttctgttttctggcgttctgctttgagtatgctggcgtcatcaatcatggtctgtcgtacaactgtagcttgcctctggcatttgatggtagttgctccggcatccaacatttctcagcgatgttacgcgacgaaattggcggcaaagctgtgaatctcctcccatctgcggaataccaggatatttatcgtatcgtcagcgacaaagttaacgagatgctgaaacaagatctgattaacggtacctctaccaccgtggaaacggtgactgataagaagacaggcgaaattacccaacgcacgaaatacgggaccaaagttatggcacagtggtggttagaacacggtgtgaatcgtggcgtcacgaaacgctcggttatgactttggtgtatgggagcaaagagtttggattccgcgatcaagtgctgagtgacaccattcaaccggcgatcgataacggcaaaggtgacatgtttctgaatccgaatcaggctgctggttacatggcgaaactgatctggaacgcagtgtccgggaccgtagtcgcagcagttgaggcgatgaactggctgaaaagtgcggcgaaattacttgctgctgaagtgaaggatcctaagacggatacagttctgcgtggccgctgcgcagtacattgggtgactcccgacggcttccctgtgtggcaggaatacaagaagcctattcagacgcgcttgaacctgatgttcctcggtcagttccgcttacagcctaccattaacaccaacaaagatagcgagattgatgcacacaaacaggagtctggtatcgctcctaactttgtacacagccaagacggtaaccaccttcgtatgactgtagtgtgggcacacgagaagtacggaatcgaatcttttgcactgattcacgactccttcggtaccattccggctgacgctgcgaacctgttcaaagcagtgcgcgaaactatggtttcgacatatgagtcttgtgatgtactggctgatttctacgaccagttcgctgaccagttgcacgagtctcaattggacaaaatgccagcacttccggctaaaggtaacttgaacctccgtgacatcttaaaatcggacttcgcgttcgcg

SEQ ID NO: 614 - protein, 890 aa, synthetic construct
  REGION 1..890: note = Variant of RNA polymerase
MHHHHHHMNTINIAKNDFSDIELAAIPFNTLADHYGERLAREQLALEHESYEMGEARFRKMFERQLKAGEVADNAAAKPLITTLLPKMIARINDWFEEVKAKRGKRPTAFQFLQEIKPEAVAYITIKTTLACLTSADNTTVQAVASAIGRAIEDEARFGRIRDLEAKHFKKNVEEQLNKRVGHVYQKAFMQVVEADMLSKGLLGGEAWSSWHKEDSIHVGVRCIEMLIESTGMVSLHRQNAGVVGQDSETIELAPEYAEAIATRAGALAGISPMFQPCVVPPKPWTGITGGGYWAAGRKPLQLVRTRSLAALRRYEEVSMPEVIKAVNIAQNTAWRINKKVLDVANTITQWQHCPVADVPAMDRGEMPARPLDIDTNEIALKAWKKEASAFYRKDKARVSRRLSMEFMLSQANKFANYKAIWFPQNMDWRGRVYAVPMFNPQGNDMTKGLLTFAQEKPIGEDGFYWLKIHGANTAGVDKVPFPQRIKFVEDNHTNIMECAKAPLENTWWAEQDSPFCFLAFCFEYAGVINHGLSYNCSLPLAFDGSCSGIQHFSAMLRDEIGGKAVNLLPSAEYQDIYRIVSDKVNEMLKQDLINGTSTTVETVTDKKTGEITQRTKYGTKVMAQWWLEHGVNRGVTKRSVMTLVYGSKEFGFRDQVLSDTIQPAIDNGKGDMFLNPNQAAGYMAKLIWNAVSGTVVAAVEAMNWLKSAAKLLAAEVKDPKTDTVLRGRCAVHWVTPDGFPVWQEYKKPIQTRLNLMFLGQFRLQPTINTNKDSEIDAHKQESGIAPNFVHSQDGNHLRMTVVWAHEKYGIESFALIHDSFGTIPADAANLFKAVRETMVSTYESCDVLADFYDQFADQLHESQLDKMPALPAKGNLNLRDILKSDFAFA

SEQ ID NO: 615 - DNA, 2670 bp, synthetic construct
  misc_feature 1..2670: note = Variant of RNA polymerase
  source 1..2670: mol_type = other DNA
atgcaccatcaccatcaccatatgaacacgattaacattgctaagaacgacttctctgacatcgaactggctgctatcccgttcaacactctggctgaccattacggtgagcgtttagctcgcgaacagttggcccttgagcatgagtcttacgagatgggtgaagcacgcttccgcaagatgtttgagcgtcaacttaaagctggtgaggttgcggataacgctgccgccaagcctctcatcactaccctactccctaagatgattgcacgcatcaacgactggtttgaggaagtgaaagctaagcgcggcaagcgcccgacagccttccagttcctgcaagaaatcaagccggaagccgtagcgtacatcaccattaagaccactctggcttgcctaaccagtgcggacaatacaaccgttcaggctgtagcaagcgcaatcggtcgggccattgaggacgaggctcgcttcggtcgtatccgtgaccttgaagctaagcacttcaagaagaacgttgaggaacaactcaacaagcgcgtagggcacgtctacaaaaaagcatttatgcaagttgtcgaggctgacatgctctctaagggtctactcggtggcgaggcgtggtcttcgtggcataaggaagactctattcatgtaggagtacgctgcatcgagatgctcattgagtcaaccggaatggttagcttacaccgccaaaatgctggcgtagtaggtcaagactctgagactatcgaactcgcacctgaatacgctgaggctatcgcaacccgtgcaggtgcgctggctggcatctctccgatgttccaaccttgcgtagttcctcctaagccgtggactggcattactggtggtggctattgggctgcggggcgcaaacccctgcagttagtacgtactcgcagtctggcggcgcttcgccgctatgaagaagtgtcgatgccggaggtcatcaaagcagtcaacattgcgcagaatacagcatggcgtattaacaagaaagttctcgacgtagcgaatgcaatcacccaatggcagcactgtccagtcgcggatgtgcctgcgatggatcgtggcgaaatgccagctcgtccgttggacatcgataccaacgagattgcacttaaagcgtggaagaaagaagcttccgcgttctaccgcaaagacaaagcacgcgttagccgtcgtctgtcaatggagtttatgttatctcaggcgaacaagtttgcgaattataaagcaatctggtttccgcaaaacatggattggcgtgggcgcgtgtacgctgtcccgatgttcaatcctcagggcaacgatatgacgaaaggcctgctgacctttgcgcaggagaaacccattggtgaagacggcttctattggctcaagattcatggcgcaaatacagctggagtggataaagtaccgtttccacaacgcatcaaatttgttgaggataaccatacgaatattatggaatgcgcgaaagcaccgctggaaaacacttggtgggcggaacaggactcgccgttctgttttctggcgttctgctttgagtatgctggcgtcatcaatagtggtctgtcgtacaactgtagcttgcctctggcatttgatggtagttgctccggcctgcaacatttctcagcgatgttacgcgacgaaattggcgccaaagctgtgaatctcctcccatctgcggaataccaggatatttatcgtatcgtcagcgacaaagttaacgaggtactgaaacaagatctgattaacggtacctctaccaccgtggaaacggtgactgataagaagacaggcgaaattacccaacgcacgaaatacgggaccaaagttatggcacagtggtggttagaacacggtgtgaatcgtggcgtcacgaaacgctcggttatgactttggtgtatgggagcaaagagtttggattccgcgatcaagtgctgagtgacaccattcaaccggcgatcgataacggcaaaggtgacatgtttctgaatccgaatcaggctgctggttacatggcgaaactgatctggaacgcagtgtccgggaccgtagtcgcagcagttgaggcgatgaactggctgaaaagtgcggcgaaattacttgctgctgaagtgaaggatcctaagacggatacagttctgcgtggccgctgcgcagtacattgggtgactcccgacggcttccctgtgtggcaggaatacaagaagcctattcagacgcgcttgaacctgatgttcctcggtcagttccgcttacagcctaccattaacaccaacaaagatagcgagattgatgcacacaaacaggagtctggtatcgctcctaactttgtacacagccaagacggtaaccaccttcgtatgactgtagtgtgggcacacgagaagtacggaatcgaatcttttgcactgattcacgactccttcggtaccattccggctgacgctgcgaacctgttcaaagcagtgcgcgaaactatggtttcgacatatgagtcttgtgatgtactggctgatttctacgaccagttcgctgaccagttgcacgagtctcaattggacaaaatgccagcacttccggctaaaggtaacttgaacctccgtgacatcttaaaatcggacttcgcgttcgcg

SEQ ID NO: 616 - protein, 890 aa, synthetic construct
  REGION 1..890: note = Variant of RNA polymerase
MHHHHHHMNTINIAKNDFSDIELAAIPFNTLADHYGERLAREQLALEHESYEMGEARFRKMFERQLKAGEVADNAAAKPLITTLLPKMIARINDWFEEVKAKRGKRPTAFQFLQEIKPEAVAYITIKTTLACLTSADNTTVQAVASAIGRAIEDEARFGRIRDLEAKHFKKNVEEQLNKRVGHVYKKAFMQVVEADMLSKGLLGGEAWSSWHKEDSIHVGVRCIEMLIESTGMVSLHRQNAGVVGQDSETIELAPEYAEAIATRAGALAGISPMFQPCVVPPKPWTGITGGGYWAAGRKPLQLVRTRSLAALRRYEEVSMPEVIKAVNIAQNTAWRINKKVLDVANAITQWQHCPVADVPAMDRGEMPARPLDIDTNEIALKAWKKEASAFYRKDKARVSRRLSMEFMLSQANKFANYKAIWFPQNMDWRGRVYAVPMFNPQGNDMTKGLLTFAQEKPIGEDGFYWLKIHGANTAGVDKVPFPQRIKFVEDNHTNIMECAKAPLENTWWAEQDSPFCFLAFCFEYAGVINSGLSYNCSLPLAFDGSCSGLQHFSAMLRDEIGAKAVNLLPSAEYQDIYRIVSDKVNEVLKQDLINGTSTTVETVTDKKTGEITQRTKYGTKVMAQWWLEHGVNRGVTKRSVMTLVYGSKEFGFRDQVLSDTIQPAIDNGKGDMFLNPNQAAGYMAKLIWNAVSGTVVAAVEAMNWLKSAAKLLAAEVKDPKTDTVLRGRCAVHWVTPDGFPVWQEYKKPIQTRLNLMFLGQFRLQPTINTNKDSEIDAHKQESGIAPNFVHSQDGNHLRMTVVWAHEKYGIESFALIHDSFGTIPADAANLFKAVRETMVSTYESCDVLADFYDQFADQLHESQLDKMPALPAKGNLNLRDILKSDFAFA

SEQ ID NO: 617 - DNA, 2670 bp, synthetic construct
  misc_feature 1..2670: note = Variant of RNA polymerase
  source 1..2670: mol_type = other DNA
atgcaccatcaccatcaccatatgaacacgattaacattgctaagaacgacttctctgacatcgaactggctgctatcccgttcaacactctggctgaccattacggtgagcgtttagctcgcgaacagttggcccttgagcatgagtcttacgagatgggtgaagcacgcttccgcaagatgtttgagcgtcaacttaaagctggtgaggttgcggataacgctgccgccaagcctctcatcactaccctactccctaagatgattgcacgcatcaacgactggtttgaggaagtgaaagctaagcgcggcaagcgcccgacagccttccagttcctgcaagaaatcaagccggaagccgtagcgtacatcaccattaagaccactctggcttgcctaaccagtgcggacaatacaaccgttcaggctgtagcaagcgcaatcggtcgggccattgaggacgaggctcgcttcggtcgtatccgtgaccttgaagctaagcacttcaagggcaacgttgaggaacaactcaacaagcgcgtagggcacgtctaccaaaaagcatttatgcaagttgtcgaggctgacatgctctctaagggtctactcggtggcgaggcgtggtcttcgtggcataaggaagactctattcatgtaggagtacgctgcatcgagatgctcattgagtcaaccggaatggttagcttacaccgccaaaatgctggcgtagtaggtcaagactctgagactatcgaactcgcacctgaatacgctgaggctatcgcaacccgtgcaggtgcgctggctggcatctctccgatgttccaaccttgcgtagttcctcctaagccgtggactggcattactggtggtggctattgggctgcggggcgcaaacccctgcagttagtacgtactcgcagtctggcggcgcttcgccgctatgaagaagtgtcgatgccggaggtcatcaaagcagtcaacattgcgcagaatacagcatggcgtattaacaagaaagttctcgacgtagcgaatgccatcacccaatggcagcactgtccagtcgcggatgtgcctgcgatggatcgtggcgaaatgccagctcgtccgttggacatcgataccaacgagattgcacttaaagcgtggaagaaagaagcttccgcgttctaccgcaaagacaaagcacgcgttagccgtcgtctgtcaatggagtttatgttatctcaggcgaacaagtttgcgaattataaagcaatctggtttccgcaaaacatggattggcgtgggcgcgtgtacgctgtcccgatgttcaatcctcagggcaacgatatgacgaaaggcctgctgacctttgcgcaggagaaacccattggtgaagacggcttctattggctcaagattcatggcgcaaatacagctggagtggataaagtaccgtttccacaacgcatcaaatttgttgaggataaccatacgaatattatggaatgcgcgaaagcaccgctggaaaacacttggtgggcggaacaggactcgccgttctgttttctggcgttctgctttgagtatgctggcgtcatcaatagtggtctgtcgtacaactgtagcttgcctctggcatttgatggtagttgctccggcctgcaacatttctcagcgatgttacgcgacgaaattggcggcaaagctgtgaatctcctcccatctgcggaataccaggatatttatcgtatcgtcagcgacaaagttaacgaggtactgaaacaagatctgattaacggtacctctaccaccgtggaaacggtgactgataagaagacaggcgaaattacccaacgcacgaaatacgggaccaaagttatggcacagtggtggttagaacacggtgtgaatcgtggcgtcacgaaacgctcggttatgactttggtgtatgggagcaaagagtttggattccgcgatcaagtgctgagtgacaccattcaaccggcgatcgataacggcaaaggtgacatgtttctgaatccgaatcaggctgctggttacatggcgaaactgatctggaacgcagtgtccgggaccgtagtcgcagcagttgaggcgatgaactggctgaaaagtgcggcgaaattacttgctgctgaagtgaaggatcctaagacggatacagttctgcgtggccgctgcgcagtacattgggtgactcccgacggcttccctgtgtggcaggaatacaagaagcctattcagacgcgcttgaacctgatgttcctcggtcagttccgcttacagcctaccattaacaccaacaaagatagcgagattgatgcacacaaacaggagtctggtatcgctcctaactttgtacacagccaagacggtaaccaccttcgtatgactgtagtgtgggcacacgagaagtacggaatcgaatcttttgcactgattcacgactccttcggtaccattccggctgacgctgcgaacctgttcaaagcagtgcgcgaaactatggtttcgacatatgagtcttgtgatgtactggctgatttctacgaccagttcgctgaccagttgcacgagtctcaattggacaaaatgccagcacttccggctaaaggtaacttgaacctccgtgacatcttaaaatcggacttcgcgttcgcg

SEQ ID NO: 618 - protein, 890 aa, synthetic construct
  REGION 1..890: note = Variant of RNA polymerase
MHHHHHHMNTINIAKNDFSDIELAAIPFNTLADHYGERLAREQLALEHESYEMGEARFRKMFERQLKAGEVADNAAAKPLITTLLPKMIARINDWFEEVKAKRGKRPTAFQFLQEIKPEAVAYITIKTTLACLTSADNTTVQAVASAIGRAIEDEARFGRIRDLEAKHFKGNVEEQLNKRVGHVYQKAFMQVVEADMLSKGLLGGEAWSSWHKEDSIHVGVRCIEMLIESTGMVSLHRQNAGVVGQDSETIELAPEYAEAIATRAGALAGISPMFQPCVVPPKPWTGITGGGYWAAGRKPLQLVRTRSLAALRRYEEVSMPEVIKAVNIAQNTAWRINKKVLDVANAITQWQHCPVADVPAMDRGEMPARPLDIDTNEIALKAWKKEASAFYRKDKARVSRRLSMEFMLSQANKFANYKAIWFPQNMDWRGRVYAVPMFNPQGNDMTKGLLTFAQEKPIGEDGFYWLKIHGANTAGVDKVPFPQRIKFVEDNHTNIMECAKAPLENTWWAEQDSPFCFLAFCFEYAGVINSGLSYNCSLPLAFDGSCSGLQHFSAMLRDEIGGKAVNLLPSAEYQDIYRIVSDKVNEVLKQDLINGTSTTVETVTDKKTGEITQRTKYGTKVMAQWWLEHGVNRGVTKRSVMTLVYGSKEFGFRDQVLSDTIQPAIDNGKGDMFLNPNQAAGYMAKLIWNAVSGTVVAAVEAMNWLKSAAKLLAAEVKDPKTDTVLRGRCAVHWVTPDGFPVWQEYKKPIQTRLNLMFLGQFRLQPTINTNKDSEIDAHKQESGIAPNFVHSQDGNHLRMTVVWAHEKYGIESFALIHDSFGTIPADAANLFKAVRETMVSTYESCDVLADFYDQFADQLHESQLDKMPALPAKGNLNLRDILKSDFAFA

SEQ ID NO: 619 - DNA, 2670 bp, synthetic construct
  misc_feature 1..2670: note = Variant of RNA polymerase
  source 1..2670: mol_type = other DNA
atgcaccatcaccatcaccatatgaacacgattaacattgctaagaacgacttctctgacatcgaactggctgctatcccgttcaacactctggctgaccattacggtgagcgtttagctcgcgaacagttggcccttgagcatgagtcttacgagatgggtgaagcacgcttccgcaagatgtttgagcgtcaacttaaagctggtgaggttgcggataacgctgccgccaagcctctcatcactaccctactccctaagatgattgcacgcatcaacgactggtttgaggaagtgaaagctaagcgcggcaagcgcccgacagccttccagttcctgcaagaaatcaagccggaagccgtagcgtacatcaccattaagaccactctggcttgcctaaccagtgcggacaatacaaccgttcaggctgtagcaagcgcaatcggtcgggccattgaggacgaggctcgcttcggtcgtatccgtgaccttgaagctaagcacttcaagaaaaacgttgaggaacaactcaacaagcgcgtagggcacgtctacaagaaagcatttatgcaagttgtcgaggctgacatgctctctaagggtctactcggtggcgaggcgtggtcttcgtggcataaggaagactctattcatgtaggagtacgctgcatcgagatgctcattgagtcaaccggaatggttagcttacaccgccaaaatgctggcgtagtaggtcaagactctgagactatcgaactcgcacctgaatacgctgaggctatcgcaacccgtgcaggtgcgctggctggcatctctccgatgttccaaccttgcgtagttcctcctaagccgtggactggcattactggtggtggctattgggctgcggggcgcaaacccctgcagttagtacgtactcgcagtctggcggcgcttcgccgctatgaagaagtgtcgatgccggaggtcatcaaagcagtcaacattgcgcagaatacagcatggcgtattaacaagaaagttctcgacgtagcgaatgcaatcacccaatggcagcactgtccagtcgcggatgtgcctgcgatggatcgtggcgaaatgccagctcgtccgttggacatcgataccaacgagattgcacttaaagcgtggaagaaagaagcttccgcgttctaccgcaaagacaaagcacgcgttagccgtcgtctgtcaatggagtttatgttatctcaggcgaacaagtttgcgaattataaagcaatctggtttccgcaaaacatggattggcgtgggcgcgtgtacgctgtcccgatgttcaatcctcagggcaacgatatgacgaaaggcctgctgacctttgcgcaggagaaacccattggtgaagacggcttctattggctcaagattcatggcgcaaatacagctggagtggataaagtaccgtttccacaacgcatcaaatttgttgaggataaccatacgaatattatggaatgcgcgaaagcaccgctggaaaacacttggtgggcggaacaggactcgccgttctgttttctggcgttctgctttgagtatgctggcgtcatcaatcatggtctgtcgtacaactgtagcttgcctctggcatttgatggtagttgctccggcattcaacatttctcagcgatgttacgcgacgaaattggcgccaaagctgtgaatctcctcccatctgcggaataccaggatatttatcgtatcgtcagcgacaaagttaacgagcgtctgaaacaagatctgattaacggtacctctaccaccgtggaaacggtgactgataagaagacaggcgaaattacccaacgcacgaaatacgggaccaaagttatggcacagtggtggttagaacacggtgtgaatcgtggcgtcacgaaacgctcggttatgactttggtgtatgggagcaaagagtttggattccgcgatcaagtgctgagtgacaccattcaaccggcgatcgataacggcaaaggtgacatgtttctgaatccgaatcaggctgctggttacatggcgaaactgatctggaacgcagtgtccgggaccgtagtcgcagcagttgaggcgatgaactggctgaaaagtgcggcgaaattacttgctgctgaagtgaaggatcctaagacggatacagttctgcgtggccgctgcgcagtacattgggtgactcccgacggcttccctgtgtggcaggaatacaagaagcctattcagacgcgcttgaacctgatgttcctcggtcagttccgcttacagcctaccattaacaccaacaaagatagcgagattgatgcacacaaacaggagtctggtatcgctcctaactttgtacacagccaagacggtaaccaccttcgtatgactgtagtgtgggcacacgagaagtacggaatcgaatcttttgcactgattcacgactccttcggtaccattccggctgacgctgcgaacctgttcaaagcagtgcgcgaaactatggtttcgacatatgagtcttgtgatgtactggctgatttctacgaccagttcgctgaccagttgcacgagtctcaattggacaaaatgccagcacttccggctaaaggtaacttgaacctccgtgacatcttaaaatcggacttcgcgttcgcg

SEQ ID NO: 620 - protein, 890 aa, synthetic construct
  REGION 1..890: note = Variant of RNA polymerase
MHHHHHHMNTINIAKNDFSDIELAAIPFNTLADHYGERLAREQLALEHESYEMGEARFRKMFERQLKAGEVADNAAAKPLITTLLPKMIARINDWFEEVKAKRGKRPTAFQFLQEIKPEAVAYITIKTTLACLTSADNTTVQAVASAIGRAIEDEARFGRIRDLEAKHFKKNVEEQLNKRVGHVYKKAFMQVVEADMLSKGLLGGEAWSSWHKEDSIHVGVRCIEMLIESTGMVSLHRQNAGVVGQDSETIELAPEYAEAIATRAGALAGISPMFQPCVVPPKPWTGITGGGYWAAGRKPLQLVRTRSLAALRRYEEVSMPEVIKAVNIAQNTAWRINKKVLDVANAITQWQHCPVADVPAMDRGEMPARPLDIDTNEIALKAWKKEASAFYRKDKARVSRRLSMEFMLSQANKFANYKAIWFPQNMDWRGRVYAVPMFNPQGNDMTKGLLTFAQEKPIGEDGFYWLKIHGANTAGVDKVPFPQRIKFVEDNHTNIMECAKAPLENTWWAEQDSPFCFLAFCFEYAGVINHGLSYNCSLPLAFDGSCSGIQHFSAMLRDEIGAKAVNLLPSAEYQDIYRIVSDKVNERLKQDLINGTSTTVETVTDKKTGEITQRTKYGTKVMAQWWLEHGVNRGVTKRSVMTLVYGSKEFGFRDQVLSDTIQPAIDNGKGDMFLNPNQAAGYMAKLIWNAVSGTVVAAVEAMNWLKSAAKLLAAEVKDPKTDTVLRGRCAVHWVTPDGFPVWQEYKKPIQTRLNLMFLGQFRLQPTINTNKDSEIDAHKQESGIAPNFVHSQDGNHLRMTVVWAHEKYGIESFALIHDSFGTIPADAANLFKAVRETMVSTYESCDVLADFYDQFADQLHESQLDKMPALPAKGNLNLRDILKSDFAFA

SEQ ID NO: 621 - DNA, 2670 bp, synthetic construct
  misc_feature 1..2670: note = Variant of RNA polymerase
  source 1..2670: mol_type = other DNA
atgcaccatcaccatcaccatatgaacacgattaacattgctaagaacgacttctctgacatcgaactggctgctatcccgttcaacactctggctgaccattacggtgagcgtttagctcgcgaacagttggcccttgagcatgagtcttacgagatgggtgaagcacgcttccgcaagatgtttgagcgtcaacttaaagctggtgaggttgcggataacgctgccgccaagcctctcatcactaccctactccctaagatgattgcacgcatcaacgactggtttgaggaagtgaaagctaagcgcggcaagcgcccgacagccttccagttcctgcaagaaatcaagccggaagccgtagcgtacatcaccattaagaccactctggcttgcctaaccagtgcggacaatacaaccgttcaggctgtagcaagcgcaatcggtcgggccattgaggacgaggctcgcttcggtcgtatccgtgaccttgaagctaagcacttcaagaagaacgttgaggaacaactcaacaagcgcgtagggcacgtctacaaagtagcatttatgcaagttgtcgaggctgacatgctctctaagggtctactcggtggcgaggcgtggtcttcgtggcataaggaagactctattcatgtaggagtacgctgcatcgagatgctcattgagtcaaccggaatggttagcttacaccgccaaaatgctggcgtagtaggtcaagactctgagactatcgaactcgcacctgaatacgctgaggctatcgcaacccgtgcaggtgcgctggctggcatctctccgatgttccaaccttgcgtagttcctcctaagccgtggactggcattactggtggtggctattgggctgcggggcgcaaacccctgcagttagtacgtactcgcagtctggcggcgcttcgccgctatgaagaagtgtcgatgccggaggtcatcaaagcagtcaacattgcgcagaatacagcatggcgtattaacaagaaagttctcgacgtagcgaatgcaatcacccaatggcagcactgtccagtcgcggatgtgcctgcgatggatcgtggcgaaatgccagctcgtccgttggacatcgataccaacgagattgcacttaaagcgtggaagaaagaagcttccgcgttctaccgcaaagacaaagcacgcgttagccgtcgtctgtcaatggagtttatgttatctcaggcgaacaagtttgcgaattataaagcaatctggtttccgcaaaacatggattggcgtgggcgcgtgtacgctgtcccgatgttcaatcctcagggcaacgatatgacgaaaggcctgctgacctttgcgcaggagaaacccattggtgaagacggcttctattggctcaagattcatggcgcaaatacagctggagtggataaagtaccgtttccacaacgcatcaaatttgttgaggataaccatacgaatattatggaatgcgcgaaagcaccgctggaaaacacttggtgggcggaacaggactcgccgttctgttttctggcgttctgctttgagtatgctggcgtcatcaatcatggtctgtcgtacaactgtagcttgcctctggcatttgatggtagttgctccggcctgcaacatttctcagcgatgttacgcgacgaaattggcggcaaagctgtgaatctcctcccatctgcggaataccaggatatttatcgtatcgtcagcgacaaagttaacgaggtactgaaacaagatctgattaacggtacctctaccaccgtggaaacggtgactgataagaagacaggcgaaattacccaacgcacgaaatacgggaccaaagttatggcacagtggtggttagaacacggtgtgaatcgtggcgtcacgaaacgctcggttatgactttggtgtatgggagcaaagagtttggattccgcgatcaagtgctgagtgacaccattcaaccggcgatcgataacggcaaaggtgacatgtttctgaatccgaatcaggctgctggttacatggcgaaactgatctggaacgcagtgtccgggaccgtagtcgcagcagttgaggcgatgaactggctgaaaagtgcggcgaaattacttgctgctgaagtgaaggatcctaagacggatacagttctgcgtggccgctgcgcagtacattgggtgactcccgacggcttccctgtgtggcaggaatacaagaagcctattcagacgcgcttgaacctgatgttcctcggtcagttccgcttacagcctaccattaacaccaacaaagatagcgagattgatgcacacaaacaggagtctggtatcgctcctaactttgtacacagccaagacggtaaccaccttcgtatgactgtagtgtgggcacacgagaagtacggaatcgaatcttttgcactgattcacgactccttcggtaccattccggctgacgctgcgaacctgttcaaagcagtgcgcgaaactatggtttcgacatatgagtcttgtgatgtactggctgatttctacgaccagttcgctgaccagttgcacgagtctcaattggacaaaatgccagcacttccggctaaaggtaacttgaacctccgtgacatcttaaaatcggacttcgcgttcgcg

SEQ ID NO: 622 - protein, 890 aa, synthetic construct
  REGION 1..890: note = Variant of RNA polymerase
MHHHHHHMNTINIAKNDFSDIELAAIPFNTLADHYGERLAREQLALEHESYEMGEARFRKMFERQLKAGEVADNAAAKPLITTLLPKMIARINDWFEEVKAKRGKRPTAFQFLQEIKPEAVAYITIKTTLACLTSADNTTVQAVASAIGRAIEDEARFGRIRDLEAKHFKKNVEEQLNKRVGHVYKVAFMQVVEADMLSKGLLGGEAWSSWHKEDSIHVGVRCIEMLIESTGMVSLHRQNAGVVGQDSETIELAPEYAEAIATRAGALAGISPMFQPCVVPPKPWTGITGGGYWAAGRKPLQLVRTRSLAALRRYEEVSMPEVIKAVNIAQNTAWRINKKVLDVANAITQWQHCPVADVPAMDRGEMPARPLDIDTNEIALKAWKKEASAFYRKDKARVSRRLSMEFMLSQANKFANYKAIWFPQNMDWRGRVYAVPMFNPQGNDMTKGLLTFAQEKPIGEDGFYWLKIHGANTAGVDKVPFPQRIKFVEDNHTNIMECAKAPLENTWWAEQDSPFCFLAFCFEYAGVINHGLSYNCSLPLAFDGSCSGLQHFSAMLRDEIGGKAVNLLPSAEYQDIYRIVSDKVNEVLKQDLINGTSTTVETVTDKKTGEITQRTKYGTKVMAQWWLEHGVNRGVTKRSVMTLVYGSKEFGFRDQVLSDTIQPAIDNGKGDMFLNPNQAAGYMAKLIWNAVSGTVVAAVEAMNWLKSAAKLLAAEVKDPKTDTVLRGRCAVHWVTPDGFPVWQEYKKPIQTRLNLMFLGQFRLQPTINTNKDSEIDAHKQESGIAPNFVHSQDGNHLRMTVVWAHEKYGIESFALIHDSFGTIPADAANLFKAVRETMVSTYESCDVLADFYDQFADQLHESQLDKMPALPAKGNLNLRDILKSDFAFA

SEQ ID NO: 623 - DNA, 2670 bp, synthetic construct
  misc_feature 1..2670: note = Variant of RNA polymerase
  source 1..2670: mol_type = other DNA
atgcaccatcaccatcaccatatgaacacgattaacattgctaagaacgacttctctgacatcgaactggctgctatcccgttcaacactctggctgaccattacggtgagcgtttagctcgcgaacagttggcccttgagcatgagtcttacgagatgggtgaagcacgcttccgcaagatgtttgagcgtcaacttaaagctggtgaggttgcggataacgctgccgccaagcctctcatcactaccctactccctaagatgattgcacgcatcaacgactggtttgaggaagtgaaagctaagcgcggcaagcgcccgacagccttccagttcctgcaagaaatcaagccggaagccgtagcgtacatcaccattaagaccactctggcttgcctaaccagtgcggacaatacaaccgttcaggctgtagcaagcgcaatcggtcgggccattgaggacgaggctcgcttcggtcgtatccgtgaccttgaagctaagcacttcaagggcaacgttgaggaacaactcaacaagcgcgtagggcacgtctacaagaaagcatttatgcaagttgtcgaggctgacatgctctctaagggtctactcggtggcgaggcgtggtcttcgtggcataaggaagactctattcatgtaggagtacgctgcatcgagatgctcattgagtcaaccggaatggttagcttacaccgccaaaatgctggcgtagtaggtcaagactctgagactatcgaactcgcacctgaatacgctgaggctatcgcaacccgtgcaggtgcgctggctggcatctctccgatgttccaaccttgcgtagttcctcctaagccgtggactggcattactggtggtggctattgggctgcggggcgcaaacccctgcagttagtacgtactcgcagtctggcggcgcttcgccgctatgaagaagtgtcgatgccggaggtcatcaaagcagtcaacattgcgcagaatacagcatggcgtattaacaagaaagttctcgacgtagcgaatgccatcacccaatggcagcactgtccagtcgcggatgtgcctgcgatggatcgtggcgaaatgccagctcgtccgttggacatcgataccaacgagattgcacttaaagcgtggaagaaagaagcttccgcgttctaccgcaaagacaaagcacgcgttagccgtcgtctgtcaatggagtttatgttatctcaggcgaacaagtttgcgaatgagaaagcaatctggtttccgcaaaacatggattggcgtgggcgcgtgtacgctgtcccgatgttcaatcctcagggcaacgatatgacgaaaggcctgctgacctttgcgcaggagaaacccattggtgaagacggcttctattggctcaagattcatggcgcaaatacagctggagtggataaagtaccgtttccacaacgcatcaaatttgttgaggataaccatacgaatattatggaatgcgcgaaagcaccgctggaaaacacttggtgggcggaacaggactcgccgttctgttttctggcgttctgctttgagtatgctggcgtcatcaatagtggtctgtcgtacaactgtagcttgcctctggcatttgatggtagttgctccggcattcaacatttctcagcgatgttacgcgacgaaattggcgccaaagctgtgaatctcctcccatctgcggaataccaggatatttatcgtatcgtcagcgacaaagttaacgaggcgctgaaacaagatctgattaacggtacctctaccaccgtggaaacggtgactgataagaagacaggcgaaattacccaacgcacgaaatacgggaccaaagttatggcacagtggtggttagaacacggtgtgaatcgtggcgtcacgaaacgctcggttatgactttggtgtatgggagcaaagagtttggattccgcgatcaagtgctgagtgacaccattcaaccggcgatcgataacggcaaaggtgacatgtttctgaatccgaatcaggctgctggttacatggcgaaactgatctggaacgcagtgtccgggaccgtagtcgcagcagttgaggcgatgaactggctgaaaagtgcggcgaaattacttgctgctgaagtgaaggatcctaagacggatacagttctgcgtggccgctgcgcagtacattgggtgactcccgacggcttccctgtgtggcaggaatacaagaagcctattcagacgcgcttgaacctgatgttcctcggtcagttccgcttacagcctaccattaacaccaacaaagatagcgagattgatgcacacaaacaggagtctggtatcgctcctaactttgtacacagccaagacggtaaccaccttcgtatgactgtagtgtgggcacacgagaagtacggaatcgaatcttttgcactgattcacgactccttcggtaccattccggctgacgctgcgaacctgttcaaagcagtgcgcgaaactatggtttcgacatatgagtcttgtgatgtactggctgatttctacgaccagttcgctgaccagttgcacgagtctcaattggacaaaatgccagcacttccggctaaaggtaacttgaacctccgtgacatcttaaaatcggacttcgcgttcgcg

SEQ ID NO: 624 - protein, 890 aa, synthetic construct
  REGION 1..890: note = Variant of RNA polymerase
MHHHHHHMNTINIAKNDFSDIELAAIPFNTLADHYGERLAREQLALEHESYEMGEARFRKMFERQLKAGEVADNAAAKPLITTLLPKMIARINDWFEEVKAKRGKRPTAFQFLQEIKPEAVAYITIKTTLACLTSADNTTVQAVASAIGRAIEDEARFGRIRDLEAKHFKGNVEEQLNKRVGHVYKKAFMQVVEADMLSKGLLGGEAWSSWHKEDSIHVGVRCIEMLIESTGMVSLHRQNAGVVGQDSETIELAPEYAEAIATRAGALAGISPMFQPCVVPPKPWTGITGGGYWAAGRKPLQLVRTRSLAALRRYEEVSMPEVIKAVNIAQNTAWRINKKVLDVANAITQWQHCPVADVPAMDRGEMPARPLDIDTNEIALKAWKKEASAFYRKDKARVSRRLSMEFMLSQANKFANEKAIWFPQNMDWRGRVYAVPMFNPQGNDMTKGLLTFAQEKPIGEDGFYWLKIHGANTAGVDKVPFPQRIKFVEDNHTNIMECAKAPLENTWWAEQDSPFCFLAFCFEYAGVINSGLSYNCSLPLAFDGSCSGIQHFSAMLRDEIGAKAVNLLPSAEYQDIYRIVSDKVNEALKQDLINGTSTTVETVTDKKTGEITQRTKYGTKVMAQWWLEHGVNRGVTKRSVMTLVYGSKEFGFRDQVLSDTIQPAIDNGKGDMFLNPNQAAGYMAKLIWNAVSGTVVAAVEAMNWLKSAAKLLAAEVKDPKTDTVLRGRCAVHWVTPDGFPVWQEYKKPIQTRLNLMFLGQFRLQPTINTNKDSEIDAHKQESGIAPNFVHSQDGNHLRMTVVWAHEKYGIESFALIHDSFGTIPADAANLFKAVRETMVSTYESCDVLADFYDQFADQLHESQLDKMPALPAKGNLNLRDILKSDFAFA

SEQ ID NO: 625 - DNA, 2670 bp, synthetic construct
  misc_feature 1..2670: note = Variant of RNA polymerase
  source 1..2670: mol_type = other DNA
atgcaccatcaccatcaccatatgaacacgattaacattgctaagaacgacttctctgacatcgaactggctgctatcccgttcaacactctggctgaccattacggtgagcgtttagctcgcgaacagttggcccttgagcatgagtcttacgagatgggtgaagcacgcttccgcaagatgtttgagcgtcaacttaaagctggtgaggttgcggataacgctgccgccaagcctctcatcactaccctactccctaagatgattgcacgcatcaacgactggtttgaggaagtgaaagctaagcgcggcaagcgcccgacagccttccagttcctgcaagaaatcaagccggaagccgtagcgtacatcaccattaagaccactctggcttgcctaaccagtgcggacaatacaaccgttcaggctgtagcaagcgcaatcggtcgggccattgaggacgaggctcgcttcggtcgtatccgtgaccttgaagctaagcacttcaagaaaaacgttgaggaacaactcaacaagcgcgtagggcacgtctacaagaaagcatttatgcaagttgtcgaggaagacatgctctctaagggtctactcggtggcgaggcgtggtcttcgtggcataaggaagactctattcatgtaggagtacgctgcatcgagatgctcattgagtcaaccggaatggttagcttacaccgccaaaatgctggcgtagtaggtcaagactctgagactatcgaactcgcacctgaatacgctgaggctatcgcaacccgtgcaggtgcgctggctggcatctctccgatgttccaaccttgcgtagttcctcctaagccgtggactggcattactggtggtggctattgggctgcggggcgcaaacccctgcagttagtacgtactcgcagtctggcggcgcttcgccgctatgaagaagtgtcgatgccggaggtcatcaaagcagtcaacattgcgcagaatacagcatggcgtattaacaagaaagttctcgacgtagcgaatgccatcacccaatggcagcactgtccagtcgcggatgtgcctgcgatggatcgtggcgaaatgccagctcgtccgttggacatcgataccaacgagattgcacttaaagcgtggaagaaagaagcttccgcgttctaccgcaaagacaaagcacgcgttagccgtcgtctgtcaatggagtttatgttatctcaggcgaacaagtttgcgaattataaagcaatctggtttccgcaaaacatggattggcgtgggcgcgtgtacgctgtcccgatgttcaatcctcagggcaacgatatgacgaaaggcctgctgacctttgcgcaggagaaacccattggtgaagacggcttctattggctcaagattcatggcgcaaatacagctggagtggataaagtaccgtttccacaacgcatcaaatttgttgaggataaccatacgaatattatggaatgcgcgaaagcaccgctggaaaacacttggtgggcggaacaggactcgccgttctgttttctggcgttctgctttgagtatgctggcgtcatcaatcacggtctgtcgtacaactgtagcttgcctctggcatttgatggtagttgctccggcctgcaacatttctcagcgatgttacgcgacgaaattggcggcaaagctgtgaatctcctcccatctgcggaataccaggatatttatcgtatcgtcagcgacaaagttaacgaggtgctgaaacaagatctgattaacggtacctctaccaccgtggaaacggtgactgataagaagacaggcgaaattacccaacgcacgaaatacgggaccaaagttatggcacagtggtggttagaacacggtgtgaatcgtggcgtcacgaaacgctcggttatgactttggtgtatgggagcaaagagtttggattccgcgatcaagtgctgagtgacaccattcaaccggcgatcgataacggcaaaggtgacatgtttctgaatccgaatcaggctgctggttacatggcgaaactgatctggaacgcagtgtccgggaccgtagtcgcagcagttgaggcgatgaactggctgaaaagtgcggcgaaattacttgctgctgaagtgaaggatcctaagacggatacagttctgcgtggccgctgcgcagtacattgggtgactcccgacggcttccctgtgtggcaggaatacaagaagcctattcagacgcgcttgaacctgatgttcctcggtcagttccgcttacagcctaccattaacaccaacaaagatagcgagattgatgcacacaaacaggagtctggtatcgctcctaactttgtacacagccaagacggtaaccaccttcgtatgactgtagtgtgggcacacgagaagtacggaatcgaatcttttgcactgattcacgactccttcggtaccattccggctgacgctgcgaacctgttcaaagcagtgcgcgaaactatggtttcgacatatgagtcttgtgatgtactggctgatttctacgaccagttcgctgaccagttgcacgagtctcaattggacaaaatgccagcacttccggctaaaggtaacttgaacctccgtgacatcttaaaatcggacttcgcgttcgcg

SEQ ID NO: 626 - protein, 890 aa, synthetic construct
  REGION 1..890: note = Variant of RNA polymerase
MHHHHHHMNTINIAKNDFSDIELAAIPFNTLADHYGERLAREQLALEHESYEMGEARFRKMFERQLKAGEVADNAAAKPLITTLLPKMIARINDWFEEVKAKRGKRPTAFQFLQEIKPEAVAYITIKTTLACLTSADNTTVQAVASAIGRAIEDEARFGRIRDLEAKHFKKNVEEQLNKRVGHVYKKAFMQVVEEDMLSKGLLGGEAWSSWHKEDSIHVGVRCIEMLIESTGMVSLHRQNAGVVGQDSETIELAPEYAEAIATRAGALAGISPMFQPCVVPPKPWTGITGGGYWAAGRKPLQLVRTRSLAALRRYEEVSMPEVIKAVNIAQNTAWRINKKVLDVANAITQWQHCPVADVPAMDRGEMPARPLDIDTNEIALKAWKKEASAFYRKDKARVSRRLSMEFMLSQANKFANYKAIWFPQNMDWRGRVYAVPMFNPQGNDMTKGLLTFAQEKPIGEDGFYWLKIHGANTAGVDKVPFPQRIKFVEDNHTNIMECAKAPLENTWWAEQDSPFCFLAFCFEYAGVINHGLSYNCSLPLAFDGSCSGLQHFSAMLRDEIGGKAVNLLPSAEYQDIYRIVSDKVNEVLKQDLINGTSTTVETVTDKKTGEITQRTKYGTKVMAQWWLEHGVNRGVTKRSVMTLVYGSKEFGFRDQVLSDTIQPAIDNGKGDMFLNPNQAAGYMAKLIWNAVSGTVVAAVEAMNWLKSAAKLLAAEVKDPKTDTVLRGRCAVHWVTPDGFPVWQEYKKPIQTRLNLMFLGQFRLQPTINTNKDSEIDAHKQESGIAPNFVHSQDGNHLRMTVVWAHEKYGIESFALIHDSFGTIPADAANLFKAVRETMVSTYESCDVLADFYDQFADQLHESQLDKMPALPAKGNLNLRDILKSDFAFA

SEQ ID NO: 627 - DNA, 2670 bp, synthetic construct
  misc_feature 1..2670: note = Variant of RNA polymerase
  source 1..2670: mol_type = other DNA
atgcaccatcaccatcaccatatgaacacgattaacattgctaagaacgacttctctgacatcgaactggctgctatcccgttcaacactctggctgaccattacggtgagcgtttagctcgcgaacagttggcccttgagcatgagtcttacgagatgggtgaagcacgcttccgcaagatgtttgagcgtcaacttaaagctggtgaggttgcggataacgctgccgccaagcctctcatcactaccctactccctaagatgattgcacgcatcaacgactggtttgaggaagtgaaagctaagcgcggcaagcgcccgacagccttccagttcctgcaagaaatcaagccggaagccgtagcgtacatcaccattaagaccactctggcttgcctaaccagtgcggacaatacaaccgttcaggctgtagcaagcgcaatcggtcgggccattgaggacgaggctcgcttcggtcgtatccgtgaccttgaagctaagcacttcaagaaaaacgttgaggaacaactcaacaagcgcgtagggcacgtgtacaagaaagcatttatgcaagttgtcgaggctgacatgctctctaagggtctactcggtggcgaggcgtggtcttcgtggcataaggaagactctattcatgtaggagtacgctgcatcgagatgctcattgagtcaaccggaatggttagcttacaccgccaaaatgctggcgtagtaggtcaagactctgagactatcgaactcgcacctgaatacgctgaggctatcgcaacccgtgcaggtgcgctggctggcatctctccgatgttccaaccttgcgtagttcctcctaagccgtggactggcattactggtggtggctattgggctgcggggcgcaaacccctgcagttagtacgtactcgcagtctggcggcgcttcgccgctatgaagaagtgtcgatgccggaggtcatcaaagcagtcaacattgcgcagaatacagcatggcgtattaacaagaaagttctcgacgtagcgaataccatcacccaatggcagcactgtccagtcgcggatgtgcctgcgatggatcgtggcgaaatgccagctcgtccgttggacatcgataccaacgagattgcacttaaagcgtggaagaaagaagcttccgcgttctaccgcaaagacaaagcacgcgttagccgtcgtctgtcaatggagtttatgttatctcaggcgaacaagtttgcgaatgagaaagcaatctggtttccgcaaaacatggattggcgtgggcgcgtgtacgctgtcccgatgttcaatcctcagggcaacgatatgacgaaaggcctgctgacctttgcgcaggagaaacccattggtgaagacggcttctattggctcaagattcatggcgcaaatacagctggagtggataaagtaccgtttccacaacgcatcaaatttgttgaggataaccatacgaatattatggaatgcgcgaaagcaccgctggaaaacacttggtgggcggaacaggactcgccgttctgttttctggcgttctgctttgagtatgctggcgtcatcaatcatggtctgtcgtacaactgtagcttgcctctggcatttgatggtagttgctccggcctgcaacatttctcagcgatgttacgcgacgaaattggcggcaaagctgtgaatctcctcccatctgcggaataccaggatatttatcgtatcgtcagcgacaaagttaacgagcgtctgaaacaagatctgattaacggtacctctaccaccgtggaaacggtgactgataagaagacaggcgaaattacccaacgcacgaaatacgggaccaaagttatggcacagtggtggttagaacacggtgtgaatcgtggcgtcacgaaacgctcggttatgactttggtgtatgggagcaaagagtttggattccgcgatcaagtgctgagtgacaccattcaaccggcgatcgataacggcaaaggtgacatgtttctgaatccgaatcaggctgctggttacatggcgaaactgatctggaacgcagtgtccgggaccgtagtcgcagcagttgaggcgatgaactggctgaaaagtgcggcgaaattacttgctgctgaagtgaaggatcctaagacggatacagttctgcgtggccgctgcgcagtacattgggtgactcccgacggcttccctgtgtggcaggaatacaagaagcctattcagacgcgcttgaacctgatgttcctcggtcagttccgcttacagcctaccattaacaccaacaaagatagcgagattgatgcacacaaacaggagtctggtatcgctcctaactttgtacacagccaagacggtaaccaccttcgtatgactgtagtgtgggcacacgagaagtacggaatcgaatcttttgcactgattcacgactccttcggtaccattccggctgacgctgcgaacctgttcaaagcagtgcgcgaaactatggtttcgacatatgagtcttgtgatgtactggctgatttctacgaccagttcgctgaccagttgcacgagtctcaattggacaaaatgccagcacttccggctaaaggtaacttgaacctccgtgacatcttaaaatcggacttcgcgttcgcg

SEQ ID NO: 628 - protein, 890 aa, synthetic construct
  REGION 1..890: note = Variant of RNA polymerase
MHHHHHHMNTINIAKNDFSDIELAAIPFNTLADHYGERLAREQLALEHESYEMGEARFRKMFERQLKAGEVADNAAAKPLITTLLPKMIARINDWFEEVKAKRGKRPTAFQFLQEIKPEAVAYITIKTTLACLTSADNTTVQAVASAIGRAIEDEARFGRIRDLEAKHFKKNVEEQLNKRVGHVYKKAFMQVVEADMLSKGLLGGEAWSSWHKEDSIHVGVRCIEMLIESTGMVSLHRQNAGVVGQDSETIELAPEYAEAIATRAGALAGISPMFQPCVVPPKPWTGITGGGYWAAGRKPLQLVRTRSLAALRRYEEVSMPEVIKAVNIAQNTAWRINKKVLDVANTITQWQHCPVADVPAMDRGEMPARPLDIDTNEIALKAWKKEASAFYRKDKARVSRRLSMEFMLSQANKFANEKAIWFPQNMDWRGRVYAVPMFNPQGNDMTKGLLTFAQEKPIGEDGFYWLKIHGANTAGVDKVPFPQRIKFVEDNHTNIMECAKAPLENTWWAEQDSPFCFLAFCFEYAGVINHGLSYNCSLPLAFDGSCSGLQHFSAMLRDEIGGKAVNLLPSAEYQDIYRIVSDKVNERLKQDLINGTSTTVETVTDKKTGEITQRTKYGTKVMAQWWLEHGVNRGVTKRSVMTLVYGSKEFGFRDQVLSDTIQPAIDNGKGDMFLNPNQAAGYMAKLIWNAVSGTVVAAVEAMNWLKSAAKLLAAEVKDPKTDTVLRGRCAVHWVTPDGFPVWQEYKKPIQTRLNLMFLGQFRLQPTINTNKDSEIDAHKQESGIAPNFVHSQDGNHLRMTVVWAHEKYGIESFALIHDSFGTIPADAANLFKAVRETMVSTYESCDVLADFYDQFADQLHESQLDKMPALPAKGNLNLRDILKSDFAFA

SEQ ID NO: 629 - DNA, 2670 bp, synthetic construct
  misc_feature 1..2670: note = Variant of RNA polymerase
  source 1..2670: mol_type = other DNA
atgcaccatcaccatcaccatatgaacacgattaacattgctaagaacgacttctctgacatcgaactggctgctatcccgttcaacactctggctgaccattacggtgagcgtttagctcgcgaacagttggcccttgagcatgagtcttacgagatgggtgaagcacgcttccgcaagatgtttgagcgtcaacttaaagctggtgaggttgcggataacgctgccgccaagcctctcatcactaccctactccctaagatgattgcacgcatcaacgactggtttgaggaagtgaaagctaagcgcggcaagcgcccgacagccttccagttcctgcaagaaatcaagccggaagccgtagcgtacatcaccattaagaccactctggcttgcctaaccagtgcggacaatacaaccgttcaggctgtagcaagcgcaatcggtcgggccattgaggacgaggctcgcttcggtcgtatccgtgaccttgaagctaagcacttcaagggcaacgttgaggaacaactcaacaagcgcgtagggcacgtctacaaagtagcatttatgcaagttgtcgaggctgacatgctctctaagggtctactcggtggcgaggcgtggtcttcgtggcataaggaagactctattcatgtaggagtacgctgcatcgagatgctcattgagtcaaccggaatggttagcttacaccgccaaaatgctggcgtagtaggtcaagactctgagactatcgaactcgcacctgaatacgctgaggctatcgcaacccgtgcaggtgcgctggctggcatctctccgatgttccaaccttgcgtagttcctcctaagccgtggactggcattactggtggtggctattgggctgcggggcgcaaacccctgcagttagtacgtactcgcagtctggcggcgcttcgccgctatgaagaagtgtcgatgccggaggtcatcaaagcagtcaacattgcgcagaatacagcatggcgtattaacaagaaagttctcgacgtagcgaatgcaatcacccaatggcagcactgtccagtcgcggatgtgcctgcgatggatcgtggcgaaatgccagctcgtccgttggacatcgataccaacgagattgcacttaaagcgtggaagaaagaagcttccgcgttctaccgcaaagacaaagcacgcgttagccgtcgtctgtcaatggagtttatgttatctcaggcgaacaagtttgcgaattataaagcaatctggtttccgcaaaacatggattggcgtgggcgcgtgtacgctgtcccgatgttcaatcctcagggcaacgatatgacgaaaggcctgctgacctttgcgcaggagaaacccattggtgaagacggcttctattggctcaagattcatggcgcaaatacagctggagtggataaagtaccgtttccacaacgcatcaaatttgttgaggataaccatacgaatattatggaatgcgcgaaagcaccgctggaaaacacttggtgggcggaacaggactcgccgttctgttttctggcgttctgctttgagtatgctggcgtcatcaatcatggtctgtcgtacaactgtagcttgcctctggcatttgatggtagttgctccggcatccaacatttctcagcgatgttacgcgacgaaattggcggcaaagctgtgaatctcctcccatctgcggaataccaggatatttatcgtatcgtcagcgacaaagttaacgagatgctgaaacaagatctgattaacggtacctctaccaccgtggaaacggtgactgataagaagacaggcgaaattacccaacgcacgaaatacgggaccaaagttatggcacagtggtggttagaacacggtgtgaatcgtggcgtcacgaaacgctcggttatgactttggtgtatgggagcaaagagtttggattccgcgatcaagtgctgagtgacaccattcaaccggcgatcgataacggcaaaggtgacatgtttctgaatccgaatcaggctgctggttacatggcgaaactgatctggaacgcagtgtccgggaccgtagtcgcagcagttgaggcgatgaactggctgaaaagtgcggcgaaattacttgctgctgaagtgaaggatcctaagacggatacagttctgcgtggccgctgcgcagtacattgggtgactcccgacggcttccctgtgtggcaggaatacaagaagcctattcagacgcgcttgaacctgatgttcctcggtcagttccgcttacagcctaccattaacaccaacaaagatagcgagattgatgcacacaaacaggagtctggtatcgctcctaactttgtacacagccaagacggtaaccaccttcgtatgactgtagtgtgggcacacgagaagtacggaatcgaatcttttgcactgattcacgactccttcggtaccattccggctgacgctgcgaacctgttcaaagcagtgcgcgaaactatggtttcgacatatgagtcttgtgatgtactggctgatttctacgaccagttcgctgaccagttgcacgagtctcaattggacaaaatgccagcacttccggctaaaggtaacttgaacctccgtgacatcttaaaatcggacttcgcgttcgcg

SEQ ID NO: 630 - protein, 890 aa, synthetic construct
  REGION 1..890: note = Variant of RNA polymerase
MHHHHHHMNTINIAKNDFSDIELAAIPFNTLADHYGERLAREQLALEHESYEMGEARFRKMFERQLKAGEVADNAAAKPLITTLLPKMIARINDWFEEVKAKRGKRPTAFQFLQEIKPEAVAYITIKTTLACLTSADNTTVQAVASAIGRAIEDEARFGRIRDLEAKHFKGNVEEQLNKRVGHVYKVAFMQVVEADMLSKGLLGGEAWSSWHKEDSIHVGVRCIEMLIESTGMVSLHRQNAGVVGQDSETIELAPEYAEAIATRAGALAGISPMFQPCVVPPKPWTGITGGGYWAAGRKPLQLVRTRSLAALRRYEEVSMPEVIKAVNIAQNTAWRINKKVLDVANAITQWQHCPVADVPAMDRGEMPARPLDIDTNEIALKAWKKEASAFYRKDKARVSRRLSMEFMLSQANKFANYKAIWFPQNMDWRGRVYAVPMFNPQGNDMTKGLLTFAQEKPIGEDGFYWLKIHGANTAGVDKVPFPQRIKFVEDNHTNIMECAKAPLENTWWAEQDSPFCFLAFCFEYAGVINHGLSYNCSLPLAFDGSCSGIQHFSAMLRDEIGGKAVNLLPSAEYQDIYRIVSDKVNEMLKQDLINGTSTTVETVTDKKTGEITQRTKYGTKVMAQWWLEHGVNRGVTKRSVMTLVYGSKEFGFRDQVLSDTIQPAIDNGKGDMFLNPNQAAGYMAKLIWNAVSGTVVAAVEAMNWLKSAAKLLAAEVKDPKTDTVLRGRCAVHWVTPDGFPVWQEYKKPIQTRLNLMFLGQFRLQPTINTNKDSEIDAHKQESGIAPNFVHSQDGNHLRMTVVWAHEKYGIESFALIHDSFGTIPADAANLFKAVRETMVSTYESCDVLADFYDQFADQLHESQLDKMPALPAKGNLNLRDILKSDFAFA

SEQ ID NO: 631 - DNA, 2670 bp, synthetic construct
  misc_feature 1..2670: note = Variant of RNA polymerase
  source 1..2670: mol_type = other DNA
atgcaccatcaccatcaccatatgaacacgattaacattgctaagaacgacttctctgacatcgaactggctgctatcccgttcaacactctggctgaccattacggtgagcgtttagctcgcgaacagttggcccttgagcatgagtcttacgagatgggtgaagcacgcttccgcaagatgtttgagcgtcaacttaaagctggtgaggttgcggataacgctgccgccaagcctctcatcactaccctactccctaagatgattgcacgcatcaacgactggtttgaggaagtgaaagctaagcgcggcaagcgcccgacagccttccagttcctgcaagaaatcaagccggaagccgtagcgtacatcaccattaagaccactctggcttgcctaaccagtgcggacaatacaaccgttcaggctgtagcaagcgcaatcggtcgggccattgaggacgaggctcgcttcggtcgtatccgtgaccttgaagctaagcacttcaagaagaacgttgaggaacaactcaacaagcgcgtagggcacgtctacaaagcagcatttatgcaagttgtcgaggcagacatgctctctaagggtctactcggtggcgaggcgtggtcttcgtggcataaggaagactctattcatgtaggagtacgctgcatcgagatgctcattgagtcaaccggaatggttagcttacaccgccaaaatgctggcgtagtaggtcaagactctgagactatcgaactcgcacctgaatacgctgaggctatcgcaacccgtgcaggtgcgctggctggcatctctccgatgttccaaccttgcgtagttcctcctaagccgtggactggcattactggtggtggctattgggctgcggggcgcaaacccctgcagttagtacgtactcgcagtctggcggcgcttcgccgctatgaagaagtgtcgatgccggaggtcatcaaagcagtcaacattgcgcagaatacagcatggcgtattaacaagaaagttctcgacgtagcgaataccatcacccaatggcagcactgtccagtcgcggatgtgcctgcgatggatcgtggcgaaatgccagctcgtccgttggacatcgataccaacgagattgcacttaaagcgtggaagaaagaagcttccgcgttctaccgcaaagacaaagcacgcgttagccgtcgtctgtcaatggagtttatgttatctcaggcgaacaagtttgcgaattataaagcaatctggtttccgcaaaacatggattggcgtgggcgcgtgtacgctgtcccgatgttcaatcctcagggcaacgatatgacgaaaggcctgctgacctttgcgcaggagaaacccattggtgaagacggcttctattggctcaagattcatggcgcaaatacagctggagtggataaagtaccgtttccacaacgcatcaaatttgttgaggataaccatacgaatattatggaatgcgcgaaagcaccgctggaaaacacttggtgggcggaacaggactcgccgttctgttttctggcgttctgctttgagtatgctggcgtcatcaatagtggtctgtcgtacaactgtagcttgcctctggcatttgatggtagttgctccggcctgcaacatttctcagcgatgttacgcgacgaaattggcggcaaagctgtgaatctcctcccatctgcggaataccaggatatttatcgtatcgtcagcgacaaagttaacgaggtgctgaaacaagatctgattaacggtacctctaccaccgtggaaacggtgactgataagaagacaggcgaaattacccaacgcacgaaatacgggaccaaagttatggcacagtggtggttagaacacggtgtgaatcgtggcgtcacgaaacgctcggttatgactttggtgtatgggagcaaagagtttggattccgcgatcaagtgctgagtgacaccattcaaccggcgatcgataacggcaaaggtgacatgtttctgaatccgaatcaggctgctggttacatggcgaaactgatctggaacgcagtgtccgggaccgtagtcgcagcagttgaggcgatgaactggctgaaaagtgcggcgaaattacttgctgctgaagtgaaggatcctaagacggatacagttctgcgtggccgctgcgcagtacattgggtgactcccgacggcttccctgtgtggcaggaatacaagaagcctattcagacgcgcttgaacctgatgttcctcggtcagttccgcttacagcctaccattaacaccaacaaagatagcgagattgatgcacacaaacaggagtctggtatcgctcctaactttgtacacagccaagacggtaaccaccttcgtatgactgtagtgtgggcacacgagaagtacggaatcgaatcttttgcactgattcacgactccttcggtaccattccggctgacgctgcgaacctgttcaaagcagtgcgcgaaactatggtttcgacatatgagtcttgtgatgtactggctgatttctacgaccagttcgctgaccagttgcacgagtctcaattggacaaaatgccagcacttccggctaaaggtaacttgaacctccgtgacatcttaaaatcggacttcgcgttcgcg

SEQ ID NO: 632 - protein, 890 aa, synthetic construct
  REGION 1..890: note = Variant of RNA polymerase
MHHHHHHMNTINIAKNDFSDIELAAIPFNTLADHYGERLAREQLALEHESYEMGEARFRKMFERQLKAGEVADNAAAKPLITTLLPKMIARINDWFEEVKAKRGKRPTAFQFLQEIKPEAVAYITIKTTLACLTSADNTTVQAVASAIGRAIEDEARFGRIRDLEAKHFKKNVEEQLNKRVGHVYKAAFMQVVEADMLSKGLLGGEAWSSWHKEDSIHVGVRCIEMLIESTGMVSLHRQNAGVVGQDSETIELAPEYAEAIATRAGALAGISPMFQPCVVPPKPWTGITGGGYWAAGRKPLQLVRTRSLAALRRYEEVSMPEVIKAVNIAQNTAWRINKKVLDVANTITQWQHCPVADVPAMDRGEMPARPLDIDTNEIALKAWKKEASAFYRKDKARVSRRLSMEFMLSQANKFANYKAIWFPQNMDWRGRVYAVPMFNPQGNDMTKGLLTFAQEKPIGEDGFYWLKIHGANTAGVDKVPFPQRIKFVEDNHTNIMECAKAPLENTWWAEQDSPFCFLAFCFEYAGVINSGLSYNCSLPLAFDGSCSGLQHFSAMLRDEIGGKAVNLLPSAEYQDIYRIVSDKVNEVLKQDLINGTSTTVETVTDKKTGEITQRTKYGTKVMAQWWLEHGVNRGVTKRSVMTLVYGSKEFGFRDQVLSDTIQPAIDNGKGDMFLNPNQAAGYMAKLIWNAVSGTVVAAVEAMNWLKSAAKLLAAEVKDPKTDTVLRGRCAVHWVTPDGFPVWQEYKKPIQTRLNLMFLGQFRLQPTINTNKDSEIDAHKQESGIAPNFVHSQDGNHLRMTVVWAHEKYGIESFALIHDSFGTIPADAANLFKAVRETMVSTYESCDVLADFYDQFADQLHESQLDKMPALPAKGNLNLRDILKSDFAFA

SEQ ID NO: 633 - DNA, 2670 bp, synthetic construct
  misc_feature 1..2670: note = Variant of RNA polymerase
  source 1..2670: mol_type = other DNA
atgcaccatcaccatcaccatatgaacacgattaacattgctaagaacgacttctctgacatcgaactggctgctatcccgttcaacactctggctgaccattacggtgagcgtttagctcgcgaacagttggcccttgagcatgagtcttacgagatgggtgaagcacgcttccgcaagatgtttgagcgtcaacttaaagctggtgaggttgcggataacgctgccgccaagcctctcatcactaccctactccctaagatgattgcacgcatcaacgactggtttgaggaagtgaaagctaagcgcggcaagcgcccgacagccttccagttcctgcaagaaatcaagccggaagccgtagcgtacatcaccattaagaccactctggcttgcctaaccagtgcggacaatacaaccgttcaggctgtagcaagcgcaatcggtcgggccattgaggacgaggctcgcttcggtcgtatccgtgaccttgaagctaagcacttcaagaagaacgttgaggaacaactcaacaagcgcgtagggcacccgtacaagaaagcatttatgcaagttgtcgaggctgacatgctctctaagggtctactcggtggcgaggcgtggtcttcgtggcataaggaagactctattcatgtaggagtacgctgcatcgagatgctcattgagtcaaccggaatggttagcttacaccgccaaaatgctggcgtagtaggtcaagactctgagactatcgaactcgcacctgaatacgctgaggctatcgcaacccgtgcaggtgcgctggctggcatctctccgatgttccaaccttgcgtagttcctcctaagccgtggactggcattactggtggtggctattgggctgcggggcgcaaacccctgcagttagtacgtactcgcagtctggcggcgcttcgccgctatgaagaagtgtcgatgccggaggtcatcaaagcagtcaacattgcgcagaatacagcatggcgtattaacaagaaagttctcgacgtagcgaatgccatcacccaatggcagcactgtccagtcgcggatgtgcctgcgatggatcgtggcgaaatgccagctcgtccgttggacatcgataccaacgagattgcacttaaagcgtggaagaaagaagcttccgcgttctaccgcaaagacaaagcacgcgttagccgtcgtctgtcaatggagtttatgttatctcaggcgaacaagtttgcgaattataaagcaatctggtttccgcaaaacatggattggcgtgggcgcgtgtacgctgtcccgatgttcaatcctcagggcaacgatatgacgaaaggcctgctgacctttgcgcaggagaaacccattggtgaagacggcttctattggctcaagattcatggcgcaaatacagctggagtggataaagtaccgtttccacaacgcatcaaatttgttgaggataaccatacgaatattatggaatgcgcgaaagcaccgctggaaaacacttggtgggcggaacaggactcgccgttctgttttctggcgttctgctttgagtatgctggcgtcatcaatagtggtctgtcgtacaactgtagcttgcctctggcatttgatggtagttgctccggcctgcaacatttctcagcgatgttacgcgacgaaattggcggcaaagctgtgaatctcctcccatctgcggaataccaggatatttatcgtatcgtcagcgacaaagttaacgaggtactgaaacaagatctgattaacggtacctctaccaccgtggaaacggtgactgataagaagacaggcgaaattacccaacgcacgaaatacgggaccaaagttatggcacagtggtggttagaacacggtgtgaatcgtggcgtcacgaaacgctcggttatgactttggtgtatgggagcaaagagtttggattccgcgatcaagtgctgagtgacaccattcaaccggcgatcgataacggcaaaggtgacatgtttctgaatccgaatcaggctgctggttacatggcgaaactgatctggaacgcagtgtccgggaccgtagtcgcagcagttgaggcgatgaactggctgaaaagtgcggcgaaattacttgctgctgaagtgaaggatcctaagacggatacagttctgcgtggccgctgcgcagtacattgggtgactcccgacggcttccctgtgtggcaggaatacaagaagcctattcagacgcgcttgaacctgatgttcctcggtcagttccgcttacagcctaccattaacaccaacaaagatagcgagattgatgcacacaaacaggagtctggtatcgctcctaactttgtacacagccaagacggtaaccaccttcgtatgactgtagtgtgggcacacgagaagtacggaatcgaatcttttgcactgattcacgactccttcggtaccattccggctgacgctgcgaacctgttcaaagcagtgcgcgaaactatggtttcgacatatgagtcttgtgatgtactggctgatttctacgaccagttcgctgaccagttgcacgagtctcaattggacaaaatgccagcacttccggctaaaggtaacttgaacctccgtgacatcttaaaatcggacttcgcgttcgcg

SEQ ID NO: 634 - protein, 890 aa, synthetic construct
  REGION 1..890: note = Variant of RNA polymerase
MHHHHHHMNTINIAKNDFSDIELAAIPFNTLADHYGERLAREQLALEHESYEMGEARFRKMFERQLKAGEVADNAAAKPLITTLLPKMIARINDWFEEVKAKRGKRPTAFQFLQEIKPEAVAYITIKTTLACLTSADNTTVQAVASAIGRAIEDEARFGRIRDLEAKHFKKNVEEQLNKRVGHPYKKAFMQVVEADMLSKGLLGGEAWSSWHKEDSIHVGVRCIEMLIESTGMVSLHRQNAGVVGQDSETIELAPEYAEAIATRAGALAGISPMFQPCVVPPKPWTGITGGGYWAAGRKPLQLVRTRSLAALRRYEEVSMPEVIKAVNIAQNTAWRINKKVLDVANAITQWQHCPVADVPAMDRGEMPARPLDIDTNEIALKAWKKEASAFYRKDKARVSRRLSMEFMLSQANKFANYKAIWFPQNMDWRGRVYAVPMFNPQGNDMTKGLLTFAQEKPIGEDGFYWLKIHGANTAGVDKVPFPQRIKFVEDNHTNIMECAKAPLENTWWAEQDSPFCFLAFCFEYAGVINSGLSYNCSLPLAFDGSCSGLQHFSAMLRDEIGGKAVNLLPSAEYQDIYRIVSDKVNEVLKQDLINGTSTTVETVTDKKTGEITQRTKYGTKVMAQWWLEHGVNRGVTKRSVMTLVYGSKEFGFRDQVLSDTIQPAIDNGKGDMFLNPNQAAGYMAKLIWNAVSGTVVAAVEAMNWLKSAAKLLAAEVKDPKTDTVLRGRCAVHWVTPDGFPVWQEYKKPIQTRLNLMFLGQFRLQPTINTNKDSEIDAHKQESGIAPNFVHSQDGNHLRMTVVWAHEKYGIESFALIHDSFGTIPADAANLFKAVRETMVSTYESCDVLADFYDQFADQLHESQLDKMPALPAKGNLNLRDILKSDFAFA

SEQ ID NO: 635 - DNA, 2670 bp, synthetic construct
  misc_feature 1..2670: note = Variant of RNA polymerase
  source 1..2670: mol_type = other DNA
atgcaccatcaccatcaccatatgaacacgattaacattgctaagaacgacttctctgacatcgaactggctgctatcccgttcaacactctggctgaccattacggtgagcgtttagctcgcgaacagttggcccttgagcatgagtcttacgagatgggtgaagcacgcttccgcaagatgtttgagcgtcaacttaaagctggtgaggttgcggataacgctgccgccaagcctctcatcactaccctactccctaagatgattgcacgcatcaacgactggtttgaggaagtgaaagctaagcgcggcaagcgcccgacagccttccagttcctgcaagaaatcaagccggaagccgtagcgtacatcaccattaagaccactctggcttgcctaaccagtgcggacaatacaaccgttcaggctgtagcaagcgcaatcggtcgggccattgaggacgaggctcgcttcggtcgtatccgtgaccttgaagctaagcacttcaagggcaacgttgaggaacaactcaacaagcgcgtagggcacccgtacaagaaagcatttatgcaagttgtcgaggctgacatgctctctaagggtctactcggtggcgaggcgtggtcttcgtggcataaggaagactctattcatgtaggagtacgctgcatcgagatgctcattgagtcaaccggaatggttagcttacaccgccaaaatgctggcgtagtaggtcaagactctgagactatcgaactcgcacctgaatacgctgaggctatcgcaacccgtgcaggtgcgctggctggcatctctccgatgttccaaccttgcgtagttcctcctaagccgtggactggcattactggtggtggctattgggctgcggggcgcaaacccctgcagttagtacgtactcgcagtctggcggcgcttcgccgctatgaagaagtgtcgatgccggaggtcatcaaagcagtcaacattgcgcagaatacagcatggcgtattaacaagaaagttctcgacgtagcgaatgcaatcacccaatggcagcactgtccagtcgcggatgtgcctgcgatggatcgtggcgaaatgccagctcgtccgttggacatcgataccaacgagattgcacttaaagcgtggaagaaagaagcttccgcgttctaccgcaaagacaaagcacgcgttagccgtcgtctgtcaatggagtttatgttatctcaggcgaacaagtttgcgaatgagaaagcaatctggtttccgcaaaacatggattggcgtgggcgcgtgtacgctgtcccgatgttcaatcctcagggcaacgatatgacgaaaggcctgctgacctttgcgcaggagaaacccattggtgaagacggcttctattggctcaagattcatggcgcaaatacagctggagtggataaagtaccgtttccacaacgcatcaaatttgttgaggataaccatacgaatattatggaatgcgcgaaagcaccgctggaaaacacttggtgggcggaacaggactcgccgttctgttttctggcgttctgctttgagtatgctggcgtcatcaatcatggtctgtcgtacaactgtagcttgcctctggcatttgatggtagttgctccggcattcaacatttctcagcgatgttacgcgacgaaattggcgccaaagctgtgaatctcctcccatctgcggaataccaggatatttatcgtatcgtcagcgacaaagttaacgagcgtctgaaacaagatctgattaacggtacctctaccaccgtggaaacggtgactgataagaagacaggcgaaattacccaacgcacgaaatacgggaccaaagttatggcacagtggtggttagaacacggtgtgaatcgtggcgtcacgaaacgctcggttatgactttggtgtatgggagcaaagagtttggattccgcgatcaagtgctgagtgacaccattcaaccggcgatcgataacggcaaaggtgacatgtttctgaatccgaatcaggctgctggttacatggcgaaactgatctggaacgcagtgtccgggaccgtagtcgcagcagttgaggcgatgaactggctgaaaagtgcggcgaaattacttgctgctgaagtgaaggatcctaagacggatacagttctgcgtggccgctgcgcagtacattgggtgactcccgacggcttccctgtgtggcaggaatacaagaagcctattcagacgcgcttgaacctgatgttcctcggtcagttccgcttacagcctaccattaacaccaacaaagatagcgagattgatgcacacaaacaggagtctggtatcgctcctaactttgtacacagccaagacggtaaccaccttcgtatgactgtagtgtgggcacacgagaagtacggaatcgaatcttttgcactgattcacgactccttcggtaccattccggctgacgctgcgaacctgttcaaagcagtgcgcgaaactatggtttcgacatatgagtcttgtgatgtactggctgatttctacgaccagttcgctgaccagttgcacgagtctcaattggacaaaatgccagcacttccggctaaaggtaacttgaacctccgtgacatcttaaaatcggacttcgcgttcgcg

SEQ ID NO: 636 - protein, 890 aa, synthetic construct
  REGION 1..890: note = Variant of RNA polymerase
MHHHHHHMNTINIAKNDFSDIELAAIPFNTLADHYGERLAREQLALEHESYEMGEARFRKMFERQLKAGEVADNAAAKPLITTLLPKMIARINDWFEEVKAKRGKRPTAFQFLQEIKPEAVAYITIKTTLACLTSADNTTVQAVASAIGRAIEDEARFGRIRDLEAKHFKGNVEEQLNKRVGHPYKKAFMQVVEADMLSKGLLGGEAWSSWHKEDSIHVGVRCIEMLIESTGMVSLHRQNAGVVGQDSETIELAPEYAEAIATRAGALAGISPMFQPCVVPPKPWTGITGGGYWAAGRKPLQLVRTRSLAALRRYEEVSMPEVIKAVNIAQNTAWRINKKVLDVANAITQWQHCPVADVPAMDRGEMPARPLDIDTNEIALKAWKKEASAFYRKDKARVSRRLSMEFMLSQANKFANEKAIWFPQNMDWRGRVYAVPMFNPQGNDMTKGLLTFAQEKPIGEDGFYWLKIHGANTAGVDKVPFPQRIKFVEDNHTNIMECAKAPLENTWWAEQDSPFCFLAFCFEYAGVINHGLSYNCSLPLAFDGSCSGIQHFSAMLRDEIGAKAVNLLPSAEYQDIYRIVSDKVNERLKQDLINGTSTTVETVTDKKTGEITQRTKYGTKVMAQWWLEHGVNRGVTKRSVMTLVYGSKEFGFRDQVLSDTIQPAIDNGKGDMFLNPNQAAGYMAKLIWNAVSGTVVAAVEAMNWLKSAAKLLAAEVKDPKTDTVLRGRCAVHWVTPDGFPVWQEYKKPIQTRLNLMFLGQFRLQPTINTNKDSEIDAHKQESGIAPNFVHSQDGNHLRMTVVWAHEKYGIESFALIHDSFGTIPADAANLFKAVRETMVSTYESCDVLADFYDQFADQLHESQLDKMPALPAKGNLNLRDILKSDFAFA

SEQ ID NO: 637 - DNA, 2670 bp, synthetic construct
  misc_feature 1..2670: note = Variant of RNA polymerase
  source 1..2670: mol_type = other DNA
atgcaccatcaccatcaccatatgaacacgattaacattgctaagaacgacttctctgacatcgaactggctgctatcccgttcaacactctggctgaccattacggtgagcgtttagctcgcgaacagttggcccttgagcatgagtcttacgagatgggtgaagcacgcttccgcaagatgtttgagcgtcaacttaaagctggtgaggttgcggataacgctgccgccaagcctctcatcactaccctactccctaagatgattgcacgcatcaacgactggtttgaggaagtgaaagctaagcgcggcaagcgcccgacagccttccagttcctgcaagaaatcaagccggaagccgtagcgtacatcaccattaagaccactctggcttgcctaaccagtgcggacaatacaaccgttcaggctgtagcaagcgcaatcggtcgggccattgaggacgaggctcgcttcggtcgtatccgtgaccttgaagctaagcacttcaagaaaaatgttgaggaacaactcaacaagcgcgtagggcacgtctacaagaaagcatttatgcaagttgtcgaggaagacatgctctctaagggtctactcggtggcgaggcgtggtcttcgtggcataaggaagactctattcatgtaggagtacgctgcatcgagatgctcattgagtcaaccggaatggttagcttacaccgccaaaatgctggcgtagtaggtcaagactctgagactatcgaactcgcacctgaatacgctgaggctatcgcaacccgtgcaggtgcgctggctggcatctctccgatgttccaaccttgcgtagttcctcctaagccgtggactggcattactggtggtggctattgggctgcggggcgcaaacccctgcagttagtacgtactcgcagtctggcggcgcttcgccgctatgaagaagtgtcgatgccggaggtcatcaaagcagtcaacattgcgcagaatacagcatggcgtattaacaagaaagttctcgacgtagcgaatgccatcacccaatggcagcactgtccagtcgcggatgtgcctgcgatggatcgtggcgaaatgccagctcgtccgttggacatcgataccaacgagattgcacttaaagcgtggaagaaagaagcttccgcgttctaccgcaaagacaaagcacgcgttagccgtcgtctgtcaatggagtttatgttatctcaggcgaacaagtttgcgaattataaagcaatctggtttccgcaaaacatggattggcgtgggcgcgtgtacgctgtcccgatgttcaatcctcagggcaacgatatgacgaaaggcctgctgacctttgcgcaggagaaacccattggtgaagacggcttctattggctcaagattcatggcgcaaatacagctggagtggataaagtaccgtttccacaacgcatcaaatttgttgaggataaccatacgaatattatggaatgcgcgaaagcaccgctggaaaacacttggtgggcggaacaggactcgccgttctgttttctggcgttctgctttgagtatgctggcgtcatcaatcacggtctgtcgtacaactgtagcttgcctctggcatttgatggtagttgctccggcattcaacatttctcagcgatgttacgcgacgaaattggcggcaaagctgtgaatctcctcccatctgcggaataccaggatatttatcgtatcgtcagcgacaaagttaacgagatgctgaaacaagatctgattaacggtacctctaccaccgtggaaacggtgactgataagaagacaggcgaaattacccaacgcacgaaatacgggaccaaagttatggcacagtggtggttagaacacggtgtgaatcgtggcgtcacgaaacgctcggttatgactttggtgtatgggagcaaagagtttggattccgcgatcaagtgctgagtgacaccattcaaccggcgatcgataacggcaaaggtgacatgtttctgaatccgaatcaggctgctggttacatggcgaaactgatctggaacgcagtgtccgggaccgtagtcgcagcagttgaggcgatgaactggctgaaaagtgcggcgaaattacttgctgctgaagtgaaggatcctaagacggatacagttctgcgtggccgctgcgcagtacattgggtgactcccgacggcttccctgtgtggcaggaatacaagaagcctattcagacgcgcttgaacctgatgttcctcggtcagttccgcttacagcctaccattaacaccaacaaagatagcgagattgatgcacacaaacaggagtctggtatcgctcctaactttgtacacagccaagacggtaaccaccttcgtatgactgtagtgtgggcacacgagaagtacggaatcgaatcttttgcactgattcacgactccttcggtaccattccggctgacgctgcgaacctgttcaaagcagtgcgcgaaactatggtttcgacatatgagtcttgtgatgtactggctgatttctacgaccagttcgctgaccagttgcacgagtctcaattggacaaaatgccagcacttccggctaaaggtaacttgaacctccgtgacatcttaaaatcggacttcgcgttcgcg

SEQ ID NO: 638 - protein, 890 aa, synthetic construct
  REGION 1..890: note = Variant of RNA polymerase
MHHHHHHMNTINIAKNDFSDIELAAIPFNTLADHYGERLAREQLALEHESYEMGEARFRKMFERQLKAGEVADNAAAKPLITTLLPKMIARINDWFEEVKAKRGKRPTAFQFLQEIKPEAVAYITIKTTLACLTSADNTTVQAVASAIGRAIEDEARFGRIRDLEAKHFKKNVEEQLNKRVGHVYKKAFMQVVEEDMLSKGLLGGEAWSSWHKEDSIHVGVRCIEMLIESTGMVSLHRQNAGVVGQDSETIELAPEYAEAIATRAGALAGISPMFQPCVVPPKPWTGITGGGYWAAGRKPLQLVRTRSLAALRRYEEVSMPEVIKAVNIAQNTAWRINKKVLDVANAITQWQHCPVADVPAMDRGEMPARPLDIDTNEIALKAWKKEASAFYRKDKARVSRRLSMEFMLSQANKFANYKAIWFPQNMDWRGRVYAVPMFNPQGNDMTKGLLTFAQEKPIGEDGFYWLKIHGANTAGVDKVPFPQRIKFVEDNHTNIMECAKAPLENTWWAEQDSPFCFLAFCFEYAGVINHGLSYNCSLPLAFDGSCSGIQHFSAMLRDEIGGKAVNLLPSAEYQDIYRIVSDKVNEMLKQDLINGTSTTVETVTDKKTGEITQRTKYGTKVMAQWWLEHGVNRGVTKRSVMTLVYGSKEFGFRDQVLSDTIQPAIDNGKGDMFLNPNQAAGYMAKLIWNAVSGTVVAAVEAMNWLKSAAKLLAAEVKDPKTDTVLRGRCAVHWVTPDGFPVWQEYKKPIQTRLNLMFLGQFRLQPTINTNKDSEIDAHKQESGIAPNFVHSQDGNHLRMTVVWAHEKYGIESFALIHDSFGTIPADAANLFKAVRETMVSTYESCDVLADFYDQFADQLHESQLDKMPALPAKGNLNLRDILKSDFAFA

SEQ ID NO: 639 - DNA, 2670 bp, synthetic construct
  misc_feature 1..2670: note = Variant of RNA polymerase
  source 1..2670: mol_type = other DNA
atgcaccatcaccatcaccatatgaacacgattaacattgctaagaacgacttctctgacatcgaactggctgctatcccgttcaacactctggctgaccattacggtgagcgtttagctcgcgaacagttggcccttgagcatgagtcttacgagatgggtgaagcacgcttccgcaagatgtttgagcgtcaacttaaagctggtgaggttgcggataacgctgccgccaagcctctcatcactaccctactccctaagatgattgcacgcatcaacgactggtttgaggaagtgaaagctaagcgcggcaagcgcccgacagccttccagttcctgcaagaaatcaagccggaagccgtagcgtacatcaccattaagaccactctggcttgcctaaccagtgcggacaatacaaccgttcaggctgtagcaagcgcaatcggtcgggccattgaggacgaggctcgcttcggtcgtatccgtgaccttgaagctaagcacgtcaagaaaaacgttgaggaacaactcaacaagcgcgtagggcacgtctacaagaaagcatttatgcaagttgtcgaggctgacatgctctctaagggtctactcggtggcgaggcgtggtcttcgtggcataaggaagactctattcatgtaggagtacgctgcatcgagatgctcattgagtcaaccggaatggttagcttacaccgccaaaatgctggcgtagtaggtcaagactctgagactatcgaactcgcacctgaatacgctgaggctatcgcaacccgtgcaggtgcgctggctggcatctctccgatgttccaaccttgcgtagttcctcctaagccgtggactggcattactggtggtggctattgggctgcggggcgcaaacccctgcagttagtacgtactcgcagtctggcggcgcttcgccgctatgaagaagtgtcgatgccggaggtcatcaaagcagtcaacattgcgcagaatacagcatggcgtattaacaagaaagttctcgacgtagcgaatgcaatcacccaatggcagcactgtccagtcgcggatgtgcctgcgatggatcgtggcgaaatgccagctcgtccgttggacatcgataccaacgagattgcacttaaagcgtggaagaaagaagcttccgcgttctaccgcaaagacaaagcacgcgttagccgtcgtctgtcaatggagtttatgttatctcaggcgaacaagtttgcgaattataaagcaatctggtttccgcaaaacatggattggcgtgggcgcgtgtacgctgtcccgatgttcaatcctcagggcaacgatatgacgaaaggcctgctgacctttgcgcaggagaaacccattggtgaagacggcttctattggctcaagattcatggcgcaaatacagctggagtggataaagtaccgtttccacaacgcatcaaatttgttgaggataaccatacgaatattatggaatgcgcgaaagcaccgctggaaaacacttggtgggcggaacaggactcgccgttctgttttctggcgttctgctttgagtatgctggcgtcatcaatcacggtctgtcgtacaactgtagcttgcctctggcatttgatggtagttgctccggcattcaacatttctcagcgatgttacgcgacgaaattggcggcaaagctgtgaatctcctcccatctgcggaataccaggatatttatcgtatcgtcagcgacaaagttaacgaggtactgaaacaagatctgattaacggtacctctaccaccgtggaaacggtgactgataagaagacaggcgaaattacccaacgcacgaaatacgggaccaaagaaatggcacagtggtggttagaacacggtgtgaatcgtggcgtcacgaaacgctcggttatgactttggtgtatgggagcaaagagtttggattccgcgatcaagtgctgagtgacaccattcaaccggcgatcgataacggcaaaggtgacatgtttctgaatccgaatcaggctgctggttacatggcgaaactgatctggaacgcagtgtccgggaccgtagtcgcagcagttgaggcgatgaactggctgaaaagtgcggcgaaattacttgctgctgaagtgaaggatccaaagacgggcacagttctgcgtggccgctgcgcagtacattgggtgactcccgacggcttccctgtgtggcaggaatacaagaagcctattcagacgcgcttgaacctgatgttcctcggtcagttccgcttacagcctaccattaacaccaacaaagatagcgagattgatgcacacaaacaggagtctggtatcgctcctaactttgtacacagccaagacggtaaccaccttcgtatgactgtagtgtgggcacacgagaagtacggaatcgaatcttttgcactgattcacgactccttcggtaccattccggctgacgctgcgaacctgttcaaagcagtgcgcgaaactatggtttcgacatatgagtcttgtgatgtactggctgatttctacgaccagttcgctgaccagttgcacgagtctcaattggacaaaatgccagcacttccggctaaaggtaacttgaacctccgtgacatcttaaaatcggacttcgcgttcgcg

SEQ ID NO: 640 - protein, 890 aa, synthetic construct
  REGION 1..890: note = Variant of RNA polymerase
MHHHHHHMNTINIAKNDFSDIELAAIPFNTLADHYGERLAREQLALEHESYEMGEARFRKMFERQLKAGEVADNAAAKPLITTLLPKMIARINDWFEEVKAKRGKRPTAFQFLQEIKPEAVAYITIKTTLACLTSADNTTVQAVASAIGRAIEDEARFGRIRDLEAKHVKKNVEEQLNKRVGHVYKKAFMQVVEADMLSKGLLGGEAWSSWHKEDSIHVGVRCIEMLIESTGMVSLHRQNAGVVGQDSETIELAPEYAEAIATRAGALAGISPMFQPCVVPPKPWTGITGGGYWAAGRKPLQLVRTRSLAALRRYEEVSMPEVIKAVNIAQNTAWRINKKVLDVANAITQWQHCPVADVPAMDRGEMPARPLDIDTNEIALKAWKKEASAFYRKDKARVSRRLSMEFMLSQANKFANYKAIWFPQNMDWRGRVYAVPMFNPQGNDMTKGLLTFAQEKPIGEDGFYWLKIHGANTAGVDKVPFPQRIKFVEDNHTNIMECAKAPLENTWWAEQDSPFCFLAFCFEYAGVINHGLSYNCSLPLAFDGSCSGIQHFSAMLRDEIGGKAVNLLPSAEYQDIYRIVSDKVNEVLKQDLINGTSTTVETVTDKKTGEITQRTKYGTKEMAQWWLEHGVNRGVTKRSVMTLVYGSKEFGFRDQVLSDTIQPAIDNGKGDMFLNPNQAAGYMAKLIWNAVSGTVVAAVEAMNWLKSAAKLLAAEVKDPKTGTVLRGRCAVHWVTPDGFPVWQEYKKPIQTRLNLMFLGQFRLQPTINTNKDSEIDAHKQESGIAPNFVHSQDGNHLRMTVVWAHEKYGIESFALIHDSFGTIPADAANLFKAVRETMVSTYESCDVLADFYDQFADQLHESQLDKMPALPAKGNLNLRDILKSDFAFA

SEQ ID NO: 641 - DNA, 2670 bp, synthetic construct
  misc_feature 1..2670: note = Variant of RNA polymerase
  source 1..2670: mol_type = other DNA
atgcaccatcaccatcaccatatgaacacgattaacattgctaagaacgacttctctgacatcgaactggctgctatcccgttcaacactctggctgaccattacggtgagcgtttagctcgcgaacagttggcccttgagcatgagtcttacgagatgggtgaagcacgcttccgcaagatgtttgagcgtcaacttaaagctggtgaggttgcggataacgctgccgccaagcctctcatcactaccctactccctaagatgattgcacgcatcaacgactggtttgaggaagtgaaagctaagcgcggcaagcgcccgacagccttccagttcctgcaagaaatcaagccggaagccgtagcgtacatcaccattaagaccactctggcttgcctaaccagtgcggacaatacaaccgttcaggctgtagcaagcgcaatcggtcgggccattgaggacgaggctcgcttcggtcgtatccgtgaccttgaagctaagcacttcaagaaaaacgttgaggaacaactcaacaagcgcgtagggcacgtctacaaagtagcatttatgcaagttgtcgaggctgacatgctctctaagggtctactcggtggcgaggcgtggtcttcgtggcataaggaagactctattcatgtaggagtacgctgcatcgagatgctcattgagtcaaccggaatggttagcttacaccgccaaaatgctggcgtagtaggtcaagactctgagactatcgaactcgcacctgaatacgctgaggctatcgcaacccgtgcaggtgcgctggctggcatctctccgatgttccaaccttgcgtagttcctcctaagccgtggactggcattactggtggtggctattgggctgcggggcgcaaacccctgcagttagtacgtactcgcagtctggcggcgcttcgccgctatgaagaagtgtcgatgccggaggtcatcaaagcagtcaacattgcgcagaatacagcatggcgtattaacaagaaagttctcgacgtagcgaatgccatcacccaatggcagcactgtccagtcgcggatgtgcctgcgatggatcgtggcgaaatgccagctcgtccgttggacatcgataccaacgagattgcacttaaagcgtggaagaaagaagcttccgcgttctaccgcaaagacaaagcacgcgttagccgtcgtctgtcaatggagtttatgttatctcaggcgaacaagtttgcgaattataaagcaatctggtttccgcaaaacatggattggcgtgggcgcgtgtacgctgtcccgatgttcaatcctcagggcaacgatatgacgaaaggcctgctgacctttgcgcaggagaaacccattggtgaagacggcttctattggctcaagattcatggcgcaaatacagctggagtggataaagtaccgtttccacaacgcatcaaatttgttgaggataaccatacgaatattatggaatgcgcgaaagcaccgctggaaaacacttggtgggcggaacaggactcgccgttctgttttctggcgttctgctttgagtatgctggcgtcatcaatcatggtctgtcgtacaactgtagcttgcctctggcatttgatggtagttgctccggcatccaacatttctcagcgatgttacgcgacgaaattggcggcaaagctgtgaatctcctcccatctgcggaataccaggatatttatcgtatcgtcagcgacaaagttaacgagatgctgaaacaagatctgattaacggtacctctaccaccgtggaaacggtgactgataagaagacaggcgaaattacccaacgcacgaaatacgggaccaaagttatggcacagtggtggttagaacacggtgtgaatcgtggcgtcacgaaacgctcggttatgactttggtgtatgggagcaaagagtttggattccgcgatcaagtgctgagtgacaccattcaaccggcgatcgataacggcaaaggtgacatgtttctgaatccgaatcaggctgctggttacatggcgaaactgatctggaacgcagtgtccgggaccgtagtcgcagcagttgaggcgatgaactggctgaaaagtgcggcgaaattacttgctgctgaagtgaaggatcctaagacggatacagttctgcgtggccgctgcgcagtacattgggtgactcccgacggcttccctgtgtggcaggaatacaagaagcctattcagacgcgcttgaacctgatgttcctcggtcagttccgcttacagcctaccattaacaccaacaaagatagcgagattgatgcacacaaacaggagtctggtatcgctcctaactttgtacacagccaagacggtaaccaccttcgtatgactgtagtgtgggcacacgagaagtacggaatcgaatcttttgcactgattcacgactccttcggtaccattccggctgacgctgcgaacctgttcaaagcagtgcgcgaaactatggtttcgacatatgagtcttgtgatgtactggctgatttctacgaccagttcgctgaccagttgcacgagtctcaattggacaaaatgccagcacttccggctaaaggtaacttgaacctccgtgacatcttaaaatcggacttcgcgttcgcg

SEQ ID NO: 642 - protein, 890 aa, synthetic construct
  REGION 1..890: note = Variant of RNA polymerase
MHHHHHHMNTINIAKNDFSDIELAAIPFNTLADHYGERLAREQLALEHESYEMGEARFRKMFERQLKAGEVADNAAAKPLITTLLPKMIARINDWFEEVKAKRGKRPTAFQFLQEIKPEAVAYITIKTTLACLTSADNTTVQAVASAIGRAIEDEARFGRIRDLEAKHFKKNVEEQLNKRVGHVYKVAFMQVVEADMLSKGLLGGEAWSSWHKEDSIHVGVRCIEMLIESTGMVSLHRQNAGVVGQDSETIELAPEYAEAIATRAGALAGISPMFQPCVVPPKPWTGITGGGYWAAGRKPLQLVRTRSLAALRRYEEVSMPEVIKAVNIAQNTAWRINKKVLDVANAITQWQHCPVADVPAMDRGEMPARPLDIDTNEIALKAWKKEASAFYRKDKARVSRRLSMEFMLSQANKFANYKAIWFPQNMDWRGRVYAVPMFNPQGNDMTKGLLTFAQEKPIGEDGFYWLKIHGANTAGVDKVPFPQRIKFVEDNHTNIMECAKAPLENTWWAEQDSPFCFLAFCFEYAGVINHGLSYNCSLPLAFDGSCSGIQHFSAMLRDEIGGKAVNLLPSAEYQDIYRIVSDKVNEMLKQDLINGTSTTVETVTDKKTGEITQRTKYGTKVMAQWWLEHGVNRGVTKRSVMTLVYGSKEFGFRDQVLSDTIQPAIDNGKGDMFLNPNQAAGYMAKLIWNAVSGTVVAAVEAMNWLKSAAKLLAAEVKDPKTDTVLRGRCAVHWVTPDGFPVWQEYKKPIQTRLNLMFLGQFRLQPTINTNKDSEIDAHKQESGIAPNFVHSQDGNHLRMTVVWAHEKYGIESFALIHDSFGTIPADAANLFKAVRETMVSTYESCDVLADFYDQFADQLHESQLDKMPALPAKGNLNLRDILKSDFAFA

SEQ ID NO: 643 - DNA, 2670 bp, synthetic construct
  misc_feature 1..2670: note = Variant of RNA polymerase
  source 1..2670: mol_type = other DNA
atgcaccatcaccatcaccatatgaacacgattaacattgctaagaacgacttctctgacatcgaactggctgctatcccgttcaacactctggctgaccattacggtgagcgtttagctcgcgaacagttggcccttgagcatgagtcttacgagatgggtgaagcacgcttccgcaagatgtttgagcgtcaacttaaagctggtgaggttgcggataacgctgccgccaagcctctcatcactaccctactccctaagatgattgcacgcatcaacgactggtttgaggaagtgaaagctaagcgcggcaagcgcccgacagccttccagttcctgcaagaaatcaagccggaagccgtagcgtacatcaccattaagaccactctggcttgcctaaccagtgcggacaatacaaccgttcaggctgtagcaagcgcaatcggtcgggccattgaggacgaggctcgcttcggtcgtatccgtgaccttgaagctaagcacttcaagaagaacgttgaggaacaactcaacaagcgcgtagggcacccgtacaagaaagcatttatgcaagttgtcgaggctgacatgctctctaagggtctactcggtggcgaggcgtggtcttcgtggcataaggaagactctattcatgtaggagtacgctgcatcgagatgctcattgagtcaaccggaatggttagcttacaccgccaaaatgctggcgtagtaggtcaagactctgagactatcgaactcgcacctgaatacgctgaggctatcgcaacccgtgcaggtgcgctggctggcatctctccgatgttccaaccttgcgtagttcctcctaagccgtggactggcattactggtggtggctattgggctgcggggcgcaaacccctgcagttagtacgtactcgcagtctggcggcgcttcgccgctatgaagaagtgtcgatgccggaggtcatcaaagcagtcaacattgcgcagaatacagcatggcgtattaacaagaaagttctcgacgtagcgaatgccatcacccaatggcagcactgtccagtcgcggatgtgcctgcgatggatcgtggcgaaatgccagctcgtccgttggacatcgataccaacgagattgcacttaaagcgtggaagaaagaagcttccgcgttctaccgcaaagacaaagcacgcgttagccgtcgtctgtcaatggagtttatgttatctcaggcgaacaagtttgcgaattataaagcaatctggtttccgcaaaacatggattggcgtgggcgcgtgtacgctgtcccgatgttcaatcctcagggcaacgatatgacgaaaggcctgctgacctttgcgcaggagaaacccattggtgaagacggcttctattggctcaagattcatggcgcaaatacagctggagtggataaagtaccgtttccacaacgcatcaaatttgttgaggataaccatacgaatattatggaatgcgcgaaagcaccgctggaaaacacttggtgggcggaacaggactcgccgttctgttttctggcgttctgctttgagtatgctggcgtcatcaatcatggtctgtcgtacaactgtagcttgcctctggcatttgatggtagttgctccggcctgcaacatttctcagcgatgttacgcgacgaaattggcggcaaagctgtgaatctcctcccatctgcggaataccaggatatttatcgtatcgtcagcgacaaagttaacgagcgtctgaaacaagatctgattaacggtacctctaccaccgtggaaacggtgactgataagaagacaggcgaaattacccaacgcacgaaatacgggaccaaagttatggcacagtggtggttagaacacggtgtgaatcgtggcgtcacgaaacgctcggttatgactttggtgtatgggagcaaagagtttggattccgcgatcaagtgctgagtgacaccattcaaccggcgatcgataacggcaaaggtgacatgtttctgaatccgaatcaggctgctggttacatggcgaaactgatctggaacgcagtgtccgggaccgtagtcgcagcagttgaggcgatgaactggctgaaaagtgcggcgaaattacttgctgctgaagtgaaggatcctaagacggatacagttctgcgtggccgctgcgcagtacattgggtgactcccgacggcttccctgtgtggcaggaatacaagaagcctattcagacgcgcttgaacctgatgttcctcggtcagttccgcttacagcctaccattaacaccaacaaagatagcgagattgatgcacacaaacaggagtctggtatcgctcctaactttgtacacagccaagacggtaaccaccttcgtatgactgtagtgtgggcacacgagaagtacggaatcgaatcttttgcactgattcacgactccttcggtaccattccggctgacgctgcgaacctgttcaaagcagtgcgcgaaactatggtttcgacatatgagtcttgtgatgtactggctgatttctacgaccagttcgctgaccagttgcacgagtctcaattggacaaaatgccagcacttccggctaaaggtaacttgaacctccgtgacatcttaaaatcggacttcgcgttcgcg

SEQ ID NO: 644 - protein, 890 aa, synthetic construct
  REGION 1..890: note = Variant of RNA polymerase
MHHHHHHMNTINIAKNDFSDIELAAIPFNTLADHYGERLAREQLALEHESYEMGEARFRKMFERQLKAGEVADNAAAKPLITTLLPKMIARINDWFEEVKAKRGKRPTAFQFLQEIKPEAVAYITIKTTLACLTSADNTTVQAVASAIGRAIEDEARFGRIRDLEAKHFKKNVEEQLNKRVGHPYKKAFMQVVEADMLSKGLLGGEAWSSWHKEDSIHVGVRCIEMLIESTGMVSLHRQNAGVVGQDSETIELAPEYAEAIATRAGALAGISPMFQPCVVPPKPWTGITGGGYWAAGRKPLQLVRTRSLAALRRYEEVSMPEVIKAVNIAQNTAWRINKKVLDVANAITQWQHCPVADVPAMDRGEMPARPLDIDTNEIALKAWKKEASAFYRKDKARVSRRLSMEFMLSQANKFANYKAIWFPQNMDWRGRVYAVPMFNPQGNDMTKGLLTFAQEKPIGEDGFYWLKIHGANTAGVDKVPFPQRIKFVEDNHTNIMECAKAPLENTWWAEQDSPFCFLAFCFEYAGVINHGLSYNCSLPLAFDGSCSGLQHFSAMLRDEIGGKAVNLLPSAEYQDIYRIVSDKVNERLKQDLINGTSTTVETVTDKKTGEITQRTKYGTKVMAQWWLEHGVNRGVTKRSVMTLVYGSKEFGFRDQVLSDTIQPAIDNGKGDMFLNPNQAAGYMAKLIWNAVSGTVVAAVEAMNWLKSAAKLLAAEVKDPKTDTVLRGRCAVHWVTPDGFPVWQEYKKPIQTRLNLMFLGQFRLQPTINTNKDSEIDAHKQESGIAPNFVHSQDGNHLRMTVVWAHEKYGIESFALIHDSFGTIPADAANLFKAVRETMVSTYESCDVLADFYDQFADQLHESQLDKMPALPAKGNLNLRDILKSDFAFA

SEQ ID NO: 645 - DNA, 2670 bp, synthetic construct
  misc_feature 1..2670: note = Variant of RNA polymerase
  source 1..2670: mol_type = other DNA
atgcaccatcaccatcaccatatgaacacgattaacattgctaagaacgacttctctgacatcgaactggctgctatcccgttcaacactctggctgaccattacggtgagcgtttagctcgcgaacagttggcccttgagcatgagtcttacgagatgggtgaagcacgcttccgcaagatgtttgagcgtcaacttaaagctggtgaggttgcggataacgctgccgccaagcctctcatcactaccctactccctaagatgattgcacgcatcaacgactggtttgaggaagtgaaagctaagcgcggcaagcgcccgacagccttccagttcctgcaagaaatcaagccggaagccgtagcgtacatcaccattaagaccactctggcttgcctaaccagtgcggacaatacaaccgttcaggctgtagcaagcgcaatcggtcgggccattgaggacgaggctcgcttcggtcgtatccgtgaccttgaagctaagcacgtcaagaaaaacgttgaggaacaactcaacaagcgcgtagggcacgtctacaagaaagcaattatgcaagttgtcgaggctgacatgctctctaagggtctactcggtggcgaggcgtggtcttcgtggcataaggaagactctattcatgtaggagtacgctgcatcgagatgctcattgagtcaaccggaatggttagcttacaccgccaaaatgctggcgtagtaggtcaagactctgagactatcgaactcgcacctgaatacgctgaggctatcgcaacccgtgcaggtgcgctggctggcatctctccgatgttccaaccttgcgtagttcctcctaagccgtggactggcattactggtggtggctattgggctgcggggcgcaaacccctgcagttagtacgtactcgcagtctggcggcgcttcgccgctatgaagaagtgtcgatgccggaggtcatcaaagcagtcaacattgcgcagaatacagcatggcgtattaacaagaaagttctcgacgtagcgaatgcaatcacccaatggcagcactgtccagtcgcggatgtgcctgcgatggatcgtggcgaaatgccagctcgtccgttggacatcgataccaacgagattgcacttaaagcgtggaagaaagaagcttccgcgttctaccgcaaagacaaagcacgcgttagccgtcgtctgtcaatggagtttatgttatctcaggcgaacaagtttgcgaattataaagcaatctggtttccgcaaaacatggattggcgtgggcgcgtgtacgctgtcccgatgttcaatcctcagggcaacgatatgacgaaaggcctgctgacctttgcgcaggagaaacccattggtgaagacggcttctattggctcaagattcatggcgcaaatacagctggagtggataaagtaccgtttccacaacgcatcaaatttgttgaggataaccatacgaatattatggaatgcgcgaaagcaccgctggaaaacacttggtgggcggaacaggactcgccgttctgttttctggcgttctgctttgagtatgctggcgtcatcaatcacggtctgtcgtacaactgtagcttgcctctggcatttgatggtagttgctccggcattcaacatttctcagcgatgttacgcgacgaaattggcggcaaagctgtgaatctcctcccatctgcggaataccaggatatttatcgtatcgtcagcgacaaagttaacgaggtactgaaacaagatctgattaacggtacctctaccaccgtggaaacggtgactgataagaagacaggcgaaattacccaacgcacgaaatacgggaccaaagaaatggcacagtggtggttagaacacggtgtgaatcgtggcgtcacgaaacgctcggttatgactttggtgtatgggagcaaagagtttggattccgcgatcaagtgctgagtgacaccattcaaccggcgatcgataacggcaaaggtgacatgtttctgaatccgaatcaggctgctggttacatggcgaaactgatctggaacgcagtgtccgggaccgtagtcgcagcagttgaggcgatgaactggctgaaaagtgcggcgaaattacttgctgctgaagtgaaggatcctaagacggatacagttctgcgtggccgctgcgcagtacattgggtgactcccgacggcttccctgtgtggcaggaatacaagaagcctattcagacgcgcttgaacctgatgttcctcggtcagttccgcttacagcctaccattaacaccaacaaagatagcgagattgatgcacacaaacaggagtctggtatcgctcctaactttgtacacagccaagacggtaaccaccttcgtatgactgtagtgtgggcacacgagaagtacggaatcgaatcttttgcactgattcacgactccttcggtaccattccggctgacgctgcgaacctgttcaaagcagtgcgcgaaactatggtttcgacatatgagtcttgtgatgtactggctgatttctacgaccagttcgctgaccagttgcacgagtctcaattggacaaaatgccagcacttccggctaaaggtaacttgaacctccgtgacatcttaaaatcggacttcgcgttcgcg

SEQ ID NO: 646 - protein, 890 aa, synthetic construct
  REGION 1..890: note = Variant of RNA polymerase
MHHHHHHMNTINIAKNDFSDIELAAIPFNTLADHYGERLAREQLALEHESYEMGEARFRKMFERQLKAGEVADNAAAKPLITTLLPKMIARINDWFEEVKAKRGKRPTAFQFLQEIKPEAVAYITIKTTLACLTSADNTTVQAVASAIGRAIEDEARFGRIRDLEAKHVKKNVEEQLNKRVGHVYKKAIMQVVEADMLSKGLLGGEAWSSWHKEDSIHVGVRCIEMLIESTGMVSLHRQNAGVVGQDSETIELAPEYAEAIATRAGALAGISPMFQPCVVPPKPWTGITGGGYWAAGRKPLQLVRTRSLAALRRYEEVSMPEVIKAVNIAQNTAWRINKKVLDVANAITQWQHCPVADVPAMDRGEMPARPLDIDTNEIALKAWKKEASAFYRKDKARVSRRLSMEFMLSQANKFANYKAIWFPQNMDWRGRVYAVPMFNPQGNDMTKGLLTFAQEKPIGEDGFYWLKIHGANTAGVDKVPFPQRIKFVEDNHTNIMECAKAPLENTWWAEQDSPFCFLAFCFEYAGVINHGLSYNCSLPLAFDGSCSGIQHFSAMLRDEIGGKAVNLLPSAEYQDIYRIVSDKVNEVLKQDLINGTSTTVETVTDKKTGEITQRTKYGTKEMAQWWLEHGVNRGVTKRSVMTLVYGSKEFGFRDQVLSDTIQPAIDNGKGDMFLNPNQAAGYMAKLIWNAVSGTVVAAVEAMNWLKSAAKLLAAEVKDPKTDTVLRGRCAVHWVTPDGFPVWQEYKKPIQTRLNLMFLGQFRLQPTINTNKDSEIDAHKQESGIAPNFVHSQDGNHLRMTVVWAHEKYGIESFALIHDSFGTIPADAANLFKAVRETMVSTYESCDVLADFYDQFADQLHESQLDKMPALPAKGNLNLRDILKSDFAFA

SEQ ID NO: 647 - DNA, 2670 bp, synthetic construct
  misc_feature 1..2670: note = Variant of RNA polymerase
  source 1..2670: mol_type = other DNA
atgcaccatcaccatcaccatatgaacacgattaacattgctaagaacgacttctctgacatcgaactggctgctatcccgttcaacactctggctgaccattacggtgagcgtttagctcgcgaacagttggcccttgagcatgagtcttacgagatgggtgaagcacgcttccgcaagatgtttgagcgtcaacttaaagctggtgaggttgcggataacgctgccgccaagcctctcatcactaccctactccctaagatgattgcacgcatcaacgactggtttgaggaagtgaaagctaagcgcggcaagcgcccgacagccttccagttcctgcaagaaatcaagccggaagccgtagcgtacatcaccattaagaccactctggcttgcctaaccagtgcggacaatacaaccgttcaggctgtagcaagcgcaatcggtcgggccattgaggacgaggctcgcttcggtcgtatccgtgaccttgaagctaagcacttcaagaaaaacgttgaggaacaactcaacaagcgcgtagggcacgtctacaaagcagcatttatgcaagttgtcgaggctgacatgctctctaagggtctactcggtggcgaggcgtggtcttcgtggcataaggaagactctattcatgtaggagtacgctgcatcgagatgctcattgagtcaaccggaatggttagcttacaccgccaaaatgctggcgtagtaggtcaagactctgagactatcgaactcgcacctgaatacgctgaggctatcgcaacccgtgcaggtgcgctggctggcatctctccgatgttccaaccttgcgtagttcctcctaagccgtggactggcattactggtggtggctattgggctgcggggcgcaaacccctgcagttagtacgtactcgcagtctggcggcgcttcgccgctatgaagaagtgtcgatgccggaggtcatcaaagcagtcaacattgcgcagaatacagcatggcgtattaacaagaaagttctcgacgtagcgaatgcaatcacccaatggcagcactgtccagtcgcggatgtgcctgcgatggatcgtggcgaaatgccagctcgtccgttggacatcgataccaacgagattgcacttaaagcgtggaagaaagaagcttccgcgttctaccgcaaagacaaagcacgcgttagccgtcgtctgtcaatggagtttatgttatctcaggcgaacaagtttgcgaatgagaaagcaatctggtttccgcaaaacatggattggcgtgggcgcgtgtacgctgtcccgatgttcaatcctcagggcaacgatatgacgaaaggcctgctgacctttgcgcaggagaaacccattggtgaagacggcttctattggctcaagattcatggcgcaaatacagctggagtggataaagtaccgtttccacaacgcatcaaatttgttgaggataaccatacgaatattatggaatgcgcgaaagcaccgctggaaaacacttggtgggcggaacaggactcgccgttctgttttctggcgttctgctttgagtatgctggcgtcatcaatcatggtctgtcgtacaactgtagcttgcctctggcatttgatggtagttgctccggcctgcaacatttctcagcgatgttacgcgacgaaattggcggcaaagctgtgaatctcctcccatctgcggaataccaggatatttatcgtatcgtcagcgacaaagttaacgaggtgctgaaacaagatctgattaacggtacctctaccaccgtggaaacggtgactgataagaagacaggcgaaattacccaacgcacgaaatacgggaccaaagttatggcacagtggtggttagaacacggtgtgaatcgtggcgtcacgaaacgctcggttatgactttggtgtatgggagcaaagagtttggattccgcgatcaagtgctgagtgacaccattcaaccggcgatcgataacggcaaaggtgacatgtttctgaatccgaatcaggctgctggttacatggcgaaactgatctggaacgcagtgtccgggaccgtagtcgcagcagttgaggcgatgaactggctgaaaagtgcggcgaaattacttgctgctgaagtgaaggatcctaagacggatacagttctgcgtggccgctgcgcagtacattgggtgactcccgacggcttccctgtgtggcaggaatacaagaagcctattcagacgcgcttgaacctgatgttcctcggtcagttccgcttacagcctaccattaacaccaacaaagatagcgagattgatgcacacaaacaggagtctggtatcgctcctaactttgtacacagccaagacggtaaccaccttcgtatgactgtagtgtgggcacacgagaagtacggaatcgaatcttttgcactgattcacgactccttcggtaccattccggctgacgctgcgaacctgttcaaagcagtgcgcgaaactatggtttcgacatatgagtcttgtgatgtactggctgatttctacgaccagttcgctgaccagttgcacgagtctcaattggacaaaatgccagcacttccggctaaaggtaacttgaacctccgtgacatcttaaaatcggacttcgcgttcgcg

SEQ ID NO: 648 - protein, 890 aa, synthetic construct
  REGION 1..890: note = Variant of RNA polymerase
MHHHHHHMNTINIAKNDFSDIELAAIPFNTLADHYGERLAREQLALEHESYEMGEARFRKMFERQLKAGEVADNAAAKPLITTLLPKMIARINDWFEEVKAKRGKRPTAFQFLQEIKPEAVAYITIKTTLACLTSADNTTVQAVASAIGRAIEDEARFGRIRDLEAKHFKKNVEEQLNKRVGHVYKAAFMQVVEADMLSKGLLGGEAWSSWHKEDSIHVGVRCIEMLIESTGMVSLHRQNAGVVGQDSETIELAPEYAEAIATRAGALAGISPMFQPCVVPPKPWTGITGGGYWAAGRKPLQLVRTRSLAALRRYEEVSMPEVIKAVNIAQNTAWRINKKVLDVANAITQWQHCPVADVPAMDRGEMPARPLDIDTNEIALKAWKKEASAFYRKDKARVSRRLSMEFMLSQANKFANEKAIWFPQNMDWRGRVYAVPMFNPQGNDMTKGLLTFAQEKPIGEDGFYWLKIHGANTAGVDKVPFPQRIKFVEDNHTNIMECAKAPLENTWWAEQDSPFCFLAFCFEYAGVINHGLSYNCSLPLAFDGSCSGLQHFSAMLRDEIGGKAVNLLPSAEYQDIYRIVSDKVNEVLKQDLINGTSTTVETVTDKKTGEITQRTKYGTKVMAQWWLEHGVNRGVTKRSVMTLVYGSKEFGFRDQVLSDTIQPAIDNGKGDMFLNPNQAAGYMAKLIWNAVSGTVVAAVEAMNWLKSAAKLLAAEVKDPKTDTVLRGRCAVHWVTPDGFPVWQEYKKPIQTRLNLMFLGQFRLQPTINTNKDSEIDAHKQESGIAPNFVHSQDGNHLRMTVVWAHEKYGIESFALIHDSFGTIPADAANLFKAVRETMVSTYESCDVLADFYDQFADQLHESQLDKMPALPAKGNLNLRDILKSDFAFA

SEQ ID NO: 649 - DNA, 2670 bp, synthetic construct
  misc_feature 1..2670: note = Variant of RNA polymerase
  source 1..2670: mol_type = other DNA
atgcaccatcaccatcaccatatgaacacgattaacattgctaagaacgacttctctgacatcgaactggctgctatcccgttcaacactctggctgaccattacggtgagcgtttagctcgcgaacagttggcccttgagcatgagtcttacgagatgggtgaagcacgcttccgcaagatgtttgagcgtcaacttaaagctggtgaggttgcggataacgctgccgccaagcctctcatcactaccctactccctaagatgattgcacgcatcaacgactggtttgaggaagtgaaagctaagcgcggcaagcgcccgacagccttccagttcctgcaagaaatcaagccggaagccgtagcgtacatcaccattaagaccactctggcttgcctaaccagtgcggacaatacaaccgttcaggctgtagcaagcgcaatcggtcgggccattgaggacgaggctcgcttcggtcgtatccgtgaccttgaagctaagcacttcaagaaaaacgttgaggaacaactcaacaagcgcgtagggcacgtctacaagaaagcatttatgcaagttgtcgaggctgacatgctctctaagggtctactcggtggcgaggcgtggtcttcgtggcataaggaagactctattcatgtaggagtacgctgcatcgagatgctcattgagtcaaccggaatggttagcttacaccgccaaaatgctggcgtagtaggtcaagactctgagactatcgaactcgcacctgaatacgctgaggctatcgcaacccgtgcaggtgcgctggctggcatctctccgatgttccaaccttgcgtagttcctcctaagccgtggactggcattactggtggtggctattgggctgcggggcgcaaacccctgcagttagtacgtactcgcagtctggcggcgcttcgccgctatgaagaagtgtcgatgccggaggtcatcaaagcagtcaacattgcgcagaatacagcatggcgtattaacaagaaagttctcgacgtagcgaatgcaatcacccaatggcagcactgtccagtcgcggatgtgcctgcgatggatcgtggcgaaatgccagctcgtccgttggacatcgataccaacgagattgcacttaaagcgtggaagaaagaagcttccgcgttctaccgcaaagacaaagcacgcgttagccgtcgtctgtcaatggagtttatgttatctcaggcgaacaagtttgcgaattataaagcaatctggtttccgcaaaacatggattggcgtgggcgcgtgtacgctgtcccgatgttcaatcctcagggcaacgatatgacgaaaggcctgctgacctttgcgcaggagaaacccattggtgaagacggcttctattggctcaagattcatggcgcaaatacagctggagtggataaagtaccgtttccacaacgcatcaaatttgttgaggataaccatacgaatattatggaatgcgcgaaagcaccgctggaaaacacttggtgggcggaacaggactcgccgttctgttttctggcgttctgctttgagtatgctggcgtcatcaatcatggtctgtcgtacaactgtagcttgcctctggcatttgatggtagttgctccggcattcaacatttctcagcgatgttacgcgacgaaattggcggcaaagctgtgaatctcctcccatctgcggaataccaggatatttatcgtatcgtcagcgacaaagttaacgagatgctgaaacaagatctgattaacggtacctctaccaccgtggaaacggtgactgataagaagacaggcgaaattacccaacgcacgaaatacgggaccaaagttatggcacagtggtggttagaacacggtgtgaatcgtggcgtcacgaaacgctcggttatgactttggtgtatgggagcaaagagtttggattccgcgatcaagtgctgagtgacaccattcaaccggcgatcgataacggcaaaggtgacatgtttctgaatccgaatcaggctgctggttacatggcgaaactgatctggaacgcagtgtccgggaccgtagtcgcagcagttgaggcgatgaactggctgaaaagtgcggcgaaattacttgctgctgaagtgaaggatcctaagacggatacagttctgcgtggccgctgcgcagtacattgggtgactcccgacggcttccctgtgtggcaggaatacaagaagcctattcagacgcgcttgaacctgatgttcctcggtcagttccgcttacagcctaccattaacaccaacaaagatagcgagattgatgcacacaaacaggagtctggtatcgctcctaactttgtacacagccaagacggtaaccaccttcgtatgactgtagtgtgggcacacgagaagtacggaatcgaatcttttgcactgattcacgactccttcggtaccattccggctgacgctgcgaacctgttcaaagcagtgcgcgaaactatggtttcgacatatgagtcttgtgatgtactggctgatttctacgaccagttcgctgaccagttgcacgagtctcaattggacaaaatgccagcacttccggctaaaggtaacttgaacctccgtgacatcttaaaatcggacttcgcgttcgcg

SEQ ID NO: 650 - protein, 890 aa, synthetic construct
  REGION 1..890: note = Variant of RNA polymerase
MHHHHHHMNTINIAKNDFSDIELAAIPFNTLADHYGERLAREQLALEHESYEMGEARFRKMFERQLKAGEVADNAAAKPLITTLLPKMIARINDWFEEVKAKRGKRPTAFQFLQEIKPEAVAYITIKTTLACLTSADNTTVQAVASAIGRAIEDEARFGRIRDLEAKHFKKNVEEQLNKRVGHVYKKAFMQVVEADMLSKGLLGGEAWSSWHKEDSIHVGVRCIEMLIESTGMVSLHRQNAGVVGQDSETIELAPEYAEAIATRAGALAGISPMFQPCVVPPKPWTGITGGGYWAAGRKPLQLVRTRSLAALRRYEEVSMPEVIKAVNIAQNTAWRINKKVLDVANAITQWQHCPVADVPAMDRGEMPARPLDIDTNEIALKAWKKEASAFYRKDKARVSRRLSMEFMLSQANKFANYKAIWFPQNMDWRGRVYAVPMFNPQGNDMTKGLLTFAQEKPIGEDGFYWLKIHGANTAGVDKVPFPQRIKFVEDNHTNIMECAKAPLENTWWAEQDSPFCFLAFCFEYAGVINHGLSYNCSLPLAFDGSCSGIQHFSAMLRDEIGGKAVNLLPSAEYQDIYRIVSDKVNEMLKQDLINGTSTTVETVTDKKTGEITQRTKYGTKVMAQWWLEHGVNRGVTKRSVMTLVYGSKEFGFRDQVLSDTIQPAIDNGKGDMFLNPNQAAGYMAKLIWNAVSGTVVAAVEAMNWLKSAAKLLAAEVKDPKTDTVLRGRCAVHWVTPDGFPVWQEYKKPIQTRLNLMFLGQFRLQPTINTNKDSEIDAHKQESGIAPNFVHSQDGNHLRMTVVWAHEKYGIESFALIHDSFGTIPADAANLFKAVRETMVSTYESCDVLADFYDQFADQLHESQLDKMPALPAKGNLNLRDILKSDFAFA

SEQ ID NO: 651 - DNA, 2670 bp, synthetic construct
  misc_feature 1..2670: note = Variant of RNA polymerase
  source 1..2670: mol_type = other DNA
atgcaccatcaccatcaccatatgaacacgattaacattgctaagaacgacttctctgacatcgaactggctgctatcccgttcaacactctggctgaccattacggtgagcgtttagctcgcgaacagttggcccttgagcatgagtcttacgagatgggtgaagcacgcttccgcaagatgtttgagcgtcaacttaaagctggtgaggttgcggataacgctgccgccaagcctctcatcactaccctactccctaagatgattgcacgcatcaacgactggtttgaggaagtgaaagctaagcgcggcaagcgcccgacagccttccagttcctgcaagaaatcaagccggaagccgtagcgtacatcaccattaagaccactctggcttgcctaaccagtgcggacaatacaaccgttcaggctgtagcaagcgcaatcggtcgggccattgaggacgaggctcgcttcggtcgtatccgtgaccttgaagctaagcacttcaagaagaacgttgaggaacaactcaacaagcgcgtagggcacgtgtacaagaaagcatttatgcaagttgtcgaggctgacatgctctctaagggtctactcggtggcgaggcgtggtcttcgtggcataaggaagactctattcatgtaggagtacgctgcatcgagatgctcattgagtcaaccggaatggttagcttacaccgccaaaatgctggcgtagtaggtcaagactctgagactatcgaactcgcacctgaatacgctgaggctatcgcaacccgtgcaggtgcgctggctggcatctctccgatgttccaaccttgcgtagttcctcctaagccgtggactggcattactggtggtggctattgggctgcggggcgcaaacccctgcagttagtacgtactcgcagtctggcggcgcttcgccgctatgaagaagtgtcgatgccggaggtcatcaaagcagtcaacattgcgcagaatacagcatggcgtattaacaagaaagttctcgacgtagcgaatgccatcacccaatggcagcactgtccagtcgcggatgtgcctgcgatggatcgtggcgaaatgccagctcgtccgttggacatcgataccaacgagattgcacttaaagcgtggaagaaagaagcttccgcgttctaccgcaaagacaaagcacgcgttagccgtcgtctgtcaatggagtttatgttatctcaggcgaacaagtttgcgaattataaagcaatctggtttccgcaaaacatggattggcgtgggcgcgtgtacgctgtcccgatgttcaatcctcagggcaacgatatgacgaaaggcctgctgacctttgcgcaggagaaacccattggtgaagacggcttctattggctcaagattcatggcgcaaatacagctggagtggataaagtaccgtttccacaacgcatcaaatttgttgaggataaccatacgaatattatggaatgcgcgaaagcaccgctggaaaacacttggtgggcggaacaggactcgccgttctgttttctggcgttctgctttgagtatgctggcgtcatcaatagtggtctgtcgtacaactgtagcttgcctctggcatttgatggtagttgctccggcattcaacatttctcagcgatgttacgcgacgaaattggcgccaaagctgtgaatctcctcccatctgcggaataccaggatatttatcgtatcgtcagcgacaaagttaacgagcgtctgaaacaagatctgattaacggtacctctaccaccgtggaaacggtgactgataagaagacaggcgaaattacccaacgcacgaaatacgggaccaaagttatggcacagtggtggttagaacacggtgtgaatcgtggcgtcacgaaacgctcggttatgactttggtgtatgggagcaaagagtttggattccgcgatcaagtgctgagtgacaccattcaaccggcgatcgataacggcaaaggtgacatgtttctgaatccgaatcaggctgctggttacatggcgaaactgatctggaacgcagtgtccgggaccgtagtcgcagcagttgaggcgatgaactggctgaaaagtgcggcgaaattacttgctgctgaagtgaaggatcctaagacggatacagttctgcgtggccgctgcgcagtacattgggtgactcccgacggcttccctgtgtggcaggaatacaagaagcctattcagacgcgcttgaacctgatgttcctcggtcagttccgcttacagcctaccattaacaccaacaaagatagcgagattgatgcacacaaacaggagtctggtatcgctcctaactttgtacacagccaagacggtaaccaccttcgtatgactgtagtgtgggcacacgagaagtacggaatcgaatcttttgcactgattcacgactccttcggtaccattccggctgacgctgcgaacctgttcaaagcagtgcgcgaaactatggtttcgacatatgagtcttgtgatgtactggctgatttctacgaccagttcgctgaccagttgcacgagtctcaattggacaaaatgccagcacttccggctaaaggtaacttgaacctccgtgacatcttaaaatcggacttcgcgttcgcg

SEQ ID NO: 652 - protein, 890 aa, synthetic construct
  REGION 1..890: note = Variant of RNA polymerase
MHHHHHHMNTINIAKNDFSDIELAAIPFNTLADHYGERLAREQLALEHESYEMGEARFRKMFERQLKAGEVADNAAAKPLITTLLPKMIARINDWFEEVKAKRGKRPTAFQFLQEIKPEAVAYITIKTTLACLTSADNTTVQAVASAIGRAIEDEARFGRIRDLEAKHFKKNVEEQLNKRVGHVYKKAFMQVVEADMLSKGLLGGEAWSSWHKEDSIHVGVRCIEMLIESTGMVSLHRQNAGVVGQDSETIELAPEYAEAIATRAGALAGISPMFQPCVVPPKPWTGITGGGYWAAGRKPLQLVRTRSLAALRRYEEVSMPEVIKAVNIAQNTAWRINKKVLDVANAITQWQHCPVADVPAMDRGEMPARPLDIDTNEIALKAWKKEASAFYRKDKARVSRRLSMEFMLSQANKFANYKAIWFPQNMDWRGRVYAVPMFNPQGNDMTKGLLTFAQEKPIGEDGFYWLKIHGANTAGVDKVPFPQRIKFVEDNHTNIMECAKAPLENTWWAEQDSPFCFLAFCFEYAGVINSGLSYNCSLPLAFDGSCSGIQHFSAMLRDEIGAKAVNLLPSAEYQDIYRIVSDKVNERLKQDLINGTSTTVETVTDKKTGEITQRTKYGTKVMAQWWLEHGVNRGVTKRSVMTLVYGSKEFGFRDQVLSDTIQPAIDNGKGDMFLNPNQAAGYMAKLIWNAVSGTVVAAVEAMNWLKSAAKLLAAEVKDPKTDTVLRGRCAVHWVTPDGFPVWQEYKKPIQTRLNLMFLGQFRLQPTINTNKDSEIDAHKQESGIAPNFVHSQDGNHLRMTVVWAHEKYGIESFALIHDSFGTIPADAANLFKAVRETMVSTYESCDVLADFYDQFADQLHESQLDKMPALPAKGNLNLRDILKSDFAFA

SEQ ID NO: 653 - DNA, 2670 bp, synthetic construct
  misc_feature 1..2670: note = Variant of RNA polymerase
  source 1..2670: mol_type = other DNA
atgcaccatcaccatcaccatatgaacacgattaacattgctaagaacgacttctctgacatcgaactggctgctatcccgttcaacactctggctgaccattacggtgagcgtttagctcgcgaacagttggcccttgagcatgagtcttacgagatgggtgaagcacgcttccgcaagatgtttgagcgtcaacttaaagctggtgaggttgcggataacgctgccgccaagcctctcatcactaccctactccctaagatgattgcacgcatcaacgactggtttgaggaagtgaaagctaagcgcggcaagcgcccgacagccttccagttcctgcaagaaatcaagccggaagccgtagcgtacatcaccattaagaccactctggcttgcctaaccagtgcggacaatacaaccgttcaggctgtagcaagcgcaatcggtcgggccattgaggacgaggctcgcttcggtcgtatccgtgaccttgaagctaagcacttcaagaaaaacgttgaggaacaactcaacaagcgcgtagggcacgtctacaagaaagcatttatgcaagttgtcgaggctgacatgctctctaagggtctactcggtggcgaggcgtggtcttcgtggcataaggaagactctattcatgtaggagtacgctgcatcgagatgctcattgagtcaaccggaatggttagcttacaccgccaaaatgctggcgtagtaggtcaagactctgagactatcgaactcgcacctgaatacgctgaggctatcgcaacccgtgcaggtgcgctggctggcatctctccgatgttccaaccttgcgtagttcctcctaagccgtggactggcattactggtggtggctattgggctgcggggcgcaaacccctgcagttagtacgtactcgcagtctggcggcgcttcgccgctatgaagaagtgtcgatgccggaggtcatcaaagcagtcaacattgcgcagaatacagcatggcgtattaacaagaaagttctcgacgtagcgaatgcaatcacccaatggcagcactgtccagtcgcggatgtgcctgcgatggatcgtggcgaaatgccagctcgtccgttggacatcgataccaacgagattgcacttaaagcgtggaagaaagaagcttccgcgttctaccgcaaagacaaagcacgcgttagccgtcgtctgtcaatggagtttatgttatctcaggcgaacaagtttgcgaatgagaaagcaatctggtttccgcaaaacatggattggcgtgggcgcgtgtacgctgtcccgatgttcaatcctcagggcaacgatatgacgaaaggcctgctgacctttgcgcaggagaaacccattggtgaagacggcttctattggctcaagattcatggcgcaaatacagctggagtggataaagtaccgtttccacaacgcatcaaatttgttgaggataaccatacgaatattatggaatgcgcgaaagcaccgctggaaaacacttggtgggcggaacaggactcgccgttctgttttctggcgttctgctttgagtatgctggcgtcatcaatcatggtctgtcgtacaactgtagcttgcctctggcatttgatggtagttgctccggcattcaacatttctcagcgatgttacgcgacgaaattggcgccaaagctgtgaatctcctcccatctgcggaataccaggatatttatcgtatcgtcagcgacaaagttaacgagatgctgaaacaagatctgattaacggtacctctaccaccgtggaaacggtgactgataagaagacaggcgaaattacccaacgcacgaaatacgggaccaaagttatggcacagtggtggttagaacacggtgtgaatcgtggcgtcacgaaacgctcggttatgactttggtgtatgggagcaaagagtttggattccgcgatcaagtgctgagtgacaccattcaaccggcgatcgataacggcaaaggtgacatgtttctgaatccgaatcaggctgctggttacatggcgaaactgatctggaacgcagtgtccgggaccgtagtcgcagcagttgaggcgatgaactggctgaaaagtgcggcgaaattacttgctgctgaagtgaaggatcctaagacggatacagttctgcgtggccgctgcgcagtacattgggtgactcccgacggcttccctgtgtggcaggaatacaagaagcctattcagacgcgcttgaacctgatgttcctcggtcagttccgcttacagcctaccattaacaccaacaaagatagcgagattgatgcacacaaacaggagtctggtatcgctcctaactttgtacacagccaagacggtaaccaccttcgtatgactgtagtgtgggcacacgagaagtacggaatcgaatcttttgcactgattcacgactccttcggtaccattccggctgacgctgcgaacctgttcaaagcagtgcgcgaaactatggtttcgacatatgagtcttgtgatgtactggctgatttctacgaccagttcgctgaccagttgcacgagtctcaattggacaaaatgccagcacttccggctaaaggtaacttgaacctccgtgacatcttaaaatcggacttcgcgttcgcg

SEQ ID NO: 654 - protein, 890 aa, synthetic construct
  REGION 1..890: note = Variant of RNA polymerase
MHHHHHHMNTINIAKNDFSDIELAAIPFNTLADHYGERLAREQLALEHESYEMGEARFRKMFERQLKAGEVADNAAAKPLITTLLPKMIARINDWFEEVKAKRGKRPTAFQFLQEIKPEAVAYITIKTTLACLTSADNTTVQAVASAIGRAIEDEARFGRIRDLEAKHFKKNVEEQLNKRVGHVYKKAFMQVVEADMLSKGLLGGEAWSSWHKEDSIHVGVRCIEMLIESTGMVSLHRQNAGVVGQDSETIELAPEYAEAIATRAGALAGISPMFQPCVVPPKPWTGITGGGYWAAGRKPLQLVRTRSLAALRRYEEVSMPEVIKAVNIAQNTAWRINKKVLDVANAITQWQHCPVADVPAMDRGEMPARPLDIDTNEIALKAWKKEASAFYRKDKARVSRRLSMEFMLSQANKFANEKAIWFPQNMDWRGRVYAVPMFNPQGNDMTKGLLTFAQEKPIGEDGFYWLKIHGANTAGVDKVPFPQRIKFVEDNHTNIMECAKAPLENTWWAEQDSPFCFLAFCFEYAGVINHGLSYNCSLPLAFDGSCSGIQHFSAMLRDEIGAKAVNLLPSAEYQDIYRIVSDKVNEMLKQDLINGTSTTVETVTDKKTGEITQRTKYGTKVMAQWWLEHGVNRGVTKRSVMTLVYGSKEFGFRDQVLSDTIQPAIDNGKGDMFLNPNQAAGYMAKLIWNAVSGTVVAAVEAMNWLKSAAKLLAAEVKDPKTDTVLRGRCAVHWVTPDGFPVWQEYKKPIQTRLNLMFLGQFRLQPTINTNKDSEIDAHKQESGIAPNFVHSQDGNHLRMTVVWAHEKYGIESFALIHDSFGTIPADAANLFKAVRETMVSTYESCDVLADFYDQFADQLHESQLDKMPALPAKGNLNLRDILKSDFAFA

SEQ ID NO: 655 - DNA, 2670 bp, synthetic construct
  misc_feature 1..2670: note = Variant of RNA polymerase
  source 1..2670: mol_type = other DNA
atgcaccatcaccatcaccatatgaacacgattaacattgctaagaacgacttctctgacatcgaactggctgctatcccgttcaacactctggctgaccattacggtgagcgtttagctcgcgaacagttggcccttgagcatgagtcttacgagatgggtgaagcacgcttccgcaagatgtttgagcgtcaacttaaagctggtgaggttgcggataacgctgccgccaagcctctcatcactaccctactccctaagatgattgcacgcatcaacgactggtttgaggaagtgaaagctaagcgcggcaagcgcccgacagccttccagttcctgcaagaaatcaagccggaagccgtagcgtacatcaccattaagaccactctggcttgcctaaccagtgcggacaatacaaccgttcaggctgtagcaagcgcaatcggtcgggccattgaggacgaggctcgcttcggtcgtatccgtgaccttgaagctaagcacttcaagaagaacgttgaggaacaactcaacaagcgcgtagggcacgtctacaaaaaagcatttatgcaagttgtggaggctgacatgctctctaagggtctactcggtggcgaggcgtggtcttcgtggcataaggaagactctattcatgtaggagtacgctgcatcgagatgctcattgagtcaaccggaatggttagcttacaccgccaaaatgctggcgtagtaggtcaagactctgagactatcgaactcgcacctgaatacgctgaggctatcgcaacccgtgcaggtgcgctggctggcatctctccgatgttccaaccttgcgtagttcctcctaagccgtggactggcattactggtggtggctattgggctgcggggcgcaaacccctgcagttagtacgtactcgcagtctggcggcgcttcgccgctatgaagaagtgtcgatgccggaggtcatcaaagcagtcaacattgcgcagaatacagcatggcgtattaacaagaaagttctcgacgtagcgaatgccatcacccaatggcagcactgtccagtcgcggatgtgcctgcgatggatcgtggcgaaatgccagctcgtccgttggacatcgataccaacgagattgcacttaaagcgtggaagaaagaagcttccgcgttctaccgcaaagacaaagcacgcgttagccgtcgtctgtcaatggagtttatgttatctcaggcgaacaagtttgcgaattataaagcaatctggtttccgcaaaacatggattggcgtgggcgcgtgtacgctgtcccgatgttcaatcctcagggcaacgatatgacgaaaggcctgctgacctttgcgcaggagaaacccattggtgaagacggcttctattggctcaagattcatggcgcaaatacagctggagtggataaagtaccgtttccacaacgcatcaaatttgttgaggataaccatacgaatattatggaatgcgcgaaagcaccgctggaaaacacttggtgggcggaacaggactcgccgttctgttttctggcgttctgctttgagtatgctggcgtcatcaatagtggtctgtcgtacaactgtagcttgcctctggcatttgatggtagttgctccggcatccaacatttctcagcgatgttacgcgacgaaattggcggcaaagctgtgaatctcctcccatctgcggaataccaggatatttatcgtatcgtcagcgacaaagttaacgagatgctgaaacaagatctgattaacggtacctctaccaccgtggaaacggtgactgataagaagacaggcgaaattacccaacgcacgaaatacgggaccaaagttatggcacagtggtggttagaacacggtgtgaatcgtggcgtcacgaaacgctcggttatgactttggtgtatgggagcaaagagtttggattccgcgatcaagtgctgagtgacaccattcaaccggcgatcgataacggcaaaggtgacatgtttctgaatccgaatcaggctgctggttacatggcgaaactgatctggaacgcagtgtccgggaccgtagtcgcagcagttgaggcgatgaactggctgaaaagtgcggcgaaattacttgctgctgaagtgaaggatcctaagacggatacagttctgcgtggccgctgcgcagtacattgggtgactcccgacggcttccctgtgtggcaggaatacaagaagcctattcagacgcgcttgaacctgatgttcctcggtcagttccgcttacagcctaccattaacaccaacaaagatagcgagattgatgcacacaaacaggagtctggtatcgctcctaactttgtacacagccaagacggtaaccaccttcgtatgactgtagtgtgggcacacgagaagtacggaatcgaatcttttgcactgattcacgactccttcggtaccattccggctgacgctgcgaacctgttcaaagcagtgcgcgaaactatggtttcgacatatgagtcttgtgatgtactggctgatttctacgaccagttcgctgaccagttgcacgagtctcaattggacaaaatgccagcacttccggctaaaggtaacttgaacctccgtgacatcttaaaatcggacttcgcgttcgcg

SEQ ID NO: 656 - protein, 890 aa, synthetic construct
  REGION 1..890: note = Variant of RNA polymerase
MHHHHHHMNTINIAKNDFSDIELAAIPFNTLADHYGERLAREQLALEHESYEMGEARFRKMFERQLKAGEVADNAAAKPLITTLLPKMIARINDWFEEVKAKRGKRPTAFQFLQEIKPEAVAYITIKTTLACLTSADNTTVQAVASAIGRAIEDEARFGRIRDLEAKHFKKNVEEQLNKRVGHVYKKAFMQVVEADMLSKGLLGGEAWSSWHKEDSIHVGVRCIEMLIESTGMVSLHRQNAGVVGQDSETIELAPEYAEAIATRAGALAGISPMFQPCVVPPKPWTGITGGGYWAAGRKPLQLVRTRSLAALRRYEEVSMPEVIKAVNIAQNTAWRINKKVLDVANAITQWQHCPVADVPAMDRGEMPARPLDIDTNEIALKAWKKEASAFYRKDKARVSRRLSMEFMLSQANKFANYKAIWFPQNMDWRGRVYAVPMFNPQGNDMTKGLLTFAQEKPIGEDGFYWLKIHGANTAGVDKVPFPQRIKFVEDNHTNIMECAKAPLENTWWAEQDSPFCFLAFCFEYAGVINSGLSYNCSLPLAFDGSCSGIQHFSAMLRDEIGGKAVNLLPSAEYQDIYRIVSDKVNEMLKQDLINGTSTTVETVTDKKTGEITQRTKYGTKVMAQWWLEHGVNRGVTKRSVMTLVYGSKEFGFRDQVLSDTIQPAIDNGKGDMFLNPNQAAGYMAKLIWNAVSGTVVAAVEAMNWLKSAAKLLAAEVKDPKTDTVLRGRCAVHWVTPDGFPVWQEYKKPIQTRLNLMFLGQFRLQPTINTNKDSEIDAHKQESGIAPNFVHSQDGNHLRMTVVWAHEKYGIESFALIHDSFGTIPADAANLFKAVRETMVSTYESCDVLADFYDQFADQLHESQLDKMPALPAKGNLNLRDILKSDFAFA

SEQ ID NO: 657 - DNA, 2670 bp, synthetic construct
  misc_feature 1..2670: note = Variant of RNA polymerase
  source 1..2670: mol_type = other DNA
atgcaccatcaccatcaccatatgaacacgattaacattgctaagaacgacttctctgacatcgaactggctgctatcccgttcaacactctggctgaccattacggtgagcgtttagctcgcgaacagttggcccttgagcatgagtcttacgagatgggtgaagcacgcttccgcaagatgtttgagcgtcaacttaaagctggtgaggttgcggataacgctgccgccaagcctctcatcactaccctactccctaagatgattgcacgcatcaacgactggtttgaggaagtgaaagctaagcgcggcaagcgcccgacagccttccagttcctgcaagaaatcaagccggaagccgtagcgtacatcaccattaagaccactctggcttgcctaaccagtgcggacaatacaaccgttcaggctgtagcaagcgcaatcggtcgggccattgaggacgaggctcgcttcggtcgtatccgtgaccttgaagctaagcacttcaagaaaattgttgaggaacaactcaacaagcgcgtagggcacgtctacaagaaagcatttatgcaagttgtcgaggctgacatgctctctaagggtctactcggtggcgaggcgtggtcttcgtggcataaggaagactctattcatgtaggagtacgctgcatcgagatgctcattgagtcaaccggaatggttagcttacaccgccaaaatgctggcgtagtaggtcaagactctgagactatcgaactcgcacctgaatacgctgaggctatcgcaacccgtgcaggtgcgctggctggcatctctccgatgttccaaccttgcgtagttcctcctaagccgtggactggcattactggtggtggctattgggctgcggggcgcaaacccctgcagttagtacgtactcgcagtctggcggcgcttcgccgctatgaagaagtgtcgatgccggaggtcatcaaagcagtcaacattgcgcagaatacagcatggcgtattaacaagaaagttctcgacgtagcgaatgccatcacccaatggcagcactgtccagtcgcggatgtgcctgcgatggatcgtggcgaaatgccagctcgtccgttggacatcgataccaacgagattgcacttaaagcgtggaagaaagaagcttccgcgttctaccgcaaagacaaagcacgcgttagccgtcgtctgtcaatggagtttatgttatctcaggcgaacaagtttgcgaatgagaaagcaatctggtttccgcaaaacatggattggcgtgggcgcgtgtacgctgtcccgatgttcaatcctcagggcaacgatatgacgaaaggcctgctgacctttgcgcaggagaaacccattggtgaagacggcttctattggctcaagattcatggcgcaaatacagctggagtggataaagtaccgtttccacaacgcatcaaatttgttgaggataaccatacgaatattatggaatgcgcgaaagcaccgctggaaaacacttggtgggcggaacaggactcgccgttctgttttctggcgttctgctttgagtatgctggcgtcatcaatcatggtctgtcgtacaactgtagcttgcctctggcatttgatggtagttgctccggcctgcaacatttctcagcgatgttacgcgacgaaattggcggcaaagctgtgaatctcctcccatctgcggaataccaggatatttatcgtatcgtcagcgacaaagttaacgagcgtctgaaacaagatctgattaacggtacctctaccaccgtggaaacggtgactgataagaagacaggcgaaattacccaacgcacgaaatacgggaccaaagttatggcacagtggtggttagaacacggtgtgaatcgtggcgtcacgaaacgctcggttatgactttggtgtatgggagcaaagagtttggattccgcgatcaagtgctgagtgacaccattcaaccggcgatcgataacggcaaaggtgacatgtttctgaatccgaatcaggctgctggttacatggcgaaactgatctggaacgcagtgtccgggaccgtagtcgcagcagttgaggcgatgaactggctgaaaagtgcggcgaaattacttgctgctgaagtgaaggatcctaagacggatacagttctgcgtggccgctgcgcagtacattgggtgactcccgacggcttccctgtgtggcaggaatacaagaagcctattcagacgcgcttgaacctgatgttcctcggtcagttccgcttacagcctaccattaacaccaacaaagatagcgagattgatgcacacaaacaggagtctggtatcgctcctaactttgtacacagccaagacggtaaccaccttcgtatgactgtagtgtgggcacacgagaagtacggaatcgaatcttttgcactgattcacgactccttcggtaccattccggctgacgctgcgaacctgttcaaagcagtgcgcgaaactatggtttcgacatatgagtcttgtgatgtactggctgatttctacgaccagttcgctgaccagttgcacgagtctcaattggacaaaatgccagcacttccggctaaaggtaacttgaacctccgtgacatcttaaaatcggacttcgcgttcgcg

SEQ ID NO: 658 - protein, 890 aa, synthetic construct
  REGION 1..890: note = Variant of RNA polymerase
MHHHHHHMNTINIAKNDFSDIELAAIPFNTLADHYGERLAREQLALEHESYEMGEARFRKMFERQLKAGEVADNAAAKPLITTLLPKMIARINDWFEEVKAKRGKRPTAFQFLQEIKPEAVAYITIKTTLACLTSADNTTVQAVASAIGRAIEDEARFGRIRDLEAKHFKKIVEEQLNKRVGHVYKKAFMQVVEADMLSKGLLGGEAWSSWHKEDSIHVGVRCIEMLIESTGMVSLHRQNAGVVGQDSETIELAPEYAEAIATRAGALAGISPMFQPCVVPPKPWTGITGGGYWAAGRKPLQLVRTRSLAALRRYEEVSMPEVIKAVNIAQNTAWRINKKVLDVANAITQWQHCPVADVPAMDRGEMPARPLDIDTNEIALKAWKKEASAFYRKDKARVSRRLSMEFMLSQANKFANEKAIWFPQNMDWRGRVYAVPMFNPQGNDMTKGLLTFAQEKPIGEDGFYWLKIHGANTAGVDKVPFPQRIKFVEDNHTNIMECAKAPLENTWWAEQDSPFCFLAFCFEYAGVINHGLSYNCSLPLAFDGSCSGLQHFSAMLRDEIGGKAVNLLPSAEYQDIYRIVSDKVNERLKQDLINGTSTTVETVTDKKTGEITQRTKYGTKVMAQWWLEHGVNRGVTKRSVMTLVYGSKEFGFRDQVLSDTIQPAIDNGKGDMFLNPNQAAGYMAKLIWNAVSGTVVAAVEAMNWLKSAAKLLAAEVKDPKTDTVLRGRCAVHWVTPDGFPVWQEYKKPIQTRLNLMFLGQFRLQPTINTNKDSEIDAHKQESGIAPNFVHSQDGNHLRMTVVWAHEKYGIESFALIHDSFGTIPADAANLFKAVRETMVSTYESCDVLADFYDQFADQLHESQLDKMPALPAKGNLNLRDILKSDFAFA

SEQ ID NO: 659 - DNA, 2670 bp, synthetic construct
  misc_feature 1..2670: note = Variant of RNA polymerase
  source 1..2670: mol_type = other DNA
atgcaccatcaccatcaccatatgaacacgattaacattgctaagaacgacttctctgacatcgaactggctgctatcccgttcaacactctggctgaccattacggtgagcgtttagctcgcgaacagttggcccttgagcatgagtcttacgagatgggtgaagcacgcttccgcaagatgtttgagcgtcaacttaaagctggtgaggttgcggataacgctgccgccaagcctctcatcactaccctactccctaagatgattgcacgcatcaacgactggtttgaggaagtgaaagctaagcgcggcaagcgcccgacagccttccagttcctgcaagaaatcaagccggaagccgtagcgtacatcaccattaagaccactctggcttgcctaaccagtgcggacaatacaaccgttcaggctgtagcaagcgcaatcggtcgggccattgaggacgaggctcgcttcggtcgtatccgtgaccttgaagctaagcacttcaagaaaattgttgaggaacaactcaacaagcgcgtagggcacccgtacaagaaagcatttatgcaagttgtcgaggctgacatgctctctaagggtctactcggtggcgaggcgtggtcttcgtggcataaggaagactctattcatgtaggagtacgctgcatcgagatgctcattgagtcaaccggaatggttagcttacaccgccaaaatgctggcgtagtaggtcaagactctgagactatcgaactcgcacctgaatacgctgaggctatcgcaacccgtgcaggtgcgctggctggcatctctccgatgttccaaccttgcgtagttcctcctaagccgtggactggcattactggtggtggctattgggctgcggggcgcaaacccctgcagttagtacgtactcgcagtctggcggcgcttcgccgctatgaagaagtgtcgatgccggaggtcatcaaagcagtcaacattgcgcagaatacagcatggcgtattaacaagaaagttctcgacgtagcgaatgccatcacccaatggcagcactgtccagtcgcggatgtgcctgcgatggatcgtggcgaaatgccagctcgtccgttggacatcgataccaacgagattgcacttaaagcgtggaagaaagaagcttccgcgttctaccgcaaagacaaagcacgcgttagccgtcgtctgtcaatggagtttatgttatctcaggcgaacaagtttgcgaattataaagcaatctggtttccgcaaaacatggattggcgtgggcgcgtgtacgctgtcccgatgttcaatcctcagggcaacgatatgacgaaaggcctgctgacctttgcgcaggagaaacccattggtgaagacggcttctattggctcaagattcatggcgcaaatacagctggagtggataaagtaccgtttccacaacgcatcaaatttgttgaggataaccatacgaatattatggaatgcgcgaaagcaccgctggaaaacacttggtgggcggaacaggactcgccgttctgttttctggcgttctgctttgagtatgctggcgtcatcaatagtggtctgtcgtacaactgtagcttgcctctggcatttgatggtagttgctccggcctgcaacatttctcagcgatgttacgcgacgaaattggcggcaaagctgtgaatctcctcccatctgcggaataccaggatatttatcgtatcgtcagcgacaaagttaacgaggtactgaaacaagatctgattaacggtacctctaccaccgtggaaacggtgactgataagaagacaggcgaaattacccaacgcacgaaatacgggaccaaagttatggcacagtggtggttagaacacggtgtgaatcgtggcgtcacgaaacgctcggttatgactttggtgtatgggagcaaagagtttggattccgcgatcaagtgctgagtgacaccattcaaccggcgatcgataacggcaaaggtgacatgtttctgaatccgaatcaggctgctggttacatggcgaaactgatctggaacgcagtgtccgggaccgtagtcgcagcagttgaggcgatgaactggctgaaaagtgcggcgaaattacttgctgctgaagtgaaggatcctaagacggatacagttctgcgtggccgctgcgcagtacattgggtgactcccgacggcttccctgtgtggcaggaatacaagaagcctattcagacgcgcttgaacctgatgttcctcggtcagttccgcttacagcctaccattaacaccaacaaagatagcgagattgatgcacacaaacaggagtctggtatcgctcctaactttgtacacagccaagacggtaaccaccttcgtatgactgtagtgtgggcacacgagaagtacggaatcgaatcttttgcactgattcacgactccttcggtaccattccggctgacgctgcgaacctgttcaaagcagtgcgcgaaactatggtttcgacatatgagtcttgtgatgtactggctgatttctacgaccagttcgctgaccagttgcacgagtctcaattggacaaaatgccagcacttccggctaaaggtaacttgaacctccgtgacatcttaaaatcggacttcgcgttcgcg

SEQ ID NO: 660 - protein, 890 aa, synthetic construct
  REGION 1..890: note = Variant of RNA polymerase
MHHHHHHMNTINIAKNDFSDIELAAIPFNTLADHYGERLAREQLALEHESYEMGEARFRKMFERQLKAGEVADNAAAKPLITTLLPKMIARINDWFEEVKAKRGKRPTAFQFLQEIKPEAVAYITIKTTLACLTSADNTTVQAVASAIGRAIEDEARFGRIRDLEAKHFKKIVEEQLNKRVGHPYKKAFMQVVEADMLSKGLLGGEAWSSWHKEDSIHVGVRCIEMLIESTGMVSLHRQNAGVVGQDSETIELAPEYAEAIATRAGALAGISPMFQPCVVPPKPWTGITGGGYWAAGRKPLQLVRTRSLAALRRYEEVSMPEVIKAVNIAQNTAWRINKKVLDVANAITQWQHCPVADVPAMDRGEMPARPLDIDTNEIALKAWKKEASAFYRKDKARVSRRLSMEFMLSQANKFANYKAIWFPQNMDWRGRVYAVPMFNPQGNDMTKGLLTFAQEKPIGEDGFYWLKIHGANTAGVDKVPFPQRIKFVEDNHTNIMECAKAPLENTWWAEQDSPFCFLAFCFEYAGVINSGLSYNCSLPLAFDGSCSGLQHFSAMLRDEIGGKAVNLLPSAEYQDIYRIVSDKVNEVLKQDLINGTSTTVETVTDKKTGEITQRTKYGTKVMAQWWLEHGVNRGVTKRSVMTLVYGSKEFGFRDQVLSDTIQPAIDNGKGDMFLNPNQAAGYMAKLIWNAVSGTVVAAVEAMNWLKSAAKLLAAEVKDPKTDTVLRGRCAVHWVTPDGFPVWQEYKKPIQTRLNLMFLGQFRLQPTINTNKDSEIDAHKQESGIAPNFVHSQDGNHLRMTVVWAHEKYGIESFALIHDSFGTIPADAANLFKAVRETMVSTYESCDVLADFYDQFADQLHESQLDKMPALPAKGNLNLRDILKSDFAFA

SEQ ID NO: 661 - DNA, 2670 bp, synthetic construct
  misc_feature 1..2670: note = Variant of RNA polymerase
  source 1..2670: mol_type = other DNA
atgcaccatcaccatcaccatatgaacacgattaacattgctaagaacgacttctctgacatcgaactggctgctatcccgttcaacactctggctgaccattacggtgagcgtttagctcgcgaacagttggcccttgagcatgagtcttacgagatgggtgaagcacgcttccgcaagatgtttgagcgtcaacttaaagctggtgaggttgcggataacgctgccgccaagcctctcatcactaccctactccctaagatgattgcacgcatcaacgactggtttgaggaagtgaaagctaagcgcggcaagcgcccgacagccttccagttcctgcaagaaatcaagccggaagccgtagcgtacatcaccattaagaccactctggcttgcctaaccagtgcggacaatacaaccgttcaggctgtagcaagcgcaatcggtcgggccattgaggacgaggctcgcttcggtcgtatccgtgaccttgaagctaagcacttcaagaagaacgttgaggaacaactcaacaagcgcgtagggcacgtctacaagaaagcatttatgcaagttgtcgaggctgacatgctctctaagggtctactcggtggcgaggcgtggtcttcgtggcataaggaagactctattcatgtaggagtacgctgcatcgagatgctcattgagtcaaccggaatggttagcttacaccgccaaaatgctggcgtagtaggtcaagactctgagactatcgaactcgcacctgaatacgctgaggctatcgcaacccgtgcaggtgcgctggctggcatctctccgatgttccaaccttgcgtagttcctcctaagccgtggactggcattactggtggtggctattgggctgcggggcgcaaacccctgcagttagtacgtactcgcagtctggcggcgcttcgccgctatgaagaagtgtcgatgccggaggtcatcaaagcagtcaacattgcgcagaatacagcatggcgtattaacaagaaagttctcgacgtagcgaatgcaatcacccaatggcagcactgtccagtcgcggatgtgcctgcgatggatcgtggcgaaatgccagctcgtccgttggacatcgataccaacgagattgcacttaaagcgtggaagaaagaagcttccgcgttctaccgcaaagacaaagcacgcgttagccgtcgtctgtcaatggagtttatgttatctcaggcgaacaagtttgcgaattataaagcaatctggtttccgcaaaacatggattggcgtgggcgcgtgtacgctgtcccgatgttcaatcctcagggcaacgatatgacgaaaggcctgctgacctttgcgcaggagaaacccattggtgaagacggcttctattggctcaagattcatggcgcaaatacagctggagtggataaagtaccgtttccacaacgcatcaaatttgttgaggataaccatacgaatattatggaatgcgcgaaagcaccgctggaaaacacttggtgggcggaacaggactcgccgttctgttttctggcgttctgctttgagtatgctggcgtcatcaatagtggtctgtcgtacaactgtagcttgcctctggcatttgatggtagttgctccggcatccaacatttctcagcgatgttacgcgacgaaattggcggcaaagctgtgaatctcctcccatctgcggaataccaggatatttatcgtatcgtcagcgacaaagttaacgaggcgctgaaacaagatctgattaacggtacctctaccaccgtggaaacggtgactgataagaagacaggcgaaattacccaacgcacgaaatacgggaccaaagttatggcacagtggtggttagaacacggtgtgaatcgtggcgtcacgaaacgctcggttatgactttggtgtatgggagcaaagagtttggattccgcgatcaagtgctgagtgacaccattcaaccggcgatcgataacggcaaaggtgacatgtttctgaatccgaatcaggctgctggttacatggcgaaactgatctggaacgcagtgtccgggaccgtagtcgcagcagttgaggcgatgaactggctgaaaagtgcggcgaaattacttgctgctgaagtgaaggatcctaagacggatacagttctgcgtggccgctgcgcagtacattgggtgactcccgacggcttccctgtgtggcaggaatacaagaagcctattcagacgcgcttgaacctgatgttcctcggtcagttccgcttacagcctaccattaacaccaacaaagatagcgagattgatgcacacaaacaggagtctggtatcgctcctaactttgtacacagccaagacggtaaccaccttcgtatgactgtagtgtgggcacacgagaagtacggaatcgaatcttttgcactgattcacgactccttcggtaccattccggctgacgctgcgaacctgttcaaagcagtgcgcgaaactatggtttcgacatatgagtcttgtgatgtactggctgatttctacgaccagttcgctgaccagttgcacgagtctcaattggacaaaatgccagcacttccggctaaaggtaacttgaacctccgtgacatcttaaaatcggacttcgcgttcgcg

SEQ ID NO: 662 - protein, 890 aa, synthetic construct
  REGION 1..890: note = Variant of RNA polymerase
MHHHHHHMNTINIAKNDFSDIELAAIPFNTLADHYGERLAREQLALEHESYEMGEARFRKMFERQLKAGEVADNAAAKPLITTLLPKMIARINDWFEEVKAKRGKRPTAFQFLQEIKPEAVAYITIKTTLACLTSADNTTVQAVASAIGRAIEDEARFGRIRDLEAKHFKKNVEEQLNKRVGHVYKKAFMQVVEADMLSKGLLGGEAWSSWHKEDSIHVGVRCIEMLIESTGMVSLHRQNAGVVGQDSETIELAPEYAEAIATRAGALAGISPMFQPCVVPPKPWTGITGGGYWAAGRKPLQLVRTRSLAALRRYEEVSMPEVIKAVNIAQNTAWRINKKVLDVANAITQWQHCPVADVPAMDRGEMPARPLDIDTNEIALKAWKKEASAFYRKDKARVSRRLSMEFMLSQANKFANYKAIWFPQNMDWRGRVYAVPMFNPQGNDMTKGLLTFAQEKPIGEDGFYWLKIHGANTAGVDKVPFPQRIKFVEDNHTNIMECAKAPLENTWWAEQDSPFCFLAFCFEYAGVINSGLSYNCSLPLAFDGSCSGIQHFSAMLRDEIGGKAVNLLPSAEYQDIYRIVSDKVNEALKQDLINGTSTTVETVTDKKTGEITQRTKYGTKVMAQWWLEHGVNRGVTKRSVMTLVYGSKEFGFRDQVLSDTIQPAIDNGKGDMFLNPNQAAGYMAKLIWNAVSGTVVAAVEAMNWLKSAAKLLAAEVKDPKTDTVLRGRCAVHWVTPDGFPVWQEYKKPIQTRLNLMFLGQFRLQPTINTNKDSEIDAHKQESGIAPNFVHSQDGNHLRMTVVWAHEKYGIESFALIHDSFGTIPADAANLFKAVRETMVSTYESCDVLADFYDQFADQLHESQLDKMPALPAKGNLNLRDILKSDFAFA

SEQ ID NO: 663 - DNA, 2670 bp, synthetic construct
  misc_feature 1..2670: note = Variant of RNA polymerase
  source 1..2670: mol_type = other DNA
atgcaccatcaccatcaccatatgaacacgattaacattgctaagaacgacttctctgacatcgaactggctgctatcccgttcaacactctggctgaccattacggtgagcgtttagctcgcgaacagttggcccttgagcatgagtcttacgagatgggtgaagcacgcttccgcaagatgtttgagcgtcaacttaaagctggtgaggttgcggataacgctgccgccaagcctctcatcactaccctactccctaagatgattgcacgcatcaacgactggtttgaggaagtgaaagctaagcgcggcaagcgcccgacagccttccagttcctgcaagaaatcaagccggaagccgtagcgtacatcaccattaagaccactctggcttgcctaaccagtgcggacaatacaaccgttcaggctgtagcaagcgcaatcggtcgggccattgaggacgaggctcgcttcggtcgtatccgtgaccttgaagctaagcacttcaagaagaacgttgaggaacaactcaacaagcgcgtagggcacgtgtacaagaaagcatttatgccagttgtggaggctgacatgctctctaagggtctactcggtggcgaggcgtggtcttcgtggcataaggaagactctattcatgtaggagtacgctgcatcgagatgctcattgagtcaaccggaatggttagcttacaccgccaaaatgctggcgtagtaggtcaagactctgagactatcgaactcgcacctgaatacgctgaggctatcgcaacccgtgcaggtgcgctggctggcatctctccgatgttccaaccttgcgtagttcctcctaagccgtggactggcattactggtggtggctattgggctgcggggcgcaaacccctgcagttagtacgtactcgcagtctggcggcgcttcgccgctatgaagaagtgtcgatgccggaggtcatcaaagcagtcaacattgcgcagaatacagcatggcgtattaacaagaaagttctcgacgtagcgaatgccatcacccaatggcagcactgtccagtcgcggatgtgcctgcgatggatcgtggcgaaatgccagctcgtccgttggacatcgataccaacgagattgcacttaaagcgtggaagaaagaagcttccgcgttctaccgcaaagacaaagcacgcgttagccgtcgtctgtcaatggagtttatgttatctcaggcgaacaagtttgcgaattataaagcaatctggtttccgcaaaacatggattggcgtgggcgcgtgtacgctgtcccgatgttcaatcctcagggcaacgatatgacgaaaggcctgctgacctttgcgcaggagaaacccattggtgaagacggcttctattggctcaagattcatggcgcaaatacagctggagtggataaagtaccgtttccacaacgcatcaaatttgttgaggataaccatacgaatattatggaatgcgcgaaagcaccgctggaaaacacttggtgggcggaacaggactcgccgttctgttttctggcgttctgctttgagtatgctggcgtcatcaatagtggtctgtcgtacaactgtagcttgcctctggcatttgatggtagttgctccggcatccaacatttctcagcgatgttacgcgacgaaattggcggcaaagctgtgaatctcctcccatctgcggaataccaggatatttatcgtatcgtcagcgacaaagttaacgagatgctgaaacaagatctgattaacggtacctctaccaccgtggaaacggtgactgataagaagacaggcgaaattacccaacgcacgaaatacgggaccaaagttatggcacagtggtggttagaacacggtgtgaatcgtggcgtcacgaaacgctcggttatgactttggtgtatgggagcaaagagtttggattccgcgatcaagtgctgagtgacaccattcaaccggcgatcgataacggcaaaggtgacatgtttctgaatccgaatcaggctgctggttacatggcgaaactgatctggaacgcagtgtccgggaccgtagtcgcagcagttgaggcgatgaactggctgaaaagtgcggcgaaattacttgctgctgaagtgaaggatcctaagacggatacagttctgcgtggccgctgcgcagtacattgggtgactcccgacggcttccctgtgtggcaggaatacaagaagcctattcagacgcgcttgaacctgatgttcctcggtcagttccgcttacagcctaccattaacaccaacaaagatagcgagattgatgcacacaaacaggagtctggtatcgctcctaactttgtacacagccaagacggtaaccaccttcgtatgactgtagtgtgggcacacgagaagtacggaatcgaatcttttgcactgattcacgactccttcggtaccattccggctgacgctgcgaacctgttcaaagcagtgcgcgaaactatggtttcgacatatgagtcttgtgatgtactggctgatttctacgaccagttcgctgaccagttgcacgagtctcaattggacaaaatgccagcacttccggctaaaggtaacttgaacctccgtgacatcttaaaatcggacttcgcgttcgcg

SEQ ID NO: 664 - protein, 890 aa, synthetic construct
  REGION 1..890: note = Variant of RNA polymerase
MHHHHHHMNTINIAKNDFSDIELAAIPFNTLADHYGERLAREQLALEHESYEMGEARFRKMFERQLKAGEVADNAAAKPLITTLLPKMIARINDWFEEVKAKRGKRPTAFQFLQEIKPEAVAYITIKTTLACLTSADNTTVQAVASAIGRAIEDEARFGRIRDLEAKHFKKNVEEQLNKRVGHVYKKAFMPVVEADMLSKGLLGGEAWSSWHKEDSIHVGVRCIEMLIESTGMVSLHRQNAGVVGQDSETIELAPEYAEAIATRAGALAGISPMFQPCVVPPKPWTGITGGGYWAAGRKPLQLVRTRSLAALRRYEEVSMPEVIKAVNIAQNTAWRINKKVLDVANAITQWQHCPVADVPAMDRGEMPARPLDIDTNEIALKAWKKEASAFYRKDKARVSRRLSMEFMLSQANKFANYKAIWFPQNMDWRGRVYAVPMFNPQGNDMTKGLLTFAQEKPIGEDGFYWLKIHGANTAGVDKVPFPQRIKFVEDNHTNIMECAKAPLENTWWAEQDSPFCFLAFCFEYAGVINSGLSYNCSLPLAFDGSCSGIQHFSAMLRDEIGGKAVNLLPSAEYQDIYRIVSDKVNEMLKQDLINGTSTTVETVTDKKTGEITQRTKYGTKVMAQWWLEHGVNRGVTKRSVMTLVYGSKEFGFRDQVLSDTIQPAIDNGKGDMFLNPNQAAGYMAKLIWNAVSGTVVAAVEAMNWLKSAAKLLAAEVKDPKTDTVLRGRCAVHWVTPDGFPVWQEYKKPIQTRLNLMFLGQFRLQPTINTNKDSEIDAHKQESGIAPNFVHSQDGNHLRMTVVWAHEKYGIESFALIHDSFGTIPADAANLFKAVRETMVSTYESCDVLADFYDQFADQLHESQLDKMPALPAKGNLNLRDILKSDFAFA

SEQ ID NO: 665 - DNA, 2670 bp, synthetic construct
  misc_feature 1..2670: note = Variant of RNA polymerase
  source 1..2670: mol_type = other DNA
atgcaccatcaccatcaccatatgaacacgattaacattgctaagaacgacttctctgacatcgaactggctgctatcccgttcaacactctggctgaccattacggtgagcgtttagctcgcgaacagttggcccttgagcatgagtcttacgagatgggtgaagcacgcttccgcaagatgtttgagcgtcaacttaaagctggtgaggttgcggataacgctgccgccaagcctctcatcactaccctactccctaagatgattgcacgcatcaacgactggtttgaggaagtgaaagctaagcgcggcaagcgcccgacagccttccagttcctgcaagaaatcaagccggaagccgtagcgtacatcaccattaagaccactctggcttgcctaaccagtgcggacaatacaaccgttcaggctgtagcaagcgcaatcggtcgggccattgaggacgaggctcgcttcggtcgtatccgtgaccttgaagctaagcacttcaagaagaacgttgaggaacaactcaacaagcgcgtagggcacgtctacaaaaaagcatttatgcaagttgtcgaggctgacatgctctctaagggtctactcggtggcgaggcgtggtcttcgtggcataaggaagactctattcatgtaggagtacgctgcatcgagatgctcattgagtcaaccggaatggttagcttacaccgccaaaatgctggcgtagtaggtcaagactctgagactatcgaactcgcacctgaatacgctgaggctatcgcaacccgtgcaggtgcgctggctggcatctctccgatgttccaaccttgcgtagttcctcctaagccgtggactggcattactggtggtggctattgggctgcggggcgcaaacccctgcagttagtacgtactcgcagtctggcggcgcttcgccgctatgaagaagtgtcgatgccggaggtcatcaaagcagtcaacattgcgcagaatacagcatggcgtattaacaagaaagttctcgacgtagcgaataccatcacccaatggcagcactgtccagtcgcggatgtgcctgcgatggatcgtggcgaaatgccagctcgtccgttggacatcgataccaacgagattgcacttaaagcgtggaagaaagaagcttccgcgttctaccgcaaagacaaagcacgcgttagccgtcgtctgtcaatggagtttatgttatctcaggcgaacaagtttgcgaatgagaaagcaatctggtttccgcaaaacatggattggcgtgggcgcgtgtacgctgtcccgatgttcaatcctcagggcaacgatatgacgaaaggcctgctgacctttgcgcaggagaaacccattggtgaagacggcttctattggctcaagattcatggcgcaaatacagctggagtggataaagtaccgtttccacaacgcatcaaatttgttgaggataaccatacgaatattatggaatgcgcgaaagcaccgctggaaaacacttggtgggcggaacaggactcgccgttctgttttctggcgttctgctttgagtatgctggcgtcatcaatcatggtctgtcgtacaactgtagcttgcctctggcatttgatggtagttgctccggcctgcaacatttctcagcgatgttacgcgacgaaattggcggcaaagctgtgaatctcctcccatctgcggaataccaggatatttatcgtatcgtcagcgacaaagttaacgaggtactgaaacaagatctgattaacggtacctctaccaccgtggaaacggtgactgataagaagacaggcgaaattacccaacgcacgaaatacgggaccaaagttatggcacagtggtggttagaacacggtgtgaatcgtggcgtcacgaaacgctcggttatgactttggtgtatgggagcaaagagtttggattccgcgatcaagtgctgagtgacaccattcaaccggcgatcgataacggcaaaggtgacatgtttctgaatccgaatcaggctgctggttacatggcgaaactgatctggaacgcagtgtccgggaccgtagtcgcagcagttgaggcgatgaactggctgaaaagtgcggcgaaattacttgctgctgaagtgaaggatcctaagacggatacagttctgcgtggccgctgcgcagtacattgggtgactcccgacggcttccctgtgtggcaggaatacaagaagcctattcagacgcgcttgaacctgatgttcctcggtcagttccgcttacagcctaccattaacaccaacaaagatagcgagattgatgcacacaaacaggagtctggtatcgctcctaactttgtacacagccaagacggtaaccaccttcgtatgactgtagtgtgggcacacgagaagtacggaatcgaatcttttgcactgattcacgactccttcggtaccattccggctgacgctgcgaacctgttcaaagcagtgcgcgaaactatggtttcgacatatgagtcttgtgatgtactggctgatttctacgaccagttcgctgaccagttgcacgagtctcaattggacaaaatgccagcacttccggctaaaggtaacttgaacctccgtgacatcttaaaatcggacttcgcgttcgcg

SEQ ID NO: 666 - protein, 890 aa, synthetic construct
  REGION 1..890: note = Variant of RNA polymerase
MHHHHHHMNTINIAKNDFSDIELAAIPFNTLADHYGERLAREQLALEHESYEMGEARFRKMFERQLKAGEVADNAAAKPLITTLLPKMIARINDWFEEVKAKRGKRPTAFQFLQEIKPEAVAYITIKTTLACLTSADNTTVQAVASAIGRAIEDEARFGRIRDLEAKHFKKNVEEQLNKRVGHVYKKAFMQVVEADMLSKGLLGGEAWSSWHKEDSIHVGVRCIEMLIESTGMVSLHRQNAGVVGQDSETIELAPEYAEAIATRAGALAGISPMFQPCVVPPKPWTGITGGGYWAAGRKPLQLVRTRSLAALRRYEEVSMPEVIKAVNIAQNTAWRINKKVLDVANTITQWQHCPVADVPAMDRGEMPARPLDIDTNEIALKAWKKEASAFYRKDKARVSRRLSMEFMLSQANKFANEKAIWFPQNMDWRGRVYAVPMFNPQGNDMTKGLLTFAQEKPIGEDGFYWLKIHGANTAGVDKVPFPQRIKFVEDNHTNIMECAKAPLENTWWAEQDSPFCFLAFCFEYAGVINHGLSYNCSLPLAFDGSCSGLQHFSAMLRDEIGGKAVNLLPSAEYQDIYRIVSDKVNEVLKQDLINGTSTTVETVTDKKTGEITQRTKYGTKVMAQWWLEHGVNRGVTKRSVMTLVYGSKEFGFRDQVLSDTIQPAIDNGKGDMFLNPNQAAGYMAKLIWNAVSGTVVAAVEAMNWLKSAAKLLAAEVKDPKTDTVLRGRCAVHWVTPDGFPVWQEYKKPIQTRLNLMFLGQFRLQPTINTNKDSEIDAHKQESGIAPNFVHSQDGNHLRMTVVWAHEKYGIESFALIHDSFGTIPADAANLFKAVRETMVSTYESCDVLADFYDQFADQLHESQLDKMPALPAKGNLNLRDILKSDFAFA

SEQ ID NO: 667 - DNA, 2670 bp, synthetic construct
  misc_feature 1..2670: note = Variant of RNA polymerase
  source 1..2670: mol_type = other DNA
atgcaccatcaccatcaccatatgaacacgattaacattgctaagaacgacttctctgacatcgaactggctgctatcccgttcaacactctggctgaccattacggtgagcgtttagctcgcgaacagttggcccttgagcatgagtcttacgagatgggtgaagcacgcttccgcaagatgtttgagcgtcaacttaaagctggtgaggttgcggataacgctgccgccaagcctctcatcactaccctactccctaagatgattgcacgcatcaacgactggtttgaggaagtgaaagctaagcgcggcaagcgcccgacagccttccagttcctgcaagaaatcaagccggaagccgtagcgtacatcaccattaagaccactctggcttgcctaaccagtgcggacaatacaaccgttcaggctgtagcaagcgcaatcggtcgggccattgaggacgaggctcgcttcggtcgtatccgtgaccttgaagctaagcacttcaagaaaaacgttgaggaacaactcaacaagcgcgtagggcacgtctacaagaaagcatttatgcaagttgtcgaggctgacatgctctctaagggtctactcggtggcgaggcgtggtcttcgtggcataaggaagactctattcatgtaggagtacgctgcatcgagatgctcattgagtcaaccggaatggttagcttacaccgccaaaatgctggcgtagtaggtcaagactctgagactatcgaactcgcacctgaatacgctgaggctatcgcaacccgtgcaggtgcgctggctggcatctctccgatgttccaaccttgcgtagttcctcctaagccgtggactggcattactggtggtggctattgggctgcggggcgcaaacccctgcagttagtacgtactcgcagtctggcggcgcttcgccgctatgaagaagtgtcgatgccggaggtcatcaaagcagtcaacattgcgcagaatacagcatggcgtattaacaagaaagttctcgacgtagcgaatgcaatcacccaatggcagcactgtccagtcgcggatgtgcctgcgatggatcgtggcgaaatgccagctcgtccgttggacatcgataccaacgagattgcacttaaagcgtggaagaaagaagcttccgcgttctaccgcaaagacaaagcacgcgttagccgtcgtctgtcaatggagtttatgttatctcaggcgaacaagtttgcgaattataaagcaatctggtttccgcaaaacatggattggcgtgggcgcgtgtacgctgtcccgatgttcaatcctcagggcaacgatatgacgaaaggcctgctgacctttgcgcaggagaaacccattggtgaagacggcttctattggctcaagattcatggcgcaaatacagctggagtggataaagtaccgtttccacaacgcatcaaatttgttgaggataaccatacgaatattatggaatgcgcgaaagcaccgctggaaaacacttggtgggcggaacaggactcgccgttctgttttctggcgttctgctttgagtatgctggcgtcatcaatcacggtctgtcgtacaactgtagcttgcctctggcatttgatggtagttgctccggcattcaacatttctcagcgatgttacgcgacgaaattggcgccaaagctgtgaatctcctcccatctgcggaataccaggatatttatcgtatcgtcagcgacaaagttaacgaggtactgaaacaagatctgattaacggtacctctaccaccgtggaaacggtgactgataagaagacaggcgaaattacccaacgcacgaaatacgggaccaaagttatggcacagtggtggttagaacacggtgtgaatcgtggcgtcacgaaacgctcggttatgactttggtgtatgggagcaaagagtttggattccgcgatcaagtgctgagtgacaccattcaaccggcgatcgataacggcaaaggtgacatgtttctgaatccgaatcaggctgctggttacatggcgaaactgatctggaacgcagtgtccgggaccgtagtcgcagcagttgaggcgatgaactggctgaaaagtgcggcgaaattacttgctgctgaagtgaaggatcctaagacggatacagttctgcgtggccgctgcgcagtacattgggtgactcccgacggcttccctgtgtggcaggaatacaagaagcctattcagacgcgcttgaacctgatgttcctcggtcagttccgcttacagcctaccattaacaccaacaaagatagcgagattgatgcacacaaacaggagtctggtatcgctcctaactttgtacacagccaagacggtaaccaccttcgtatgactgtagtgtgggcacacgagaagtacggaatcgaatcttttgcactgattcacgactccttcggtaccattccggctgacgctgcgaacctgttcaaagcagtgcgcgaaactatggtttcgacatatgagtcttgtgatgtactggctgatttctacgaccagttcgctgaccagttgcacgagtctcaattggacaaaatgccagcacttccggctaaaggtaacttgaacctccgtgacatcttaaaatcggacttcgcgttcgcg

SEQ ID NO: 668 - protein, 890 aa, synthetic construct
  REGION 1..890: note = Variant of RNA polymerase
MHHHHHHMNTINIAKNDFSDIELAAIPFNTLADHYGERLAREQLALEHESYEMGEARFRKMFERQLKAGEVADNAAAKPLITTLLPKMIARINDWFEEVKAKRGKRPTAFQFLQEIKPEAVAYITIKTTLACLTSADNTTVQAVASAIGRAIEDEARFGRIRDLEAKHFKKNVEEQLNKRVGHVYKKAFMQVVEADMLSKGLLGGEAWSSWHKEDSIHVGVRCIEMLIESTGMVSLHRQNAGVVGQDSETIELAPEYAEAIATRAGALAGISPMFQPCVVPPKPWTGITGGGYWAAGRKPLQLVRTRSLAALRRYEEVSMPEVIKAVNIAQNTAWRINKKVLDVANAITQWQHCPVADVPAMDRGEMPARPLDIDTNEIALKAWKKEASAFYRKDKARVSRRLSMEFMLSQANKFANYKAIWFPQNMDWRGRVYAVPMFNPQGNDMTKGLLTFAQEKPIGEDGFYWLKIHGANTAGVDKVPFPQRIKFVEDNHTNIMECAKAPLENTWWAEQDSPFCFLAFCFEYAGVINHGLSYNCSLPLAFDGSCSGIQHFSAMLRDEIGAKAVNLLPSAEYQDIYRIVSDKVNEVLKQDLINGTSTTVETVTDKKTGEITQRTKYGTKVMAQWWLEHGVNRGVTKRSVMTLVYGSKEFGFRDQVLSDTIQPAIDNGKGDMFLNPNQAAGYMAKLIWNAVSGTVVAAVEAMNWLKSAAKLLAAEVKDPKTDTVLRGRCAVHWVTPDGFPVWQEYKKPIQTRLNLMFLGQFRLQPTINTNKDSEIDAHKQESGIAPNFVHSQDGNHLRMTVVWAHEKYGIESFALIHDSFGTIPADAANLFKAVRETMVSTYESCDVLADFYDQFADQLHESQLDKMPALPAKGNLNLRDILKSDFAFA

SEQ ID NO: 669 - DNA, 2670 bp, synthetic construct
  misc_feature 1..2670: note = Variant of RNA polymerase
  source 1..2670: mol_type = other DNA
atgcaccatcaccatcaccatatgaacacgattaacattgctaagaacgacttctctgacatcgaactggctgctatcccgttcaacactctggctgaccattacggtgagcgtttagctcgcgaacagttggcccttgagcatgagtcttacgagatgggtgaagcacgcttccgcaagatgtttgagcgtcaacttaaagctggtgaggttgcggataacgctgccgccaagcctctcatcactaccctactccctaagatgattgcacgcatcaacgactggtttgaggaagtgaaagctaagcgcggcaagcgcccgacagccttccagttcctgcaagaaatcaagccggaagccgtagcgtacatcaccattaagaccactctggcttgcctaaccagtgcggacaatacaaccgttcaggctgtagcaagcgcaatcggtcgggccattgaggacgaggctcgcttcggtcgtatccgtgaccttgaagctaagcacttcaagaagaacgttgaggaacaactcaacaagcgcgtagggcacgtctacaaagtagcatttatgcaagttgtcgaggctgacatgctctctaagggtctactcggtggcgaggcgtggtcttcgtggcataaggaagactctattcatgtaggagtacgctgcatcgagatgctcattgagtcaaccggaatggttagcttacaccgccaaaatgctggcgtagtaggtcaagactctgagactatcgaactcgcacctgaatacgctgaggctatcgcaacccgtgcaggtgcgctggctggcatctctccgatgttccaaccttgcgtagttcctcctaagccgtggactggcattactggtggtggctattgggctgcggggcgcaaacccctgcagttagtacgtactcgcagtctggcggcgcttcgccgctatgaagaagtgtcgatgccggaggtcatcaaagcagtcaacattgcgcagaatacagcatggcgtattaacaagaaagttctcgacgtagcgaatgccatcacccaatggcagcactgtccagtcgcggatgtgcctgcgatggatcgtggcgaaatgccagctcgtccgttggacatcgataccaacgagattgcacttaaagcgtggaagaaagaagcttccgcgttctaccgcaaagacaaagcacgcgttagccgtcgtctgtcaatggagtttatgttatctcaggcgaacaagtttgcgaatgagaaagcaatctggtttccgcaaaacatggattggcgtgggcgcgtgtacgctgtcccgatgttcaatcctcagggcaacgatatgacgaaaggcctgctgacctttgcgcaggagaaacccattggtgaagacggcttctattggctcaagattcatggcgcaaatacagctggagtggataaagtaccgtttccacaacgcatcaaatttgttgaggataaccatacgaatattatggaatgcgcgaaagcaccgctggaaaacacttggtgggcggaacaggactcgccgttctgttttctggcgttctgctttgagtatgctggcgtcatcaatcatggtctgtcgtacaactgtagcttgcctctggcatttgatggtagttgctccggcctgcaacatttctcagcgatgttacgcgacgaaattggcggcaaagctgtgaatctcctcccatctgcggaataccaggatatttatcgtatcgtcagcgacaaagttaacgaggtactgaaacaagatctgattaacggtacctctaccaccgtggaaacggtgactgataagaagacaggcgaaattacccaacgcacgaaatacgggaccaaagttatggcacagtggtggttagaacacggtgtgaatcgtggcgtcacgaaacgctcggttatgactttggtgtatgggagcaaagagtttggattccgcgatcaagtgctgagtgacaccattcaaccggcgatcgataacggcaaaggtgacatgtttctgaatccgaatcaggctgctggttacatggcgaaactgatctggaacgcagtgtccgggaccgtagtcgcagcagttgaggcgatgaactggctgaaaagtgcggcgaaattacttgctgctgaagtgaaggatcctaagacggatacagttctgcgtggccgctgcgcagtacattgggtgactcccgacggcttccctgtgtggcaggaatacaagaagcctattcagacgcgcttgaacctgatgttcctcggtcagttccgcttacagcctaccattaacaccaacaaagatagcgagattgatgcacacaaacaggagtctggtatcgctcctaactttgtacacagccaagacggtaaccaccttcgtatgactgtagtgtgggcacacgagaagtacggaatcgaatcttttgcactgattcacgactccttcggtaccattccggctgacgctgcgaacctgttcaaagcagtgcgcgaaactatggtttcgacatatgagtcttgtgatgtactggctgatttctacgaccagttcgctgaccagttgcacgagtctcaattggacaaaatgccagcacttccggctaaaggtaacttgaacctccgtgacatcttaaaatcggacttcgcgttcgcg

SEQ ID NO: 670 - protein, 890 aa, synthetic construct
  REGION 1..890: note = Variant of RNA polymerase
MHHHHHHMNTINIAKNDFSDIELAAIPFNTLADHYGERLAREQLALEHESYEMGEARFRKMFERQLKAGEVADNAAAKPLITTLLPKMIARINDWFEEVKAKRGKRPTAFQFLQEIKPEAVAYITIKTTLACLTSADNTTVQAVASAIGRAIEDEARFGRIRDLEAKHFKKNVEEQLNKRVGHVYKVAFMQVVEADMLSKGLLGGEAWSSWHKEDSIHVGVRCIEMLIESTGMVSLHRQNAGVVGQDSETIELAPEYAEAIATRAGALAGISPMFQPCVVPPKPWTGITGGGYWAAGRKPLQLVRTRSLAALRRYEEVSMPEVIKAVNIAQNTAWRINKKVLDVANAITQWQHCPVADVPAMDRGEMPARPLDIDTNEIALKAWKKEASAFYRKDKARVSRRLSMEFMLSQANKFANEKAIWFPQNMDWRGRVYAVPMFNPQGNDMTKGLLTFAQEKPIGEDGFYWLKIHGANTAGVDKVPFPQRIKFVEDNHTNIMECAKAPLENTWWAEQDSPFCFLAFCFEYAGVINHGLSYNCSLPLAFDGSCSGLQHFSAMLRDEIGGKAVNLLPSAEYQDIYRIVSDKVNEVLKQDLINGTSTTVETVTDKKTGEITQRTKYGTKVMAQWWLEHGVNRGVTKRSVMTLVYGSKEFGFRDQVLSDTIQPAIDNGKGDMFLNPNQAAGYMAKLIWNAVSGTVVAAVEAMNWLKSAAKLLAAEVKDPKTDTVLRGRCAVHWVTPDGFPVWQEYKKPIQTRLNLMFLGQFRLQPTINTNKDSEIDAHKQESGIAPNFVHSQDGNHLRMTVVWAHEKYGIESFALIHDSFGTIPADAANLFKAVRETMVSTYESCDVLADFYDQFADQLHESQLDKMPALPAKGNLNLRDILKSDFAFA

SEQ ID NO: 671 - DNA, 2670 bp, synthetic construct
  misc_feature 1..2670: note = Variant of RNA polymerase
  source 1..2670: mol_type = other DNA
atgcaccatcaccatcaccatatgaacacgattaacattgctaagaacgacttctctgacatcgaactggctgctatcccgttcaacactctggctgaccattacggtgagcgtttagctcgcgaacagttggcccttgagcatgagtcttacgagatgggtgaagcacgcttccgcaagatgtttgagcgtcaacttaaagctggtgaggttgcggataacgctgccgccaagcctctcatcactaccctactccctaagatgattgcacgcatcaacgactggtttgaggaagtgaaagctaagcgcggcaagcgcccgacagccttccagttcctgcaagaaatcaagccggaagccgtagcgtacatcaccattaagaccactctggcttgcctaaccagtgcggacaatacaaccgttcaggctgtagcaagcgcaatcggtcgggccattgaggacgaggctcgcttcggtcgtatccgtgaccttgaagctaagcacttcaagaaaattgttgaggaacaactcaacaagcgcgtagggcacgtgtacaagaaagcatttatgcaagttgtcgaggctgacgtgctctctaagggtctactcggtggcgaggcgtggtcttcgtggcataaggaagactctattcatgtaggagtacgctgcatcgagatgctcattgagtcaaccggaatggttagcttacaccgccaaaatgctggcgtagtaggtcaagactctgagactatcgaactcgcacctgaatacgctgaggctatcgcaacccgtgcaggtgcgctggctggcatctctccgatgttccaaccttgcgtagttcctcctaagccgtggactggcattactggtggtggctattgggctgcggggcgcaaacccctgcagttagtacgtactcgcagtctggcggcgcttcgccgctatgaagaagtgtcgatgccggaggtcatcaaagcagtcaacattgcgcagaatacagcatggcgtattaacaagaaagttctcgacgtagcgaataccatcacccaatggcagcactgtccagtcgcggatgtgcctgcgatggatcgtggcgaaatgccagctcgtccgttggacatcgataccaacgagattgcacttaaagcgtggaagaaagaagcttccgcgttctaccgcaaagacaaagcacgcgttagccgtcgtctgtcaatggagtttatgttatctcaggcgaacaagtttgcgaattataaagcaatctggtttccgcaaaacatggattggcgtgggcgcgtgtacgctgtcccgatgttcaatcctcagggcaacgatatgacgaaaggcctgctgacctttgcgcaggagaaacccattggtgaagacggcttctattggctcaagattcatggcgcaaatacagctggagtggataaagtaccgtttccacaacgcatcaaatttgttgaggataaccatacgaatattatggaatgcgcgaaagcaccgctggaaaacacttggtgggcggaacaggactcgccgttctgttttctggcgttctgctttgagtatgctggcgtcatcaatcacggtctgtcgtacaactgtagcttgcctctggcatttgatggtagttgctccggcatccaacatttctcagcgatgttacgcgacgaaattggcggcaaagctgtgaatctcctcccatctgcggaataccaggatatttatcgtatcgtcagcgacaaagttaacgagatgctgaaacaagatctgattaacggtacctctaccaccgtggaaacggtgactgataagaagacaggcgaaattacccaacgcacgaaatacgggaccaaagttatggcacagtggtggttagaacacggtgtgaatcgtggcgtcacgaaacgctcggttatgactttggtgtatgggagcaaagagtttggattccgcgatcaagtgctgagtgacaccattcaaccggcgatcgataacggcaaaggtgacatgtttctgaatccgaatcaggctgctggttacatggcgaaactgatctggaacgcagtgtccgggaccgtagtcgcagcagttgaggcgatgaactggctgaaaagtgcggcgaaattacttgctgctgaagtgaaggatcctaagacggatacagttctgcgtggccgctgcgcagtacattgggtgactcccgacggcttccctgtgtggcaggaatacaagaagcctattcagacgcgcttgaacctgatgttcctcggtcagttccgcttacagcctaccattaacaccaacaaagatagcgagattgatgcacacaaacaggagtctggtatcgctcctaactttgtacacagccaagacggtaaccaccttcgtatgactgtagtgtgggcacacgagaagtacggaatcgaatcttttgcactgattcacgactccttcggtaccattccggctgacgctgcgaacctgttcaaagcagtgcgcgaaactatggtttcgacatatgagtcttgtgatgtactggctgatttctacgaccagttcgctgaccagttgcacgagtctcaattggacaaaatgccagcacttccggctaaaggtaacttgaacctccgtgacatcttaaaatcggacttcgcgttcgcg

SEQ ID NO: 672 - protein, 890 aa, synthetic construct
  REGION 1..890: note = Variant of RNA polymerase
MHHHHHHMNTINIAKNDFSDIELAAIPFNTLADHYGERLAREQLALEHESYEMGEARFRKMFERQLKAGEVADNAAAKPLITTLLPKMIARINDWFEEVKAKRGKRPTAFQFLQEIKPEAVAYITIKTTLACLTSADNTTVQAVASAIGRAIEDEARFGRIRDLEAKHFKKIVEEQLNKRVGHVYKKAFMQVVEADVLSKGLLGGEAWSSWHKEDSIHVGVRCIEMLIESTGMVSLHRQNAGVVGQDSETIELAPEYAEAIATRAGALAGISPMFQPCVVPPKPWTGITGGGYWAAGRKPLQLVRTRSLAALRRYEEVSMPEVIKAVNIAQNTAWRINKKVLDVANTITQWQHCPVADVPAMDRGEMPARPLDIDTNEIALKAWKKEASAFYRKDKARVSRRLSMEFMLSQANKFANYKAIWFPQNMDWRGRVYAVPMFNPQGNDMTKGLLTFAQEKPIGEDGFYWLKIHGANTAGVDKVPFPQRIKFVEDNHTNIMECAKAPLENTWWAEQDSPFCFLAFCFEYAGVINHGLSYNCSLPLAFDGSCSGIQHFSAMLRDEIGGKAVNLLPSAEYQDIYRIVSDKVNEMLKQDLINGTSTTVETVTDKKTGEITQRTKYGTKVMAQWWLEHGVNRGVTKRSVMTLVYGSKEFGFRDQVLSDTIQPAIDNGKGDMFLNPNQAAGYMAKLIWNAVSGTVVAAVEAMNWLKSAAKLLAAEVKDPKTDTVLRGRCAVHWVTPDGFPVWQEYKKPIQTRLNLMFLGQFRLQPTINTNKDSEIDAHKQESGIAPNFVHSQDGNHLRMTVVWAHEKYGIESFALIHDSFGTIPADAANLFKAVRETMVSTYESCDVLADFYDQFADQLHESQLDKMPALPAKGNLNLRDILKSDFAFA

SEQ ID NO: 673 - DNA, 2670 bp, synthetic construct
  misc_feature 1..2670: note = Variant of RNA polymerase
  source 1..2670: mol_type = other DNA
atgcaccatcaccatcaccatatgaacacgattaacattgctaagaacgacttctctgacatcgaactggctgctatcccgttcaacactctggctgaccattacggtgagcgtttagctcgcgaacagttggcccttgagcatgagtcttacgagatgggtgaagcacgcttccgcaagatgtttgagcgtcaacttaaagctggtgaggttgcggataacgctgccgccaagcctctcatcactaccctactccctaagatgattgcacgcatcaacgactggtttgaggaagtgaaagctaagcgcggcaagcgcccgacagccttccagttcctgcaagaaatcaagccggaagccgtagcgtacatcaccattaagaccactctggcttgcctaaccagtgcggacaatacaaccgttcaggctgtagcaagcgcaatcggtcgggccattgaggacgaggctcgcttcggtcgtatccgtgaccttgaagctaagcacttcaagaaaattgttgaggaacaactcaacaagcgcgtagggcacccgtacaagaaagcatttatgcaagttgtcgaggctgacatgctctctaagggtctactcggtggcgaggcgtggtcttcgtggcataaggaagactctattcatgtaggagtacgctgcatcgagatgctcattgagtcaaccggaatggttagcttacaccgccaaaatgctggcgtagtaggtcaagactctgagactatcgaactcgcacctgaatacgctgaggctatcgcaacccgtgcaggtgcgctggctggcatctctccgatgttccaaccttgcgtagttcctcctaagccgtggactggcattactggtggtggctattgggctgcggggcgcaaacccctgcagttagtacgtactcgcagtctggcggcgcttcgccgctatgaagaagtgtcgatgccggaggtcatcaaagcagtcaacattgcgcagaatacagcatggcgtattaacaagaaagttctcgacgtagcgaataccatcacccaatggcagcactgtccagtcgcggatgtgcctgcgatggatcgtggcgaaatgccagctcgtccgttggacatcgataccaacgagattgcacttaaagcgtggaagaaagaagcttccgcgttctaccgcaaagacaaagcacgcgttagccgtcgtctgtcaatggagtttatgttatctcaggcgaacaagtttgcgaatgagaaagcaatctggtttccgcaaaacatggattggcgtgggcgcgtgtacgctgtcccgatgttcaatcctcagggcaacgatatgacgaaaggcctgctgacctttgcgcaggagaaacccattggtgaagacggcttctattggctcaagattcatggcgcaaatacagctggagtggataaagtaccgtttccacaacgcatcaaatttgttgaggataaccatacgaatattatggaatgcgcgaaagcaccgctggaaaacacttggtgggcggaacaggactcgccgttctgttttctggcgttctgctttgagtatgctggcgtcatcaatagtggtctgtcgtacaactgtagcttgcctctggcatttgatggtagttgctccggcattcaacatttctcagcgatgttacgcgacgaaattggcgccaaagctgtgaatctcctcccatctgcggaataccaggatatttatcgtatcgtcagcgacaaagttaacgaggtactgaaacaagatctgattaacggtacctctaccaccgtggaaacggtgactgataagaagacaggcgaaattacccaacgcacgaaatacgggaccaaagttatggcacagtggtggttagaacacggtgtgaatcgtggcgtcacgaaacgctcggttatgactttggtgtatgggagcaaagagtttggattccgcgatcaagtgctgagtgacaccattcaaccggcgatcgataacggcaaaggtgacatgtttctgaatccgaatcaggctgctggttacatggcgaaactgatctggaacgcagtgtccgggaccgtagtcgcagcagttgaggcgatgaactggctgaaaagtgcggcgaaattacttgctgctgaagtgaaggatcctaagacggatacagttctgcgtggccgctgcgcagtacattgggtgactcccgacggcttccctgtgtggcaggaatacaagaagcctattcagacgcgcttgaacctgatgttcctcggtcagttccgcttacagcctaccattaacaccaacaaagatagcgagattgatgcacacaaacaggagtctggtatcgctcctaactttgtacacagccaagacggtaaccaccttcgtatgactgtagtgtgggcacacgagaagtacggaatcgaatcttttgcactgattcacgactccttcggtaccattccggctgacgctgcgaacctgttcaaagcagtgcgcgaaactatggtttcgacatatgagtcttgtgatgtactggctgatttctacgaccagttcgctgaccagttgcacgagtctcaattggacaaaatgccagcacttccggctaaaggtaacttgaacctccgtgacatcttaaaatcggacttcgcgttcgcg

SEQ ID NO: 674 - protein, 890 aa, synthetic construct
  REGION 1..890: note = Variant of RNA polymerase
MHHHHHHMNTINIAKNDFSDIELAAIPFNTLADHYGERLAREQLALEHESYEMGEARFRKMFERQLKAGEVADNAAAKPLITTLLPKMIARINDWFEEVKAKRGKRPTAFQFLQEIKPEAVAYITIKTTLACLTSADNTTVQAVASAIGRAIEDEARFGRIRDLEAKHFKKIVEEQLNKRVGHPYKKAFMQVVEADMLSKGLLGGEAWSSWHKEDSIHVGVRCIEMLIESTGMVSLHRQNAGVVGQDSETIELAPEYAEAIATRAGALAGISPMFQPCVVPPKPWTGITGGGYWAAGRKPLQLVRTRSLAALRRYEEVSMPEVIKAVNIAQNTAWRINKKVLDVANTITQWQHCPVADVPAMDRGEMPARPLDIDTNEIALKAWKKEASAFYRKDKARVSRRLSMEFMLSQANKFANEKAIWFPQNMDWRGRVYAVPMFNPQGNDMTKGLLTFAQEKPIGEDGFYWLKIHGANTAGVDKVPFPQRIKFVEDNHTNIMECAKAPLENTWWAEQDSPFCFLAFCFEYAGVINSGLSYNCSLPLAFDGSCSGIQHFSAMLRDEIGAKAVNLLPSAEYQDIYRIVSDKVNEVLKQDLINGTSTTVETVTDKKTGEITQRTKYGTKVMAQWWLEHGVNRGVTKRSVMTLVYGSKEFGFRDQVLSDTIQPAIDNGKGDMFLNPNQAAGYMAKLIWNAVSGTVVAAVEAMNWLKSAAKLLAAEVKDPKTDTVLRGRCAVHWVTPDGFPVWQEYKKPIQTRLNLMFLGQFRLQPTINTNKDSEIDAHKQESGIAPNFVHSQDGNHLRMTVVWAHEKYGIESFALIHDSFGTIPADAANLFKAVRETMVSTYESCDVLADFYDQFADQLHESQLDKMPALPAKGNLNLRDILKSDFAFA

SEQ ID NO: 675 - DNA, 2670 bp, synthetic construct
  misc_feature 1..2670: note = Variant of RNA polymerase
  source 1..2670: mol_type = other DNA
atgcaccatcaccatcaccatatgaacacgattaacattgctaagaacgacttctctgacatcgaactggctgctatcccgttcaacactctggctgaccattacggtgagcgtttagctcgcgaacagttggcccttgagcatgagtcttacgagatgggtgaagcacgcttccgcaagatgtttgagcgtcaacttaaagctggtgaggttgcggataacgctgccgccaagcctctcatcactaccctactccctaagatgattgcacgcatcaacgactggtttgaggaagtgaaagctaagcgcggcaagcgcccgacagccttccagttcctgcaagaaatcaagccggaagccgtagcgtacatcaccattaagaccactctggcttgcctaaccagtgcggacaatacaaccgttcaggctgtagcaagcgcaatcggtcgggccattgaggacgaggctcgcttcggtcgtatccgtgaccttgaagctaagcacttcaagggcaacgttgaggaacaactcaacaagcgcgtagggcacgtctacaaaaaagcatttatgcaagttgtcgagaccgacatgctctctaagggtctactcggtggcgaggcgtggtcttcgtggcataaggaagactctattcatgtaggagtacgctgcatcgagatgctcattgagtcaaccggaatggttagcttacaccgccaaaatgctggcgtagtaggtcaagactctgagactatcgaactcgcacctgaatacgctgaggctatcgcaacccgtgcaggtgcgctggctggcatctctccgatgttccaaccttgcgtagttcctcctaagccgtggactggcattactggtggtggctattgggctgcggggcgcaaacccctgcagttagtacgtactcgcagtctggcggcgcttcgccgctatgaagaagtgtcgatgccggaggtcatcaaagcagtcaacattgcgcagaatacagcatggcgtattaacaagaaagttctcgacgtagcgaataccatcacccaatggcagcactgtccagtcgcggatgtgcctgcgatggatcgtggcgaaatgccagctcgtccgttggacatcgataccaacgagattgcacttaaagcgtggaagaaagaagcttccgcgttctaccgcaaagacaaagcacgcgttagccgtcgtctgtcaatggagtttatgttatctcaggcgaacaagtttgcgaatgagaaagcaatctggtttccgcaaaacatggattggcgtgggcgcgtgtacgctgtcccgatgttcaatcctcagggcaacgatatgacgaaaggcctgctgacctttgcgcaggagaaacccattggtgaagacggcttctattggctcaagattcatggcgcaaatacagctggagtggataaagtaccgtttccacaacgcatcaaatttgttgaggataaccatacgaatattatggaatgcgcgaaagcaccgctggaaaacacttggtgggcggaacaggactcgccgttctgttttctggcgttctgctttgagtatgctggcgtcatcaatcatggtctgtcgtacaactgtagcttgcctctggcatttgatggtagttgctccggcatccaacatttctcagcgatgttacgcgacgaaattggcggcaaagctgtgaatctcctcccatctgcggaataccaggatatttatcgtatcgtcagcgacaaagttaacgaggcgctgaaacaagatctgattaacggtacctctaccaccgtggaaacggtgactgataagaagacaggcgaaattacccaacgcacgaaatacgggaccaaagttatggcacagtggtggttagaacacggtgtgaatcgtggcgtcacgaaacgctcggttatgactttggtgtatgggagcaaagagtttggattccgcgatcaagtgctgagtgacaccattcaaccggcgatcgataacggcaaaggtgacatgtttctgaatccgaatcaggctgctggttacatggcgaaactgatctggaacgcagtgtccgggaccgtagtcgcagcagttgaggcgatgaactggctgaaaagtgcggcgaaattacttgctgctgaagtgaaggatcctaagacggatacagttctgcgtggccgctgcgcagtacattgggtgactcccgacggcttccctgtgtggcaggaatacaagaagcctattcagacgcgcttgaacctgatgttcctcggtcagttccgcttacagcctaccattaacaccaacaaagatagcgagattgatgcacacaaacaggagtctggtatcgctcctaactttgtacacagccaagacggtaaccaccttcgtatgactgtagtgtgggcacacgagaagtacggaatcgaatcttttgcactgattcacgactccttcggtaccattccggctgacgctgcgaacctgttcaaagcagtgcgcgaaactatggtttcgacatatgagtcttgtgatgtactggctgatttctacgaccagttcgctgaccagttgcacgagtctcaattggacaaaatgccagcacttccggctaaaggtaacttgaacctccgtgacatcttaaaatcggacttcgcgttcgcg

SEQ ID NO: 676 - protein, 890 aa, synthetic construct
  REGION 1..890: note = Variant of RNA polymerase
MHHHHHHMNTINIAKNDFSDIELAAIPFNTLADHYGERLAREQLALEHESYEMGEARFRKMFERQLKAGEVADNAAAKPLITTLLPKMIARINDWFEEVKAKRGKRPTAFQFLQEIKPEAVAYITIKTTLACLTSADNTTVQAVASAIGRAIEDEARFGRIRDLEAKHFKGNVEEQLNKRVGHVYKKAFMQVVETDMLSKGLLGGEAWSSWHKEDSIHVGVRCIEMLIESTGMVSLHRQNAGVVGQDSETIELAPEYAEAIATRAGALAGISPMFQPCVVPPKPWTGITGGGYWAAGRKPLQLVRTRSLAALRRYEEVSMPEVIKAVNIAQNTAWRINKKVLDVANTITQWQHCPVADVPAMDRGEMPARPLDIDTNEIALKAWKKEASAFYRKDKARVSRRLSMEFMLSQANKFANEKAIWFPQNMDWRGRVYAVPMFNPQGNDMTKGLLTFAQEKPIGEDGFYWLKIHGANTAGVDKVPFPQRIKFVEDNHTNIMECAKAPLENTWWAEQDSPFCFLAFCFEYAGVINHGLSYNCSLPLAFDGSCSGIQHFSAMLRDEIGGKAVNLLPSAEYQDIYRIVSDKVNEALKQDLINGTSTTVETVTDKKTGEITQRTKYGTKVMAQWWLEHGVNRGVTKRSVMTLVYGSKEFGFRDQVLSDTIQPAIDNGKGDMFLNPNQAAGYMAKLIWNAVSGTVVAAVEAMNWLKSAAKLLAAEVKDPKTDTVLRGRCAVHWVTPDGFPVWQEYKKPIQTRLNLMFLGQFRLQPTINTNKDSEIDAHKQESGIAPNFVHSQDGNHLRMTVVWAHEKYGIESFALIHDSFGTIPADAANLFKAVRETMVSTYESCDVLADFYDQFADQLHESQLDKMPALPAKGNLNLRDILKSDFAFA

SEQ ID NO: 677 - DNA, 2670 bp, synthetic construct
  misc_feature 1..2670: note = Variant of RNA polymerase
  source 1..2670: mol_type = other DNA
atgcaccatcaccatcaccatatgaacacgattaacattgctaagaacgacttctctgacatcgaactggctgctatcccgttcaacactctggctgaccattacggtgagcgtttagctcgcgaacagttggcccttgagcatgagtcttacgagatgggtgaagcacgcttccgcaagatgtttgagcgtcaacttaaagctggtgaggttgcggataacgctgccgccaagcctctcatcactaccctactccctaagatgattgcacgcatcaacgactggtttgaggaagtgaaagctaagcgcggcaagcgcccgacagccttccagttcctgcaagaaatcaagccggaagccgtagcgtacatcaccattaagaccactctggcttgcctaaccagtgcggacaatacaaccgttcaggctgtagcaagcgcaatcggtcgggccattgaggacgaggctcgcttcggtcgtatccgtgaccttgaagctaagcacttcaagggcaacgttgaggaacaactcaacaagcgcgtagggcacgtctacaagaaagcatttatgcaagttgtcgaggctgacatgctctctaagggtctactcggtggcgaggcgtggtcttcgtggcataaggaagactctattcatgtaggagtacgctgcatcgagatgctcattgagtcaaccggaatggttagcttacaccgccaaaatgctggcgtagtaggtcaagactctgagactatcgaactcgcacctgaatacgctgaggctatcgcaacccgtgcaggtgcgctggctggcatctctccgatgttccaaccttgcgtagttcctcctaagccgtggactggcattactggtggtggctattgggctgcggggcgcaaacccctgcagttagtacgtactcgcagtctggcggcgcttcgccgctatgaagaagtgtcgatgccggaggtcatcaaagcagtcaacattgcgcagaatacagcatggcgtattaacaagaaagttctcgacgtagcgaatgccatcacccaatggcagcactgtccagtcgcggatgtgcctgcgatggatcgtggcgaaatgccagctcgtccgttggacatcgataccaacgagattgcacttaaagcgtggaagaaagaagcttccgcgttctaccgcaaagacaaagcacgcgttagccgtcgtctgtcaatggagtttatgttatctcaggcgaacaagtttgcgaattataaagcaatctggtttccgcaaaacatggattggcgtgggcgcgtgtacgctgtcccgatgttcaatcctcagggcaacgatatgacgaaaggcctgctgacctttgcgcaggagaaacccattggtgaagacggcttctattggctcaagattcatggcgcaaatacagctggagtggataaagtaccgtttccacaacgcatcaaatttgttgaggataaccatacgaatattatggaatgcgcgaaagcaccgctggaaaacacttggtgggcggaacaggactcgccgttctgttttctggcgttctgctttgagtatgctggcgtcatcaatcatggtctgtcgtacaactgtagcttgcctctggcatttgatggtagttgctccggcattcaacatttctcagcgatgttacgcgacgaaattggcggcaaagctgtgaatctcctcccatctgcggaataccaggatatttatcgtatcgtcagcgacaaagttaacgagatgctgaaacaagatctgattaacggtacctctaccaccgtggaaacggtgactgataagaagacaggcgaaattacccaacgcacgaaatacgggaccaaagttatggcacagtggtggttagaacacggtgtgaatcgtggcgtcacgaaacgctcggttatgactttggtgtatgggagcaaagagtttggattccgcgatcaagtgctgagtgacaccattcaaccggcgatcgataacggcaaaggtgacatgtttctgaatccgaatcaggctgctggttacatggcgaaactgatctggaacgcagtgtccgggaccgtagtcgcagcagttgaggcgatgaactggctgaaaagtgcggcgaaattacttgctgctgaagtgaaggatcctaagacggatacagttctgcgtggccgctgcgcagtacattgggtgactcccgacggcttccctgtgtggcaggaatacaagaagcctattcagacgcgcttgaacctgatgttcctcggtcagttccgcttacagcctaccattaacaccaacaaagatagcgagattgatgcacacaaacaggagtctggtatcgctcctaactttgtacacagccaagacggtaaccaccttcgtatgactgtagtgtgggcacacgagaagtacggaatcgaatcttttgcactgattcacgactccttcggtaccattccggctgacgctgcgaacctgttcaaagcagtgcgcgaaactatggtttcgacatatgagtcttgtgatgtactggctgatttctacgaccagttcgctgaccagttgcacgagtctcaattggacaaaatgccagcacttccggctaaaggtaacttgaacctccgtgacatcttaaaatcggacttcgcgttcgcg

SEQ ID NO: 678 - protein, 890 aa, synthetic construct
  REGION 1..890: note = Variant of RNA polymerase
MHHHHHHMNTINIAKNDFSDIELAAIPFNTLADHYGERLAREQLALEHESYEMGEARFRKMFERQLKAGEVADNAAAKPLITTLLPKMIARINDWFEEVKAKRGKRPTAFQFLQEIKPEAVAYITIKTTLACLTSADNTTVQAVASAIGRAIEDEARFGRIRDLEAKHFKGNVEEQLNKRVGHVYKKAFMQVVEADMLSKGLLGGEAWSSWHKEDSIHVGVRCIEMLIESTGMVSLHRQNAGVVGQDSETIELAPEYAEAIATRAGALAGISPMFQPCVVPPKPWTGITGGGYWAAGRKPLQLVRTRSLAALRRYEEVSMPEVIKAVNIAQNTAWRINKKVLDVANAITQWQHCPVADVPAMDRGEMPARPLDIDTNEIALKAWKKEASAFYRKDKARVSRRLSMEFMLSQANKFANYKAIWFPQNMDWRGRVYAVPMFNPQGNDMTKGLLTFAQEKPIGEDGFYWLKIHGANTAGVDKVPFPQRIKFVEDNHTNIMECAKAPLENTWWAEQDSPFCFLAFCFEYAGVINHGLSYNCSLPLAFDGSCSGIQHFSAMLRDEIGGKAVNLLPSAEYQDIYRIVSDKVNEMLKQDLINGTSTTVETVTDKKTGEITQRTKYGTKVMAQWWLEHGVNRGVTKRSVMTLVYGSKEFGFRDQVLSDTIQPAIDNGKGDMFLNPNQAAGYMAKLIWNAVSGTVVAAVEAMNWLKSAAKLLAAEVKDPKTDTVLRGRCAVHWVTPDGFPVWQEYKKPIQTRLNLMFLGQFRLQPTINTNKDSEIDAHKQESGIAPNFVHSQDGNHLRMTVVWAHEKYGIESFALIHDSFGTIPADAANLFKAVRETMVSTYESCDVLADFYDQFADQLHESQLDKMPALPAKGNLNLRDILKSDFAFA

SEQ ID NO: 679 - DNA, 2670 bp, synthetic construct
  misc_feature 1..2670: note = Variant of RNA polymerase
  source 1..2670: mol_type = other DNA
atgcaccatcaccatcaccatatgaacacgattaacattgctaagaacgacttctctgacatcgaactggctgctatcccgttcaacactctggctgaccattacggtgagcgtttagctcgcgaacagttggcccttgagcatgagtcttacgagatgggtgaagcacgcttccgcaagatgtttgagcgtcaacttaaagctggtgaggttgcggataacgctgccgccaagcctctcatcactaccctactccctaagatgattgcacgcatcaacgactggtttgaggaagtgaaagctaagcgcggcaagcgcccgacagccttccagttcctgcaagaaatcaagccggaagccgtagcgtacatcaccattaagaccactctggcttgcctaaccagtgcggacaatacaaccgttcaggctgtagcaagcgcaatcggtcgggccattgaggacgaggctcgcttcggtcgtatccgtgaccttgaagctaagcacttcaagggcaacgttgaggaacaactcaacaagcgcgtagggcacgtctacaaagcagcatttatgcaagttgtcgaggctgacatgctctctaagggtctactcggtggcgaggcgtggtcttcgtggcataaggaagactctattcatgtaggagtacgctgcatcgagatgctcattgagtcaaccggaatggttagcttacaccgccaaaatgctggcgtagtaggtcaagactctgagactatcgaactcgcacctgaatacgctgaggctatcgcaacccgtgcaggtgcgctggctggcatctctccgatgttccaaccttgcgtagttcctcctaagccgtggactggcattactggtggtggctattgggctgcggggcgcaaacccctgcagttagtacgtactcgcagtctggcggcgcttcgccgctatgaagaagtgtcgatgccggaggtcatcaaagcagtcaacattgcgcagaatacagcatggcgtattaacaagaaagttctcgacgtagcgaatgccatcacccaatggcagcactgtccagtcgcggatgtgcctgcgatggatcgtggcgaaatgccagctcgtccgttggacatcgataccaacgagattgcacttaaagcgtggaagaaagaagcttccgcgttctaccgcaaagacaaagcacgcgttagccgtcgtctgtcaatggagtttatgttatctcaggcgaacaagtttgcgaattataaagcaatctggtttccgcaaaacatggattggcgtgggcgcgtgtacgctgtcccgatgttcaatcctcagggcaacgatatgacgaaaggcctgctgacctttgcgcaggagaaacccattggtgaagacggcttctattggctcaagattcatggcgcaaatacagctggagtggataaagtaccgtttccacaacgcatcaaatttgttgaggataaccatacgaatattatggaatgcgcgaaagcaccgctggaaaacacttggtgggcggaacaggactcgccgttctgttttctggcgttctgctttgagtatgctggcgtcatcaatcacggtctgtcgtacaactgtagcttgcctctggcatttgatggtagttgctccggcctgcaacatttctcagcgatgttacgcgacgaaattggcggcaaagctgtgaatctcctcccatctgcggaataccaggatatttatcgtatcgtcagcgacaaagttaacgaggtactgaaacaagatctgattaacggtacctctaccaccgtggaaacggtgactgataagaagacaggcgaaattacccaacgcacgaaatacgggaccaaagttatggcacagtggtggttagaacacggtgtgaatcgtggcgtcacgaaacgctcggttatgactttggtgtatgggagcaaagagtttggattccgcgatcaagtgctgagtgacaccattcaaccggcgatcgataacggcaaaggtgacatgtttctgaatccgaatcaggctgctggttacatggcgaaactgatctggaacgcagtgtccgggaccgtagtcgcagcagttgaggcgatgaactggctgaaaagtgcggcgaaattacttgctgctgaagtgaaggatcctaagacggatacagttctgcgtggccgctgcgcagtacattgggtgactcccgacggcttccctgtgtggcaggaatacaagaagcctattcagacgcgcttgaacctgatgttcctcggtcagttccgcttacagcctaccattaacaccaacaaagatagcgagattgatgcacacaaacaggagtctggtatcgctcctaactttgtacacagccaagacggtaaccaccttcgtatgactgtagtgtgggcacacgagaagtacggaatcgaatcttttgcactgattcacgactccttcggtaccattccggctgacgctgcgaacctgttcaaagcagtgcgcgaaactatggtttcgacatatgagtcttgtgatgtactggctgatttctacgaccagttcgctgaccagttgcacgagtctcaattggacaaaatgccagcacttccggctaaaggtaacttgaacctccgtgacatcttaaaatcggacttcgcgttcgcg

SEQ ID NO: 680 - protein, 890 aa, synthetic construct
  REGION 1..890: note = Variant of RNA polymerase
MHHHHHHMNTINIAKNDFSDIELAAIPFNTLADHYGERLAREQLALEHESYEMGEARFRKMFERQLKAGEVADNAAAKPLITTLLPKMIARINDWFEEVKAKRGKRPTAFQFLQEIKPEAVAYITIKTTLACLTSADNTTVQAVASAIGRAIEDEARFGRIRDLEAKHFKGNVEEQLNKRVGHVYKAAFMQVVEADMLSKGLLGGEAWSSWHKEDSIHVGVRCIEMLIESTGMVSLHRQNAGVVGQDSETIELAPEYAEAIATRAGALAGISPMFQPCVVPPKPWTGITGGGYWAAGRKPLQLVRTRSLAALRRYEEVSMPEVIKAVNIAQNTAWRINKKVLDVANAITQWQHCPVADVPAMDRGEMPARPLDIDTNEIALKAWKKEASAFYRKDKARVSRRLSMEFMLSQANKFANYKAIWFPQNMDWRGRVYAVPMFNPQGNDMTKGLLTFAQEKPIGEDGFYWLKIHGANTAGVDKVPFPQRIKFVEDNHTNIMECAKAPLENTWWAEQDSPFCFLAFCFEYAGVINHGLSYNCSLPLAFDGSCSGLQHFSAMLRDEIGGKAVNLLPSAEYQDIYRIVSDKVNEVLKQDLINGTSTTVETVTDKKTGEITQRTKYGTKVMAQWWLEHGVNRGVTKRSVMTLVYGSKEFGFRDQVLSDTIQPAIDNGKGDMFLNPNQAAGYMAKLIWNAVSGTVVAAVEAMNWLKSAAKLLAAEVKDPKTDTVLRGRCAVHWVTPDGFPVWQEYKKPIQTRLNLMFLGQFRLQPTINTNKDSEIDAHKQESGIAPNFVHSQDGNHLRMTVVWAHEKYGIESFALIHDSFGTIPADAANLFKAVRETMVSTYESCDVLADFYDQFADQLHESQLDKMPALPAKGNLNLRDILKSDFAFA

SEQ ID NO: 681 - DNA, 2670 bp, synthetic construct
  misc_feature 1..2670: note = Variant of RNA polymerase
  source 1..2670: mol_type = other DNA
atgcaccatcaccatcaccatatgaacacgattaacattgctaagaacgacttctctgacatcgaactggctgctatcccgttcaacactctggctgaccattacggtgagcgtttagctcgcgaacagttggcccttgagcatgagtcttacgagatgggtgaagcacgcttccgcaagatgtttgagcgtcaacttaaagctggtgaggttgcggataacgctgccgccaagcctctcatcactaccctactccctaagatgattgcacgcatcaacgactggtttgaggaagtgaaagctaagcgcggcaagcgcccgacagccttccagttcctgcaagaaatcaagccggaagccgtagcgtacatcaccattaagaccactctggcttgcctaaccagtgcggacaatacaaccgttcaggctgtagcaagcgcaatcggtcgggccattgaggacgaggctcgcttcggtcgtatccgtgaccttgaagctaagcacttcaagggcaacgttgaggaacaactcaacaagcgcgtagggcacccgtacaagaaagcatttatgcaagttgtcgaggctgacatgctctctaagggtctactcggtggcgaggcgtggtcttcgtggcataaggaagactctattcatgtaggagtacgctgcatcgagatgctcattgagtcaaccggaatggttagcttacaccgccaaaatgctggcgtagtaggtcaagactctgagactatcgaactcgcacctgaatacgctgaggctatcgcaacccgtgcaggtgcgctggctggcatctctccgatgttccaaccttgcgtagttcctcctaagccgtggactggcattactggtggtggctattgggctgcggggcgcaaacccctgcagttagtacgtactcgcagtctggcggcgcttcgccgctatgaagaagtgtcgatgccggaggtcatcaaagcagtcaacattgcgcagaatacagcatggcgtattaacaagaaagttctcgacgtagcgaataccatcacccaatggcagcactgtccagtcgcggatgtgcctgcgatggatcgtggcgaaatgccagctcgtccgttggacatcgataccaacgagattgcacttaaagcgtggaagaaagaagcttccgcgttctaccgcaaagacaaagcacgcgttagccgtcgtctgtcaatggagtttatgttatctcaggcgaacaagtttgcgaatgagaaagcaatctggtttccgcaaaacatggattggcgtgggcgcgtgtacgctgtcccgatgttcaatcctcagggcaacgatatgacgaaaggcctgctgacctttgcgcaggagaaacccattggtgaagacggcttctattggctcaagattcatggcgcaaatacagctggagtggataaagtaccgtttccacaacgcatcaaatttgttgaggataaccatacgaatattatggaatgcgcgaaagcaccgctggaaaacacttggtgggcggaacaggactcgccgttctgttttctggcgttctgctttgagtatgctggcgtcatcaatcatggtctgtcgtacaactgtagcttgcctctggcatttgatggtagttgctccggcattcaacatttctcagcgatgttacgcgacgaaattggcgccaaagctgtgaatctcctcccatctgcggaataccaggatatttatcgtatcgtcagcgacaaagttaacgaggtactgaaacaagatctgattaacggtacctctaccaccgtggaaacggtgactgataagaagacaggcgaaattacccaacgcacgaaatacgggaccaaagttatggcacagtggtggttagaacacggtgtgaatcgtggcgtcacgaaacgctcggttatgactttggtgtatgggagcaaagagtttggattccgcgatcaagtgctgagtgacaccattcaaccggcgatcgataacggcaaaggtgacatgtttctgaatccgaatcaggctgctggttacatggcgaaactgatctggaacgcagtgtccgggaccgtagtcgcagcagttgaggcgatgaactggctgaaaagtgcggcgaaattacttgctgctgaagtgaaggatcctaagacggatacagttctgcgtggccgctgcgcagtacattgggtgactcccgacggcttccctgtgtggcaggaatacaagaagcctattcagacgcgcttgaacctgatgttcctcggtcagttccgcttacagcctaccattaacaccaacaaagatagcgagattgatgcacacaaacaggagtctggtatcgctcctaactttgtacacagccaagacggtaaccaccttcgtatgactgtagtgtgggcacacgagaagtacggaatcgaatcttttgcactgattcacgactccttcggtaccattccggctgacgctgcgaacctgttcaaagcagtgcgcgaaactatggtttcgacatatgagtcttgtgatgtactggctgatttctacgaccagttcgctgaccagttgcacgagtctcaattggacaaaatgccagcacttccggctaaaggtaacttgaacctccgtgacatcttaaaatcggacttcgcgttcgcg

SEQ ID NO: 682 - protein, 890 aa, synthetic construct
  REGION 1..890: note = Variant of RNA polymerase
MHHHHHHMNTINIAKNDFSDIELAAIPFNTLADHYGERLAREQLALEHESYEMGEARFRKMFERQLKAGEVADNAAAKPLITTLLPKMIARINDWFEEVKAKRGKRPTAFQFLQEIKPEAVAYITIKTTLACLTSADNTTVQAVASAIGRAIEDEARFGRIRDLEAKHFKGNVEEQLNKRVGHPYKKAFMQVVEADMLSKGLLGGEAWSSWHKEDSIHVGVRCIEMLIESTGMVSLHRQNAGVVGQDSETIELAPEYAEAIATRAGALAGISPMFQPCVVPPKPWTGITGGGYWAAGRKPLQLVRTRSLAALRRYEEVSMPEVIKAVNIAQNTAWRINKKVLDVANTITQWQHCPVADVPAMDRGEMPARPLDIDTNEIALKAWKKEASAFYRKDKARVSRRLSMEFMLSQANKFANEKAIWFPQNMDWRGRVYAVPMFNPQGNDMTKGLLTFAQEKPIGEDGFYWLKIHGANTAGVDKVPFPQRIKFVEDNHTNIMECAKAPLENTWWAEQDSPFCFLAFCFEYAGVINHGLSYNCSLPLAFDGSCSGIQHFSAMLRDEIGAKAVNLLPSAEYQDIYRIVSDKVNEVLKQDLINGTSTTVETVTDKKTGEITQRTKYGTKVMAQWWLEHGVNRGVTKRSVMTLVYGSKEFGFRDQVLSDTIQPAIDNGKGDMFLNPNQAAGYMAKLIWNAVSGTVVAAVEAMNWLKSAAKLLAAEVKDPKTDTVLRGRCAVHWVTPDGFPVWQEYKKPIQTRLNLMFLGQFRLQPTINTNKDSEIDAHKQESGIAPNFVHSQDGNHLRMTVVWAHEKYGIESFALIHDSFGTIPADAANLFKAVRETMVSTYESCDVLADFYDQFADQLHESQLDKMPALPAKGNLNLRDILKSDFAFA

SEQ ID NO: 683 - DNA, 2670 bp, synthetic construct
  misc_feature 1..2670: note = Variant of RNA polymerase
  source 1..2670: mol_type = other DNA
atgcaccatcaccatcaccatatgaacacgattaacattgctaagaacgacttctctgacatcgaactggctgctatcccgttcaacactctggctgaccattacggtgagcgtttagctcgcgaacagttggcccttgagcatgagtcttacgagatgggtgaagcacgcttccgcaagatgtttgagcgtcaacttaaagctggtgaggttgcggataacgctgccgccaagcctctcatcactaccctactccctaagatgattgcacgcatcaacgactggtttgaggaagtgaaagctaagcgcggcaagcgcccgacagccttccagttcctgcaagaaatcaagccggaagccgtagcgtacatcaccattaagaccactctggcttgcctaaccagtgcggacaatacaaccgttcaggctgtagcaagcgcaatcggtcgggccattgaggacgaggctcgcttcggtcgtatccgtgaccttgaagctaagcacttcaagaagaacgttgaggaacaactcaacaagcgcgtagggcacgtgtacaagaaagcatttatgcaagttgtcgaggctgacatgctctctaagggtctactcggtggcgaggcgtggtcttcgtggcataaggaagactctattcatgtaggagtacgctgcatcgagatgctcattgagtcaaccggaatggttagcttacaccgccaaaatgctggcgtagtaggtcaagactctgagactatcgaactcgcacctgaatacgctgaggctatcgcaacccgtgcaggtgcgctggctggcatctctccgatgttccaaccttgcgtagttcctcctaagccgtggactggcattactggtggtggctattgggctgcggggcgcaaacccctgcagttagtacgtactcgcagtctggcggcgcttcgccgctatgaagaagtgtcgatgccggaggtcatcaaagcagtcaacattgcgcagaatacagcatggcgtattaacaagaaagttctcgacgtagcgaatgccatcacccaatggcagcactgtccagtcgcggatgtgcctgcgatggatcgtggcgaaatgccagctcgtccgttggacatcgataccaacgagattgcacttaaagcgtggaagaaagaagcttccgcgttctaccgcaaagacaaagcacgcgttagccgtcgtctgtcaatggagtttatgttatctcaggcgaacaagtttgcgaattataaagcaatctggtttccgcaaaacatggattggcgtgggcgcgtgtacgctgtcccgatgttcaatcctcagggcaacgatatgacgaaaggcctgctgacctttgcgcaggagaaacccattggtgaagacggcttctattggctcaagattcatggcgcaaatacagctggagtggataaagtaccgtttccacaacgcatcaaatttgttgaggataaccatacgaatattatggaatgcgcgaaagcaccgctggaaaacacttggtgggcggaacaggactcgccgttctgttttctggcgttctgctttgagtatgctggcgtcatcaatcatggtctgtcgtacaactgtagcttgcctctggcatttgatggtagttgctccggcattcaacatttctcagcgatgttacgcgacgaaattggcggcaaagctgtgaatctcctcccatctgcggaataccaggatatttatcgtatcgtcagcgacaaagttaacgaggcgctgaaacaagatctgattaacggtacctctaccaccgtggaaacggtgactgataagaagacaggcgaaattacccaacgcacgaaatacgggaccaaagttatggcacagtggtggttagaacacggtgtgaatcgtggcgtcacgaaacgctcggttatgactttggtgtatgggagcaaagagtttggattccgcgatcaagtgctgagtgacaccattcaaccggcgatcgataacggcaaaggtgacatgtttctgaatccgaatcaggctgctggttacatggcgaaactgatctggaacgcagtgtccgggaccgtagtcgcagcagttgaggcgatgaactggctgaaaagtgcggcgaaattacttgctgctgaagtgaaggatcctaagacggatacagttctgcgtggccgctgcgcagtacattgggtgactcccgacggcttccctgtgtggcaggaatacaagaagcctattcagacgcgcttgaacctgatgttcctcggtcagttccgcttacagcctaccattaacaccaacaaagatagcgagattgatgcacacaaacaggagtctggtatcgctcctaactttgtacacagccaagacggtaaccaccttcgtatgactgtagtgtgggcacacgagaagtacggaatcgaatcttttgcactgattcacgactccttcggtaccattccggctgacgctgcgaacctgttcaaagcagtgcgcgaaactatggtttcgacatatgagtcttgtgatgtactggctgatttctacgaccagttcgctgaccagttgcacgagtctcaattggacaaaatgccagcacttccggctaaaggtaacttgaacctccgtgacatcttaaaatcggacttcgcgttcgcg

SEQ ID NO: 684 - protein, 890 aa, synthetic construct
  REGION 1..890: note = Variant of RNA polymerase
MHHHHHHMNTINIAKNDFSDIELAAIPFNTLADHYGERLAREQLALEHESYEMGEARFRKMFERQLKAGEVADNAAAKPLITTLLPKMIARINDWFEEVKAKRGKRPTAFQFLQEIKPEAVAYITIKTTLACLTSADNTTVQAVASAIGRAIEDEARFGRIRDLEAKHFKKNVEEQLNKRVGHVYKKAFMQVVEADMLSKGLLGGEAWSSWHKEDSIHVGVRCIEMLIESTGMVSLHRQNAGVVGQDSETIELAPEYAEAIATRAGALAGISPMFQPCVVPPKPWTGITGGGYWAAGRKPLQLVRTRSLAALRRYEEVSMPEVIKAVNIAQNTAWRINKKVLDVANAITQWQHCPVADVPAMDRGEMPARPLDIDTNEIALKAWKKEASAFYRKDKARVSRRLSMEFMLSQANKFANYKAIWFPQNMDWRGRVYAVPMFNPQGNDMTKGLLTFAQEKPIGEDGFYWLKIHGANTAGVDKVPFPQRIKFVEDNHTNIMECAKAPLENTWWAEQDSPFCFLAFCFEYAGVINHGLSYNCSLPLAFDGSCSGIQHFSAMLRDEIGGKAVNLLPSAEYQDIYRIVSDKVNEALKQDLINGTSTTVETVTDKKTGEITQRTKYGTKVMAQWWLEHGVNRGVTKRSVMTLVYGSKEFGFRDQVLSDTIQPAIDNGKGDMFLNPNQAAGYMAKLIWNAVSGTVVAAVEAMNWLKSAAKLLAAEVKDPKTDTVLRGRCAVHWVTPDGFPVWQEYKKPIQTRLNLMFLGQFRLQPTINTNKDSEIDAHKQESGIAPNFVHSQDGNHLRMTVVWAHEKYGIESFALIHDSFGTIPADAANLFKAVRETMVSTYESCDVLADFYDQFADQLHESQLDKMPALPAKGNLNLRDILKSDFAFA

SEQ ID NO: 685 - DNA, 2670 bp, synthetic construct
  misc_feature 1..2670: note = Variant of RNA polymerase
  source 1..2670: mol_type = other DNA
atgcaccatcaccatcaccatatgaacacgattaacattgctaagaacgacttctctgacatcgaactggctgctatcccgttcaacactctggctgaccattacggtgagcgtttagctcgcgaacagttggcccttgagcatgagtcttacgagatgggtgaagcacgcttccgcaagatgtttgagcgtcaacttaaagctggtgaggttgcggataacgctgccgccaagcctctcatcactaccctactccctaagatgattgcacgcatcaacgactggtttgaggaagtgaaagctaagcgcggcaagcgcccgacagccttccagttcctgcaagaaatcaagccggaagccgtagcgtacatcaccattaagaccactctggcttgcctaaccagtgcggacaatacaaccgttcaggctgtagcaagcgcaatcggtcgggccattgaggacgaggctcgcttcggtcgtatccgtgaccttgaagctaagcacttcaagaaaaacgttgaggaacaactcaacaagcgcgtagggcacgtctacaagaaagcatttatgcaagttgtcgaggctgacatgctctctaagggtctactcggtggcgaggcgtggtcttcgtggcataaggaagactctattcatgtaggagtacgctgcatcgagatgctcattgagtcaaccggaatggttagcttacaccgccaaaatgctggcgtagtaggtcaagactctgagactatcgaactcgcacctgaatacgctgaggctatcgcaacccgtgcaggtgcgctggctggcatctctccgatgttccaaccttgcgtagttcctcctaagccgtggactggcattactggtggtggctattgggctgcggggcgcaaacccctgcagttagtacgtactcgcagtctggcggcgcttcgccgctatgaagaagtgtcgatgccggaggtcatcaaagcagtcaacattgcgcagaatacagcatggcgtattaacaagaaagttctcgacgtagcgaataccatcacccaatggcagcactgtccagtcgcggatgtgcctgcgatggatcgtggcgaaatgccagctcgtccgttggacatcgataccaacgagattgcacttaaagcgtggaagaaagaagcttccgcgttctaccgcaaagacaaagcacgcgttagccgtcgtctgtcaatggagtttatgttatctcaggcgaacaagtttgcgaattataaagcaatctggtttccgcaaaacatggattggcgtgggcgcgtgtacgctgtcccgatgttcaatcctcagggcaacgatatgacgaaaggcctgctgacctttgcgcaggagaaacccattggtgaagacggcttctattggctcaagattcatggcgcaaatacagctggagtggataaagtaccgtttccacaacgcatcaaatttgttgaggataaccatacgaatattatggaatgcgcgaaagcaccgctggaaaacacttggtgggcggaacaggactcgccgttctgttttctggcgttctgctttgagtatgctggcgtcatcaatagtggtctgtcgtacaactgtagcttgcctctggcatttgatggtagttgctccggcatccaacatttctcagcgatgttacgcgacgaaattggcggcaaagctgtgaatctcctcccatctgcggaataccaggatatttatcgtatcgtcagcgacaaagttaacgagatgctgaaacaagatctgattaacggtacctctaccaccgtggaaacggtgactgataagaagacaggcgaaattacccaacgcacgaaatacgggaccaaagttatggcacagtggtggttagaacacggtgtgaatcgtggcgtcacgaaacgctcggttatgactttggtgtatgggagcaaagagtttggattccgcgatcaagtgctgagtgacaccattcaaccggcgatcgataacggcaaaggtgacatgtttctgaatccgaatcaggctgctggttacatggcgaaactgatctggaacgcagtgtccgggaccgtagtcgcagcagttgaggcgatgaactggctgaaaagtgcggcgaaattacttgctgctgaagtgaaggatcctaagacggatacagttctgcgtggccgctgcgcagtacattgggtgactcccgacggcttccctgtgtggcaggaatacaagaagcctattcagacgcgcttgaacctgatgttcctcggtcagttccgcttacagcctaccattaacaccaacaaagatagcgagattgatgcacacaaacaggagtctggtatcgctcctaactttgtacacagccaagacggtaaccaccttcgtatgactgtagtgtgggcacacgagaagtacggaatcgaatcttttgcactgattcacgactccttcggtaccattccggctgacgctgcgaacctgttcaaagcagtgcgcgaaactatggtttcgacatatgagtcttgtgatgtactggctgatttctacgaccagttcgctgaccagttgcacgagtctcaattggacaaaatgccagcacttccggctaaaggtaacttgaacctccgtgacatcttaaaatcggacttcgcgttcgcg

SEQ ID NO: 686 - protein, 890 aa, synthetic construct
  REGION 1..890: note = Variant of RNA polymerase
MHHHHHHMNTINIAKNDFSDIELAAIPFNTLADHYGERLAREQLALEHESYEMGEARFRKMFERQLKAGEVADNAAAKPLITTLLPKMIARINDWFEEVKAKRGKRPTAFQFLQEIKPEAVAYITIKTTLACLTSADNTTVQAVASAIGRAIEDEARFGRIRDLEAKHFKKNVEEQLNKRVGHVYKKAFMQVVEADMLSKGLLGGEAWSSWHKEDSIHVGVRCIEMLIESTGMVSLHRQNAGVVGQDSETIELAPEYAEAIATRAGALAGISPMFQPCVVPPKPWTGITGGGYWAAGRKPLQLVRTRSLAALRRYEEVSMPEVIKAVNIAQNTAWRINKKVLDVANTITQWQHCPVADVPAMDRGEMPARPLDIDTNEIALKAWKKEASAFYRKDKARVSRRLSMEFMLSQANKFANYKAIWFPQNMDWRGRVYAVPMFNPQGNDMTKGLLTFAQEKPIGEDGFYWLKIHGANTAGVDKVPFPQRIKFVEDNHTNIMECAKAPLENTWWAEQDSPFCFLAFCFEYAGVINSGLSYNCSLPLAFDGSCSGIQHFSAMLRDEIGGKAVNLLPSAEYQDIYRIVSDKVNEMLKQDLINGTSTTVETVTDKKTGEITQRTKYGTKVMAQWWLEHGVNRGVTKRSVMTLVYGSKEFGFRDQVLSDTIQPAIDNGKGDMFLNPNQAAGYMAKLIWNAVSGTVVAAVEAMNWLKSAAKLLAAEVKDPKTDTVLRGRCAVHWVTPDGFPVWQEYKKPIQTRLNLMFLGQFRLQPTINTNKDSEIDAHKQESGIAPNFVHSQDGNHLRMTVVWAHEKYGIESFALIHDSFGTIPADAANLFKAVRETMVSTYESCDVLADFYDQFADQLHESQLDKMPALPAKGNLNLRDILKSDFAFA

SEQ ID NO: 687 - DNA, 2670 bp, synthetic construct
  misc_feature 1..2670: note = Variant of RNA polymerase
  source 1..2670: mol_type = other DNA
atgcaccatcaccatcaccatatgaacacgattaacattgctaagaacgacttctctgacatcgaactggctgctatcccgttcaacactctggctgaccattacggtgagcgtttagctcgcgaacagttggcccttgagcatgagtcttacgagatgggtgaagcacgcttccgcaagatgtttgagcgtcaacttaaagctggtgaggttgcggataacgctgccgccaagcctctcatcactaccctactccctaagatgattgcacgcatcaacgactggtttgaggaagtgaaagctaagcgcggcaagcgcccgacagccttccagttcctgcaagaaatcaagccggaagccgtagcgtacatcaccattaagaccactctggcttgcctaaccagtgcggacaatacaaccgttcaggctgtagcaagcgcaatcggtcgggccattgaggacgaggctcgcttcggtcgtatccgtgaccttgaagctaagcacttcaagaaaattgttgaggaacaactcaacaagcgcgtagggcacgtctaccaagcagcatttatgcaagttgtcgaggctgacatgctctctaagggtctactcggtggcgaggcgtggtcttcgtggcataaggaagactctattcatgtaggagtacgctgcatcgagatgctcattgagtcaaccggaatggttagcttacaccgccaaaatgctggcgtagtaggtcaagactctgagactatcgaactcgcacctgaatacgctgaggctatcgcaacccgtgcaggtgcgctggctggcatctctccgatgttccaaccttgcgtagttcctcctaagccgtggactggcattactggtggtggctattgggctgcggggcgcaaacccctgcagttagtacgtactcgcagtctggcggcgcttcgccgctatgaagaagtgtcgatgccggaggtcatcaaagcagtcaacattgcgcagaatacagcatggcgtattaacaagaaagttctcgacgtagcgaatgccatcacccaatggcagcactgtccagtcgcggatgtgcctgcgatggatcgtggcgaaatgccagctcgtccgttggacatcgataccaacgagattgcacttaaagcgtggaagaaagaagcttccgcgttctaccgcaaagacaaagcacgcgttagccgtcgtctgtcaatggagtttatgttatctcaggcgaacaagtttgcgaattataaagcaatctggtttccgcaaaacatggattggcgtgggcgcgtgtacgctgtcccgatgttcaatcctcagggcaacgatatgacgaaaggcctgctgacctttgcgcaggagaaacccattggtgaagacggcttctattggctcaagattcatggcgcaaatacagctggagtggataaagtaccgtttccacaacgcatcaaatttgttgaggataaccatacgaatattatggaatgcgcgaaagcaccgctggaaaacacttggtgggcggaacaggactcgccgttctgttttctggcgttctgctttgagtatgctggcgtcatcaatagtggtctgtcgtacaactgtagcttgcctctggcatttgatggtagttgctccggcatccaacatttctcagcgatgttacgcgacgaaattggcgccaaagctgtgaatctcctcccatctgcggaataccaggatatttatcgtatcgtcagcgacaaagttaacgaggcgctgaaacaagatctgattaacggtacctctaccaccgtggaaacggtgactgataagaagacaggcgaaattacccaacgcacgaaatacgggaccaaagttatggcacagtggtggttagaacacggtgtgaatcgtggcgtcacgaaacgctcggttatgactttggtgtatgggagcaaagagtttggattccgcgatcaagtgctgagtgacaccattcaaccggcgatcgataacggcaaaggtgacatgtttctgaatccgaatcaggctgctggttacatggcgaaactgatctggaacgcagtgtccgggaccgtagtcgcagcagttgaggcgatgaactggctgaaaagtgcggcgaaattacttgctgctgaagtgaaggatcctaagacggatacagttctgcgtggccgctgcgcagtacattgggtgactcccgacggcttccctgtgtggcaggaatacaagaagcctattcagacgcgcttgaacctgatgttcctcggtcagttccgcttacagcctaccattaacaccaacaaagatagcgagattgatgcacacaaacaggagtctggtatcgctcctaactttgtacacagccaagacggtaaccaccttcgtatgactgtagtgtgggcacacgagaagtacggaatcgaatcttttgcactgattcacgactccttcggtaccattccggctgacgctgcgaacctgttcaaagcagtgcgcgaaactatggtttcgacatatgagtcttgtgatgtactggctgatttctacgaccagttcgctgaccagttgcacgagtctcaattggacaaaatgccagcacttccggctaaaggtaacttgaacctccgtgacatcttaaaatcggacttcgcgttcgcg

SEQ ID NO: 688 - protein, 890 aa, synthetic construct
  REGION 1..890: note = Variant of RNA polymerase
MHHHHHHMNTINIAKNDFSDIELAAIPFNTLADHYGERLAREQLALEHESYEMGEARFRKMFERQLKAGEVADNAAAKPLITTLLPKMIARINDWFEEVKAKRGKRPTAFQFLQEIKPEAVAYITIKTTLACLTSADNTTVQAVASAIGRAIEDEARFGRIRDLEAKHFKKIVEEQLNKRVGHVYQAAFMQVVEADMLSKGLLGGEAWSSWHKEDSIHVGVRCIEMLIESTGMVSLHRQNAGVVGQDSETIELAPEYAEAIATRAGALAGISPMFQPCVVPPKPWTGITGGGYWAAGRKPLQLVRTRSLAALRRYEEVSMPEVIKAVNIAQNTAWRINKKVLDVANAITQWQHCPVADVPAMDRGEMPARPLDIDTNEIALKAWKKEASAFYRKDKARVSRRLSMEFMLSQANKFANYKAIWFPQNMDWRGRVYAVPMFNPQGNDMTKGLLTFAQEKPIGEDGFYWLKIHGANTAGVDKVPFPQRIKFVEDNHTNIMECAKAPLENTWWAEQDSPFCFLAFCFEYAGVINSGLSYNCSLPLAFDGSCSGIQHFSAMLRDEIGAKAVNLLPSAEYQDIYRIVSDKVNEALKQDLINGTSTTVETVTDKKTGEITQRTKYGTKVMAQWWLEHGVNRGVTKRSVMTLVYGSKEFGFRDQVLSDTIQPAIDNGKGDMFLNPNQAAGYMAKLIWNAVSGTVVAAVEAMNWLKSAAKLLAAEVKDPKTDTVLRGRCAVHWVTPDGFPVWQEYKKPIQTRLNLMFLGQFRLQPTINTNKDSEIDAHKQESGIAPNFVHSQDGNHLRMTVVWAHEKYGIESFALIHDSFGTIPADAANLFKAVRETMVSTYESCDVLADFYDQFADQLHESQLDKMPALPAKGNLNLRDILKSDFAFA

SEQ ID NO: 689 - DNA, 2670 bp, synthetic construct
  misc_feature 1..2670: note = Variant of RNA polymerase
  source 1..2670: mol_type = other DNA
atgcaccatcaccatcaccatatgaacacgattaacattgctaagaacgacttctctgacatcgaactggctgctatcccgttcaacactctggctgaccattacggtgagcgtttagctcgcgaacagttggcccttgagcatgagtcttacgagatgggtgaagcacgcttccgcaagatgtttgagcgtcaacttaaagctggtgaggttgcggataacgctgccgccaagcctctcatcactaccctactccctaagatgattgcacgcatcaacgactggtttgaggaagtgaaagctaagcgcggcaagcgcccgacagccttccagttcctgcaagaaatcaagccggaagccgtagcgtacatcaccattaagaccactctggcttgcctaaccagtgcggacaatacaaccgttcaggctgtagcaagcgcaatcggtcgggccattgaggacgaggctcgcttcggtcgtatccgtgaccttgaagctaagcacttcaagaaaaatgttgaggaacaactcaacaagcgcgtagggcacgtctacaagaaagcatttatgcaagttgtcgaggctgacatgctctctaagggtctactcggtggcgaggcgtggtcttcgtggcataaggaagactctattcatgtaggagtacgctgcatcgagatgctcattgagtcaaccggaatggttagcttacaccgccaaaatgctggcgtagtaggtcaagactctgagactatcgaactcgcacctgaatacgctgaggctatcgcaacccgtgcaggtgcgctggctggcatctctccgatgttccaaccttgcgtagttcctcctaagccgtggactggcattactggtggtggctattgggctgcggggcgcaaacccctgcagttagtacgtactcgcagtctggcggcgcttcgccgctatgaagaagtgtcgatgccggaggtcatcaaagcagtcaacattgcgcagaatacagcatggcgtattaacaagaaagttctcgacgtagcgaatgcaatcacccaatggcagcactgtccagtcgcggatgtgcctgcgatggatcgtggcgaaatgccagctcgtccgttggacatcgataccaacgagattgcacttaaagcgtggaagaaagaagcttccgcgttctaccgcaaagacaaagcacgcgttagccgtcgtctgtcaatggagtttatgttatctcaggcgaacaagtttgcgaattataaagcaatctggtttccgcaaaacatggattggcgtgggcgcgtgtacgctgtcccgatgttcaatcctcagggcaacgatatgacgaaaggcctgctgacctttgcgcaggagaaacccattggtgaagacggcttctattggctcaagattcatggcgcaaatacagctggagtggataaagtaccgtttccacaacgcatcaaatttgttgaggataaccatacgaatattatggaatgcgcgaaagcaccgctggaaaacacttggtgggcggaacaggactcgccgttctgttttctggcgttctgctttgagtatgctggcgtcatcaatcatggtctgtcgtacaactgtagcttgcctctggcatttgatggtagttgctccggcctgcaacatttctcagcgatgttacgcgacgaaattggcggcaaagctgtgaatctcctcccatctgcggaataccaggatatttatcgtatcgtcagcgacaaagttaacgaggtgctgaaacaagatctgattaacggtacctctaccaccgtggaaacggtgactgataagaagacaggcgaaattacccaacgcacgaaatacgggaccaaagttatggcacagtggtggttagaacacggtgtgaatcgtggcgtcacgaaacgctcggttatgactttggtgtatgggagcaaagagtttggattccgcgatcaagtgctgagtgacaccattcaaccggcgatcgataacggcaaaggtgacatgtttctgaatccgaatcaggctgctggttacatggcgaaactgatctggaacgcagtgtccgggaccgtagtcgcagcagttgaggcgatgaactggctgaaaagtgcggcgaaattacttgctgctgaagtgaaggatcctaagacggatacagttctgcgtggccgctgcgcagtacattgggtgactcccgacggcttccctgtgtggcaggaatacaagaagcctattcagacgcgcttgaacctgatgttcctcggtcagttccgcttacagcctaccattaacaccaacaaagatagcgagattgatgcacacaaacaggagtctggtatcgctcctaactttgtacacagccaagacggtaaccaccttcgtatgactgtagtgtgggcacacgagaagtacggaatcgaatcttttgcactgattcacgactccttcggtaccattccggctgacgctgcgaacctgttcaaagcagtgcgcgaaactatggtttcgacatatgagtcttgtgatgtactggctgatttctacgaccagttcgctgaccagttgcacgagtctcaattggacaaaatgccagcacttccggctaaaggtaacttgaacctccgtgacatcttaaaatcggacttcgcgttcgcg

SEQ ID NO: 690 - protein, 890 aa, synthetic construct
  REGION 1..890: note = Variant of RNA polymerase
MHHHHHHMNTINIAKNDFSDIELAAIPFNTLADHYGERLAREQLALEHESYEMGEARFRKMFERQLKAGEVADNAAAKPLITTLLPKMIARINDWFEEVKAKRGKRPTAFQFLQEIKPEAVAYITIKTTLACLTSADNTTVQAVASAIGRAIEDEARFGRIRDLEAKHFKKNVEEQLNKRVGHVYKKAFMQVVEADMLSKGLLGGEAWSSWHKEDSIHVGVRCIEMLIESTGMVSLHRQNAGVVGQDSETIELAPEYAEAIATRAGALAGISPMFQPCVVPPKPWTGITGGGYWAAGRKPLQLVRTRSLAALRRYEEVSMPEVIKAVNIAQNTAWRINKKVLDVANAITQWQHCPVADVPAMDRGEMPARPLDIDTNEIALKAWKKEASAFYRKDKARVSRRLSMEFMLSQANKFANYKAIWFPQNMDWRGRVYAVPMFNPQGNDMTKGLLTFAQEKPIGEDGFYWLKIHGANTAGVDKVPFPQRIKFVEDNHTNIMECAKAPLENTWWAEQDSPFCFLAFCFEYAGVINHGLSYNCSLPLAFDGSCSGLQHFSAMLRDEIGGKAVNLLPSAEYQDIYRIVSDKVNEVLKQDLINGTSTTVETVTDKKTGEITQRTKYGTKVMAQWWLEHGVNRGVTKRSVMTLVYGSKEFGFRDQVLSDTIQPAIDNGKGDMFLNPNQAAGYMAKLIWNAVSGTVVAAVEAMNWLKSAAKLLAAEVKDPKTDTVLRGRCAVHWVTPDGFPVWQEYKKPIQTRLNLMFLGQFRLQPTINTNKDSEIDAHKQESGIAPNFVHSQDGNHLRMTVVWAHEKYGIESFALIHDSFGTIPADAANLFKAVRETMVSTYESCDVLADFYDQFADQLHESQLDKMPALPAKGNLNLRDILKSDFAFA

SEQ ID NO: 691 - DNA, 2670 bp, synthetic construct
  misc_feature 1..2670: note = Variant of RNA polymerase
  source 1..2670: mol_type = other DNA
atgcaccatcaccatcaccatatgaacacgattaacattgctaagaacgacttctctgacatcgaactggctgctatcccgttcaacactctggctgaccattacggtgagcgtttagctcgcgaacagttggcccttgagcatgagtcttacgagatgggtgaagcacgcttccgcaagatgtttgagcgtcaacttaaagctggtgaggttgcggataacgctgccgccaagcctctcatcactaccctactccctaagatgattgcacgcatcaacgactggtttgaggaagtgaaagctaagcgcggcaagcgcccgacagccttccagttcctgcaagaaatcaagccggaagccgtagcgtacatcaccattaagaccactctggcttgcctaaccagtgcggacaatacaaccgttcaggctgtagcaagcgcaatcggtcgggccattgaggacgaggctcgcttcggtcgtatccgtgaccttgaagctaagcacttcaagaaaaacgttgaggaacaactcaacaagcgcgtagggcacgtctacaagaaagcatttatgcaagttgtcgaggctgacatgctctctaagggtctactcggtggcgaggcgtggtcttcgtggcataaggaagactctattcatgtaggagtacgctgcatcgagatgctcattgagtcaaccggaatggttagcttacaccgccaaaatgctggcgtagtaggtcaagactctgagactatcgaactcgcacctgaatacgctgaggctatcgcaacccgtgcaggtgcgctggctggcatctctccgatgttccaaccttgcgtagttcctcctaagccgtggactggcattactggtggtggctattgggctgcggggcgcaaacccctgcagttagtacgtactcgcagtctggcggcgcttcgccgctatgaagaagtgtcgatgccggaggtcatcaaagcagtcaacattgcgcagaatacagcatggcgtattaacaagaaagttctcgacgtagcgaatgcaatcacccaatggcagcactgtccagtcgcggatgtgcctgcgatggatcgtggcgaaatgccagctcgtccgttggacatcgataccaacgagattgcacttaaagcgtggaagaaagaagcttccgcgttctaccgcaaagacaaagcacgcgttagccgtcgtctgtcaatggagtttatgttatctcaggcgaacaagtttgcgaattataaagcaatctggtttccgcaaaacatggattggcgtgggcgcgtgtacgctgtcccgatgttcaatcctcagggcaacgatatgacgaaaggcctgctgacctttgcgcaggagaaacccattggtgaagacggcttctattggctcaagattcatggcgcaaatacagctggagtggataaagtaccgtttccacaacgcatcaaatttgttgaggataaccatacgaatattatggaatgcgcgaaagcaccgctggaaaacacttggtgggcggaacaggactcgccgttctgttttctggcgttctgctttgagtatgctggcgtcatcaatagtggtctgtcgtacaactgtagcttgcctctggcatttgatggtagttgctccggcctgcaacatttctcagcgatgttacgcgacgaaattggcggcaaagctgtgaatctcctcccatctgcggaataccaggatatttatcgtatcgtcagcgacaaagttaacgaggtactgaaacaagatctgattaacggtacctctaccaccgtggaaacggtgactgataagaagacaggcgaaattacccaacgcacgaaatacgggaccaaagttatggcacagtggtggttagaacacggtgtgaatcgtggcgtcacgaaacgctcggttatgactttggtgtatgggagcaaagagtttggattccgcgatcaagtgctgagtgacaccattcaaccggcgatcgataacggcaaaggtgacatgtttctgaatccgaatcaggctgctggttacatggcgaaactgatctggaacgcagtgtccgggaccgtagtcgcagcagttgaggcgatgaactggctgaaaagtgcggcgaaattacttgctgctgaagtgaaggatcctaagacggatacagttctgcgtggccgctgcgcagtacattgggtgactcccgacggcttccctgtgtggcaggaatacaagaagcctattcagacgcgcttgaacctgatgttcctcggtcagttccgcttacagcctaccattaacaccaacaaagatagcgagattgatgcacacaaacaggagtctggtatcgctcctaactttgtacacagccaagacggtaaccaccttcgtatgactgtagtgtgggcacacgagaagtacggaatcgaatcttttgcactgattcacgactccttcggtaccattccggctgacgctgcgaacctgttcaaagcagtgcgcgaaactatggtttcgacatatgagtcttgtgatgtactggctgatttctacgaccagttcgctgaccagttgcacgagtctcaattggacaaaatgccagcacttccggctaaaggtaacttgaacctccgtgacatcttaaaatcggacttcgcgttcgcg

SEQ ID NO: 692 - protein, 890 aa, synthetic construct
  REGION 1..890: note = Variant of RNA polymerase
MHHHHHHMNTINIAKNDFSDIELAAIPFNTLADHYGERLAREQLALEHESYEMGEARFRKMFERQLKAGEVADNAAAKPLITTLLPKMIARINDWFEEVKAKRGKRPTAFQFLQEIKPEAVAYITIKTTLACLTSADNTTVQAVASAIGRAIEDEARFGRIRDLEAKHFKKNVEEQLNKRVGHVYKKAFMQVVEADMLSKGLLGGEAWSSWHKEDSIHVGVRCIEMLIESTGMVSLHRQNAGVVGQDSETIELAPEYAEAIATRAGALAGISPMFQPCVVPPKPWTGITGGGYWAAGRKPLQLVRTRSLAALRRYEEVSMPEVIKAVNIAQNTAWRINKKVLDVANAITQWQHCPVADVPAMDRGEMPARPLDIDTNEIALKAWKKEASAFYRKDKARVSRRLSMEFMLSQANKFANYKAIWFPQNMDWRGRVYAVPMFNPQGNDMTKGLLTFAQEKPIGEDGFYWLKIHGANTAGVDKVPFPQRIKFVEDNHTNIMECAKAPLENTWWAEQDSPFCFLAFCFEYAGVINSGLSYNCSLPLAFDGSCSGLQHFSAMLRDEIGGKAVNLLPSAEYQDIYRIVSDKVNEVLKQDLINGTSTTVETVTDKKTGEITQRTKYGTKVMAQWWLEHGVNRGVTKRSVMTLVYGSKEFGFRDQVLSDTIQPAIDNGKGDMFLNPNQAAGYMAKLIWNAVSGTVVAAVEAMNWLKSAAKLLAAEVKDPKTDTVLRGRCAVHWVTPDGFPVWQEYKKPIQTRLNLMFLGQFRLQPTINTNKDSEIDAHKQESGIAPNFVHSQDGNHLRMTVVWAHEKYGIESFALIHDSFGTIPADAANLFKAVRETMVSTYESCDVLADFYDQFADQLHESQLDKMPALPAKGNLNLRDILKSDFAFA

SEQ ID NO: 693 - DNA, 2670 bp, synthetic construct
  misc_feature 1..2670: note = Variant of RNA polymerase
  source 1..2670: mol_type = other DNA
atgcaccatcaccatcaccatatgaacacgattaacattgctaagaacgacttctctgacatcgaactggctgctatcccgttcaacactctggctgaccattacggtgagcgtttagctcgcgaacagttggcccttgagcatgagtcttacgagatgggtgaagcacgcttccgcaagatgtttgagcgtcaacttaaagctggtgaggttgcggataacgctgccgccaagcctctcatcactaccctactccctaagatgattgcacgcatcaacgactggtttgaggaagtgaaagctaagcgcggcaagcgcccgacagccttccagttcctgcaagaaatcaagccggaagccgtagcgtacatcaccattaagaccactctggcttgcctaaccagtgcggacaatacaaccgttcaggctgtagcaagcgcaatcggtcgggccattgaggacgaggctcgcttcggtcgtatccgtgaccttgaagctaagcacttcaagaaaattgttgaggaacaactcaacaagcgcgtagggcacgtgtacaagaaagcatttatgcaagttgtcgaggctgacatgctctctaagggtctactcggtggcgaggcgtggtcttcgtggcataaggaagactctattcatgtaggagtacgctgcatcgagatgctcattgagtcaaccggaatggttagcttacaccgccaaaatgctggcgtagtaggtcaagactctgagactatcgaactcgcacctgaatacgctgaggctatcgcaacccgtgcaggtgcgctggctggcatctctccgatgttccaaccttgcgtagttcctcctaagccgtggactggcattactggtggtggctattgggctgcggggcgcaaacccctgcagttagtacgtactcgcagtctggcggcgcttcgccgctatgaagaagtgtcgatgccggaggtcatcaaagcagtcaacattgcgcagaatacagcatggcgtattaacaagaaagttctcgacgtagcgaatgcaatcacccaatggcagcactgtccagtcgcggatgtgcctgcgatggatcgtggcgaaatgccagctcgtccgttggacatcgataccaacgagattgcacttaaagcgtggaagaaagaagcttccgcgttctaccgcaaagacaaagcacgcgttagccgtcgtctgtcaatggagtttatgttatctcaggcgaacaagtttgcgaattataaagcaatctggtttccgcaaaacatggattggcgtgggcgcgtgtacgctgtcccgatgttcaatcctcagggcaacgatatgacgaaaggcctgctgacctttgcgcaggagaaacccattggtgaagacggcttctattggctcaagattcatggcgcaaatacagctggagtggataaagtaccgtttccacaacgcatcaaatttgttgaggataaccatacgaatattatggaatgcgcgaaagcaccgctggaaaacacttggtgggcggaacaggactcgccgttctgttttctggcgttctgctttgagtatgctggcgtcatcaatcatggtctgtcgtacaactgtagcttgcctctggcatttgatggtagttgctccggcattcaacatttctcagcgatgttacgcgacgaaattggcggcaaagctgtgaatctcctcccatctgcggaataccaggatatttatcgtatcgtcagcgacaaagttaacgagatgctgaaacaagatctgattaacggtacctctaccaccgtggaaacggtgactgataagaagacaggcgaaattacccaacgcacgaaatacgggaccaaagttatggcacagtggtggttagaacacggtgtgaatcgtggcgtcacgaaacgctcggttatgactttggtgtatgggagcaaagagtttggattccgcgatcaagtgctgagtgacaccattcaaccggcgatcgataacggcaaaggtgacatgtttctgaatccgaatcaggctgctggttacatggcgaaactgatctggaacgcagtgtccgggaccgtagtcgcagcagttgaggcgatgaactggctgaaaagtgcggcgaaattacttgctgctgaagtgaaggatcctaagacggatacagttctgcgtggccgctgcgcagtacattgggtgactcccgacggcttccctgtgtggcaggaatacaagaagcctattcagacgcgcttgaacctgatgttcctcggtcagttccgcttacagcctaccattaacaccaacaaagatagcgagattgatgcacacaaacaggagtctggtatcgctcctaactttgtacacagccaagacggtaaccaccttcgtatgactgtagtgtgggcacacgagaagtacggaatcgaatcttttgcactgattcacgactccttcggtaccattccggctgacgctgcgaacctgttcaaagcagtgcgcgaaactatggtttcgacatatgagtcttgtgatgtactggctgatttctacgaccagttcgctgaccagttgcacgagtctcaattggacaaaatgccagcacttccggctaaaggtaacttgaacctccgtgacatcttaaaatcggacttcgcgttcgcg

SEQ ID NO: 694 - protein, 890 aa, synthetic construct
  REGION 1..890: note = Variant of RNA polymerase
MHHHHHHMNTINIAKNDFSDIELAAIPFNTLADHYGERLAREQLALEHESYEMGEARFRKMFERQLKAGEVADNAAAKPLITTLLPKMIARINDWFEEVKAKRGKRPTAFQFLQEIKPEAVAYITIKTTLACLTSADNTTVQAVASAIGRAIEDEARFGRIRDLEAKHFKKIVEEQLNKRVGHVYKKAFMQVVEADMLSKGLLGGEAWSSWHKEDSIHVGVRCIEMLIESTGMVSLHRQNAGVVGQDSETIELAPEYAEAIATRAGALAGISPMFQPCVVPPKPWTGITGGGYWAAGRKPLQLVRTRSLAALRRYEEVSMPEVIKAVNIAQNTAWRINKKVLDVANAITQWQHCPVADVPAMDRGEMPARPLDIDTNEIALKAWKKEASAFYRKDKARVSRRLSMEFMLSQANKFANYKAIWFPQNMDWRGRVYAVPMFNPQGNDMTKGLLTFAQEKPIGEDGFYWLKIHGANTAGVDKVPFPQRIKFVEDNHTNIMECAKAPLENTWWAEQDSPFCFLAFCFEYAGVINHGLSYNCSLPLAFDGSCSGIQHFSAMLRDEIGGKAVNLLPSAEYQDIYRIVSDKVNEMLKQDLINGTSTTVETVTDKKTGEITQRTKYGTKVMAQWWLEHGVNRGVTKRSVMTLVYGSKEFGFRDQVLSDTIQPAIDNGKGDMFLNPNQAAGYMAKLIWNAVSGTVVAAVEAMNWLKSAAKLLAAEVKDPKTDTVLRGRCAVHWVTPDGFPVWQEYKKPIQTRLNLMFLGQFRLQPTINTNKDSEIDAHKQESGIAPNFVHSQDGNHLRMTVVWAHEKYGIESFALIHDSFGTIPADAANLFKAVRETMVSTYESCDVLADFYDQFADQLHESQLDKMPALPAKGNLNLRDILKSDFAFA

SEQ ID NO: 695 - DNA, 2670 bp, synthetic construct
  misc_feature 1..2670: note = Variant of RNA polymerase
  source 1..2670: mol_type = other DNA
atgcaccatcaccatcaccatatgaacacgattaacattgctaagaacgacttctctgacatcgaactggctgctatcccgttcaacactctggctgaccattacggtgagcgtttagctcgcgaacagttggcccttgagcatgagtcttacgagatgggtgaagcacgcttccgcaagatgtttgagcgtcaacttaaagctggtgaggttgcggataacgctgccgccaagcctctcatcactaccctactccctaagatgattgcacgcatcaacgactggtttgaggaagtgaaagctaagcgcggcaagcgcccgacagccttccagttcctgcaagaaatcaagccggaagccgtagcgtacatcaccattaagaccactctggcttgcctaaccagtgcggacaatacaaccgttcaggctgtagcaagcgcaatcggtcgggccattgaggacgaggctcgcttcggtcgtatccgtgaccttgaagctaagcacttcaagaagaacgttgaggaacaactcaacaagcgcgtagggcacgtctacaagaaagcatttatgcaagttgtcgagcacgacatgctctctaagggtctactcggtggcgaggcgtggtcttcgtggcataaggaagactctattcatgtaggagtacgctgcatcgagatgctcattgagtcaaccggaatggttagcttacaccgccaaaatgctggcgtagtaggtcaagactctgagactatcgaactcgcacctgaatacgctgaggctatcgcaacccgtgcaggtgcgctggctggcatctctccgatgttccaaccttgcgtagttcctcctaagccgtggactggcattactggtggtggctattgggctgcggggcgcaaacccctgcagttagtacgtactcgcagtctggcggcgcttcgccgctatgaagaagtgtcgatgccggaggtcatcaaagcagtcaacattgcgcagaatacagcatggcgtattaacaagaaagttctcgacgtagcgaatgccatcacccaatggcagcactgtccagtcgcggatgtgcctgcgatggatcgtggcgaaatgccagctcgtccgttggacatcgataccaacgagattgcacttaaagcgtggaagaaagaagcttccgcgttctaccgcaaagacaaagcacgcgttagccgtcgtctgtcaatggagtttatgttatctcaggcgaacaagtttgcgaatgagaaagcaatctggtttccgcaaaacatggattggcgtgggcgcgtgtacgctgtcccgatgttcaatcctcagggcaacgatatgacgaaaggcctgctgacctttgcgcaggagaaacccattggtgaagacggcttctattggctcaagattcatggcgcaaatacagctggagtggataaagtaccgtttccacaacgcatcaaatttgttgaggataaccatacgaatattatggaatgcgcgaaagcaccgctggaaaacacttggtgggcggaacaggactcgccgttctgttttctggcgttctgctttgagtatgctggcgtcatcaatcatggtctgtcgtacaactgtagcttgcctctggcatttgatggtagttgctccggcctgcaacatttctcagcgatgttacgcgacgaaattggcggcaaagctgtgaatctcctcccatctgcggaataccaggatatttatcgtatcgtcagcgacaaagttaacgaggtgctgaaacaagatctgattaacggtacctctaccaccgtggaaacggtgactgataagaagacaggcgaaattacccaacgcacgaaatacgggaccaaagttatggcacagtggtggttagaacacggtgtgaatcgtggcgtcacgaaacgctcggttatgactttggtgtatgggagcaaagagtttggattccgcgatcaagtgctgagtgacaccattcaaccggcgatcgataacggcaaaggtgacatgtttctgaatccgaatcaggctgctggttacatggcgaaactgatctggaacgcagtgtccgggaccgtagtcgcagcagttgaggcgatgaactggctgaaaagtgcggcgaaattacttgctgctgaagtgaaggatcctaagacggatacagttctgcgtggccgctgcgcagtacattgggtgactcccgacggcttccctgtgtggcaggaatacaagaagcctattcagacgcgcttgaacctgatgttcctcggtcagttccgcttacagcctaccattaacaccaacaaagatagcgagattgatgcacacaaacaggagtctggtatcgctcctaactttgtacacagccaagacggtaaccaccttcgtatgactgtagtgtgggcacacgagaagtacggaatcgaatcttttgcactgattcacgactccttcggtaccattccggctgacgctgcgaacctgttcaaagcagtgcgcgaaactatggtttcgacatatgagtcttgtgatgtactggctgatttctacgaccagttcgctgaccagttgcacgagtctcaattggacaaaatgccagcacttccggctaaaggtaacttgaacctccgtgacatcttaaaatcggacttcgcgttcgcg

SEQ ID NO: 696 - protein, 890 aa, synthetic construct
  REGION 1..890: note = Variant of RNA polymerase
MHHHHHHMNTINIAKNDFSDIELAAIPFNTLADHYGERLAREQLALEHESYEMGEARFRKMFERQLKAGEVADNAAAKPLITTLLPKMIARINDWFEEVKAKRGKRPTAFQFLQEIKPEAVAYITIKTTLACLTSADNTTVQAVASAIGRAIEDEARFGRIRDLEAKHFKKNVEEQLNKRVGHVYKKAFMQVVEHDMLSKGLLGGEAWSSWHKEDSIHVGVRCIEMLIESTGMVSLHRQNAGVVGQDSETIELAPEYAEAIATRAGALAGISPMFQPCVVPPKPWTGITGGGYWAAGRKPLQLVRTRSLAALRRYEEVSMPEVIKAVNIAQNTAWRINKKVLDVANAITQWQHCPVADVPAMDRGEMPARPLDIDTNEIALKAWKKEASAFYRKDKARVSRRLSMEFMLSQANKFANEKAIWFPQNMDWRGRVYAVPMFNPQGNDMTKGLLTFAQEKPIGEDGFYWLKIHGANTAGVDKVPFPQRIKFVEDNHTNIMECAKAPLENTWWAEQDSPFCFLAFCFEYAGVINHGLSYNCSLPLAFDGSCSGLQHFSAMLRDEIGGKAVNLLPSAEYQDIYRIVSDKVNEVLKQDLINGTSTTVETVTDKKTGEITQRTKYGTKVMAQWWLEHGVNRGVTKRSVMTLVYGSKEFGFRDQVLSDTIQPAIDNGKGDMFLNPNQAAGYMAKLIWNAVSGTVVAAVEAMNWLKSAAKLLAAEVKDPKTDTVLRGRCAVHWVTPDGFPVWQEYKKPIQTRLNLMFLGQFRLQPTINTNKDSEIDAHKQESGIAPNFVHSQDGNHLRMTVVWAHEKYGIESFALIHDSFGTIPADAANLFKAVRETMVSTYESCDVLADFYDQFADQLHESQLDKMPALPAKGNLNLRDILKSDFAFA

SEQ ID NO: 697 - DNA, 2670 bp, synthetic construct
  misc_feature 1..2670: note = Variant of RNA polymerase
  source 1..2670: mol_type = other DNA
atgcaccatcaccatcaccatatgaacacgattaacattgctaagaacgacttctctgacatcgaactggctgctatcccgttcaacactctggctgaccattacggtgagcgtttagctcgcgaacagttggcccttgagcatgagtcttacgagatgggtgaagcacgcttccgcaagatgtttgagcgtcaacttaaagctggtgaggttgcggataacgctgccgccaagcctctcatcactaccctactccctaagatgattgcacgcatcaacgactggtttgaggaagtgaaagctaagcgcggcaagcgcccgacagccttccagttcctgcaagaaatcaagccggaagccgtagcgtacatcaccattaagaccactctggcttgcctaaccagtgcggacaatacaaccgttcaggctgtagcaagcgcaatcggtcgggccattgaggacgaggctcgcttcggtcgtatccgtgaccttgaagctaagcacttcaagaagaacgttgaggaacaactcaacaagcgcgtagggcacgtctacaaaaaagcatttatgcaagttgtcgagcacgacatgctctctaagggtctactcggtggcgaggcgtggtcttcgtggcataaggaagactctattcatgtaggagtacgctgcatcgagatgctcattgagtcaaccggaatggttagcttacaccgccaaaatgctggcgtagtaggtcaagactctgagactatcgaactcgcacctgaatacgctgaggctatcgcaacccgtgcaggtgcgctggctggcatctctccgatgttccaaccttgcgtagttcctcctaagccgtggactggcattactggtggtggctattgggctgcggggcgcaaacccctgcagttagtacgtactcgcagtctggcggcgcttcgccgctatgaagaagtgtcgatgccggaggtcatcaaagcagtcaacattgcgcagaatacagcatggcgtattaacaagaaagttctcgacgtagcgaataccatcacccaatggcagcactgtccagtcgcggatgtgcctgcgatggatcgtggcgaaatgccagctcgtccgttggacatcgataccaacgagattgcacttaaagcgtggaagaaagaagcttccgcgttctaccgcaaagacaaagcacgcgttagccgtcgtctgtcaatggagtttatgttatctcaggcgaacaagtttgcgaatgagaaagcaatctggtttccgcaaaacatggattggcgtgggcgcgtgtacgctgtcccgatgttcaatcctcagggcaacgatatgacgaaaggcctgctgacctttgcgcaggagaaacccattggtgaagacggcttctattggctcaagattcatggcgcaaatacagctggagtggataaagtaccgtttccacaacgcatcaaatttgttgaggataaccatacgaatattatggaatgcgcgaaagcaccgctggaaaacacttggtgggcggaacaggactcgccgttctgttttctggcgttctgctttgagtatgctggcgtcatcaatagtggtctgtcgtacaactgtagcttgcctctggcatttgatggtagttgctccggcattcaacatttctcagcgatgttacgcgacgaaattggcgccaaagctgtgaatctcctcccatctgcggaataccaggatatttatcgtatcgtcagcgacaaagttaacgaggtgctgaaacaagatctgattaacggtacctctaccaccgtggaaacggtgactgataagaagacaggcgaaattacccaacgcacgaaatacgggaccaaagttatggcacagtggtggttagaacacggtgtgaatcgtggcgtcacgaaacgctcggttatgactttggtgtatgggagcaaagagtttggattccgcgatcaagtgctgagtgacaccattcaaccggcgatcgataacggcaaaggtgacatgtttctgaatccgaatcaggctgctggttacatggcgaaactgatctggaacgcagtgtccgggaccgtagtcgcagcagttgaggcgatgaactggctgaaaagtgcggcgaaattacttgctgctgaagtgaaggatcctaagacggatacagttctgcgtggccgctgcgcagtacattgggtgactcccgacggcttccctgtgtggcaggaatacaagaagcctattcagacgcgcttgaacctgatgttcctcggtcagttccgcttacagcctaccattaacaccaacaaagatagcgagattgatgcacacaaacaggagtctggtatcgctcctaactttgtacacagccaagacggtaaccaccttcgtatgactgtagtgtgggcacacgagaagtacggaatcgaatcttttgcactgattcacgactccttcggtaccattccggctgacgctgcgaacctgttcaaagcagtgcgcgaaactatggtttcgacatatgagtcttgtgatgtactggctgatttctacgaccagttcgctgaccagttgcacgagtctcaattggacaaaatgccagcacttccggctaaaggtaacttgaacctccgtgacatcttaaaatcggacttcgcgttcgcg

SEQ ID NO: 698 - protein, 890 aa, synthetic construct
  REGION 1..890: note = Variant of RNA polymerase
MHHHHHHMNTINIAKNDFSDIELAAIPFNTLADHYGERLAREQLALEHESYEMGEARFRKMFERQLKAGEVADNAAAKPLITTLLPKMIARINDWFEEVKAKRGKRPTAFQFLQEIKPEAVAYITIKTTLACLTSADNTTVQAVASAIGRAIEDEARFGRIRDLEAKHFKKNVEEQLNKRVGHVYKKAFMQVVEHDMLSKGLLGGEAWSSWHKEDSIHVGVRCIEMLIESTGMVSLHRQNAGVVGQDSETIELAPEYAEAIATRAGALAGISPMFQPCVVPPKPWTGITGGGYWAAGRKPLQLVRTRSLAALRRYEEVSMPEVIKAVNIAQNTAWRINKKVLDVANTITQWQHCPVADVPAMDRGEMPARPLDIDTNEIALKAWKKEASAFYRKDKARVSRRLSMEFMLSQANKFANEKAIWFPQNMDWRGRVYAVPMFNPQGNDMTKGLLTFAQEKPIGEDGFYWLKIHGANTAGVDKVPFPQRIKFVEDNHTNIMECAKAPLENTWWAEQDSPFCFLAFCFEYAGVINSGLSYNCSLPLAFDGSCSGIQHFSAMLRDEIGAKAVNLLPSAEYQDIYRIVSDKVNEVLKQDLINGTSTTVETVTDKKTGEITQRTKYGTKVMAQWWLEHGVNRGVTKRSVMTLVYGSKEFGFRDQVLSDTIQPAIDNGKGDMFLNPNQAAGYMAKLIWNAVSGTVVAAVEAMNWLKSAAKLLAAEVKDPKTDTVLRGRCAVHWVTPDGFPVWQEYKKPIQTRLNLMFLGQFRLQPTINTNKDSEIDAHKQESGIAPNFVHSQDGNHLRMTVVWAHEKYGIESFALIHDSFGTIPADAANLFKAVRETMVSTYESCDVLADFYDQFADQLHESQLDKMPALPAKGNLNLRDILKSDFAFA

SEQ ID NO: 699 - DNA, 2670 bp, synthetic construct
  misc_feature 1..2670: note = Variant of RNA polymerase
  source 1..2670: mol_type = other DNA
atgcaccatcaccatcaccatatgaacacgattaacattgctaagaacgacttctctgacatcgaactggctgctatcccgttcaacactctggctgaccattacggtgagcgtttagctcgcgaacagttggcccttgagcatgagtcttacgagatgggtgaagcacgcttccgcaagatgtttgagcgtcaacttaaagctggtgaggttgcggataacgctgccgccaagcctctcatcactaccctactccctaagatgattgcacgcatcaacgactggtttgaggaagtgaaagctaagcgcggcaagcgcccgacagccttccagttcctgcaagaaatcaagccggaagccgtagcgtacatcaccattaagaccactctggcttgcctaaccagtgcggacaatacaaccgttcaggctgtagcaagcgcaatcggtcgggccattgaggacgaggctcgcttcggtcgtatccgtgaccttgaagctaagcacttcaagggcaacgttgaggaacaactcaacaagcgcgtagggcacgtgtacaagaaagcatttatgcaagttgtcgaggaagacatgctctctaagggtctactcggtggcgaggcgtggtcttcgtggcataaggaagactctattcatgtaggagtacgctgcatcgagatgctcattgagtcaaccggaatggttagcttacaccgccaaaatgctggcgtagtaggtcaagactctgagactatcgaactcgcacctgaatacgctgaggctatcgcaacccgtgcaggtgcgctggctggcatctctccgatgttccaaccttgcgtagttcctcctaagccgtggactggcattactggtggtggctattgggctgcggggcgcaaacccctgcagttagtacgtactcgcagtctggcggcgcttcgccgctatgaagaagtgtcgatgccggaggtcatcaaagcagtcaacattgcgcagaatacagcatggcgtattaacaagaaagttctcgacgtagcgaatgcaatcacccaatggcagcactgtccagtcgcggatgtgcctgcgatggatcgtggcgaaatgccagctcgtccgttggacatcgataccaacgagattgcacttaaagcgtggaagaaagaagcttccgcgttctaccgcaaagacaaagcacgcgttagccgtcgtctgtcaatggagtttatgttatctcaggcgaacaagtttgcgaattataaagcaatctggtttccgcaaaacatggattggcgtgggcgcgtgtacgctgtcccgatgttcaatcctcagggcaacgatatgacgaaaggcctgctgacctttgcgcaggagaaacccattggtgaagacggcttctattggctcaagattcatggcgcaaatacagctggagtggataaagtaccgtttccacaacgcatcaaatttgttgaggataaccatacgaatattatggaatgcgcgaaagcaccgctggaaaacacttggtgggcggaacaggactcgccgttctgttttctggcgttctgctttgagtatgctggcgtcatcaatcacggtctgtcgtacaactgtagcttgcctctggcatttgatggtagttgctccggcctgcaacatttctcagcgatgttacgcgacgaaattggcggcaaagctgtgaatctcctcccatctgcggaataccaggatatttatcgtatcgtcagcgacaaagttaacgaggtactgaaacaagatctgattaacggtacctctaccaccgtggaaacggtgactgataagaagacaggcgaaattacccaacgcacgaaatacgggaccaaagttatggcacagtggtggttagaacacggtgtgaatcgtggcgtcacgaaacgctcggttatgactttggtgtatgggagcaaagagtttggattccgcgatcaagtgctgagtgacaccattcaaccggcgatcgataacggcaaaggtgacatgtttctgaatccgaatcaggctgctggttacatggcgaaactgatctggaacgcagtgtccgggaccgtagtcgcagcagttgaggcgatgaactggctgaaaagtgcggcgaaattacttgctgctgaagtgaaggatcctaagacggatacagttctgcgtggccgctgcgcagtacattgggtgactcccgacggcttccctgtgtggcaggaatacaagaagcctattcagacgcgcttgaacctgatgttcctcggtcagttccgcttacagcctaccattaacaccaacaaagatagcgagattgatgcacacaaacaggagtctggtatcgctcctaactttgtacacagccaagacggtaaccaccttcgtatgactgtagtgtgggcacacgagaagtacggaatcgaatcttttgcactgattcacgactccttcggtaccattccggctgacgctgcgaacctgttcaaagcagtgcgcgaaactatggtttcgacatatgagtcttgtgatgtactggctgatttctacgaccagttcgctgaccagttgcacgagtctcaattggacaaaatgccagcacttccggctaaaggtaacttgaacctccgtgacatcttaaaatcggacttcgcgttcgcg

SEQ ID NO: 700 - protein, 890 aa, synthetic construct
  REGION 1..890: note = Variant of RNA polymerase
MHHHHHHMNTINIAKNDFSDIELAAIPFNTLADHYGERLAREQLALEHESYEMGEARFRKMFERQLKAGEVADNAAAKPLITTLLPKMIARINDWFEEVKAKRGKRPTAFQFLQEIKPEAVAYITIKTTLACLTSADNTTVQAVASAIGRAIEDEARFGRIRDLEAKHFKGNVEEQLNKRVGHVYKKAFMQVVEEDMLSKGLLGGEAWSSWHKEDSIHVGVRCIEMLIESTGMVSLHRQNAGVVGQDSETIELAPEYAEAIATRAGALAGISPMFQPCVVPPKPWTGITGGGYWAAGRKPLQLVRTRSLAALRRYEEVSMPEVIKAVNIAQNTAWRINKKVLDVANAITQWQHCPVADVPAMDRGEMPARPLDIDTNEIALKAWKKEASAFYRKDKARVSRRLSMEFMLSQANKFANYKAIWFPQNMDWRGRVYAVPMFNPQGNDMTKGLLTFAQEKPIGEDGFYWLKIHGANTAGVDKVPFPQRIKFVEDNHTNIMECAKAPLENTWWAEQDSPFCFLAFCFEYAGVINHGLSYNCSLPLAFDGSCSGLQHFSAMLRDEIGGKAVNLLPSAEYQDIYRIVSDKVNEVLKQDLINGTSTTVETVTDKKTGEITQRTKYGTKVMAQWWLEHGVNRGVTKRSVMTLVYGSKEFGFRDQVLSDTIQPAIDNGKGDMFLNPNQAAGYMAKLIWNAVSGTVVAAVEAMNWLKSAAKLLAAEVKDPKTDTVLRGRCAVHWVTPDGFPVWQEYKKPIQTRLNLMFLGQFRLQPTINTNKDSEIDAHKQESGIAPNFVHSQDGNHLRMTVVWAHEKYGIESFALIHDSFGTIPADAANLFKAVRETMVSTYESCDVLADFYDQFADQLHESQLDKMPALPAKGNLNLRDILKSDFAFA

SEQ ID NO: 701 - DNA, 2670 bp, synthetic construct
  misc_feature 1..2670: note = Variant of RNA polymerase
  source 1..2670: mol_type = other DNA
atgcaccatcaccatcaccatatgaacacgattaacattgctaagaacgacttctctgacatcgaactggctgctatcccgttcaacactctggctgaccattacggtgagcgtttagctcgcgaacagttggcccttgagcatgagtcttacgagatgggtgaagcacgcttccgcaagatgtttgagcgtcaacttaaagctggtgaggttgcggataacgctgccgccaagcctctcatcactaccctactccctaagatgattgcacgcatcaacgactggtttgaggaagtgaaagctaagcgcggcaagcgcccgacagccttccagttcctgcaagaaatcaagccggaagccgtagcgtacatcaccattaagaccactctggcttgcctaaccagtgcggacaatacaaccgttcaggctgtagcaagcgcaatcggtcgggccattgaggacgaggctcgcttcggtcgtatccgtgaccttgaagctaagcacttcaagaaaaatgttgaggaacaactcaacaagcgcggagggcacgtgtacaagaaagcatttatgcaagttgtcgaggctgacatgctctctaagggtctactcggtggcgaggcgtggtcttcgtggcataaggaagactctattcatgtaggagtacgctgcatcgagatgctcattgagtcaaccggaatggttagcttacaccgccaaaatgctggcgtagtaggtcaagactctgagactatcgaactcgcacctgaatacgctgaggctatcgcaacccgtgcaggtgcgctggctggcatctctccgatgttccaaccttgcgtagttcctcctaagccgtggactggcattactggtggtggctattgggctgcggggcgcaaacccctgcagttagtacgtactcgcagtctggcggcgcttcgccgctatgaagaagtgtcgatgccggaggtcatcaaagcagtcaacattgcgcagaatacagcatggcgtattaacaagaaagttctcgacgtagcgaatgccatcacccaatggcagcactgtccagtcgcggatgtgcctgcgatggatcgtggcgaaatgccagctcgtccgttggacatcgataccaacgagattgcacttaaagcgtggaagaaagaagcttccgcgttctaccgcaaagacaaagcacgcgttagccgtcgtctgtcaatggagtttatgttatctcaggcgaacaagtttgcgaatgagaaagcaatctggtttccgcaaaacatggattggcgtgggcgcgtgtacgctgtcccgatgttcaatcctcagggcaacgatatgacgaaaggcctgctgacctttgcgcaggagaaacccattggtgaagacggcttctattggctcaagattcatggcgcaaatacagctggagtggataaagtaccgtttccacaacgcatcaaatttgttgaggataaccatacgaatattatggaatgcgcgaaagcaccgctggaaaacacttggtgggcggaacaggactcgccgttctgttttctggcgttctgctttgagtatgctggcgtcatcaatcacggtctgtcgtacaactgtagcttgcctctggcatttgatggtagttgctccggcatccaacatttctcagcgatgttacgcgacgaaattggcgccaaagctgtgaatctcctcccatctgcggaataccaggatatttatcgtatcgtcagcgacaaagttaacgaggtactgaaacaagatctgattaacggtacctctaccaccgtggaaacggtgactgataagaagacaggcgaaattacccaacgcacgaaatacgggaccaaagttatggcacagtggtggttagaacacggtgtgaatcgtggcgtcacgaaacgctcggttatgactttggtgtatgggagcaaagagtttggattccgcgatcaagtgctgagtgacaccattcaaccggcgatcgataacggcaaaggtgacatgtttctgaatccgaatcaggctgctggttacatggcgaaactgatctggaacgcagtgtccgggaccgtagtcgcagcagttgaggcgatgaactggctgaaaagtgcggcgaaattacttgctgctgaagtgaaggatcctaagacggatacagttctgcgtggccgctgcgcagtacattgggtgactcccgacggcttccctgtgtggcaggaatacaagaagcctattcagacgcgcttgaacctgatgttcctcggtcagttccgcttacagcctaccattaacaccaacaaagatagcgagattgatgcacacaaacaggagtctggtatcgctcctaactttgtacacagccaagacggtaaccaccttcgtatgactgtagtgtgggcacacgagaagtacggaatcgaatcttttgcactgattcacgactccttcggtaccattccggctgacgctgcgaacctgttcaaagcagtgcgcgaaactatggtttcgacatatgagtcttgtgatgtactggctgatttctacgaccagttcgctgaccagttgcacgagtctcaattggacaaaatgccagcacttccggctaaaggtaacttgaacctccgtgacatcttaaaatcggacttcgcgttcgcg

SEQ ID NO: 702 - protein, 890 aa, synthetic construct
  REGION 1..890: note = Variant of RNA polymerase
MHHHHHHMNTINIAKNDFSDIELAAIPFNTLADHYGERLAREQLALEHESYEMGEARFRKMFERQLKAGEVADNAAAKPLITTLLPKMIARINDWFEEVKAKRGKRPTAFQFLQEIKPEAVAYITIKTTLACLTSADNTTVQAVASAIGRAIEDEARFGRIRDLEAKHFKKNVEEQLNKRGGHVYKKAFMQVVEADMLSKGLLGGEAWSSWHKEDSIHVGVRCIEMLIESTGMVSLHRQNAGVVGQDSETIELAPEYAEAIATRAGALAGISPMFQPCVVPPKPWTGITGGGYWAAGRKPLQLVRTRSLAALRRYEEVSMPEVIKAVNIAQNTAWRINKKVLDVANAITQWQHCPVADVPAMDRGEMPARPLDIDTNEIALKAWKKEASAFYRKDKARVSRRLSMEFMLSQANKFANEKAIWFPQNMDWRGRVYAVPMFNPQGNDMTKGLLTFAQEKPIGEDGFYWLKIHGANTAGVDKVPFPQRIKFVEDNHTNIMECAKAPLENTWWAEQDSPFCFLAFCFEYAGVINHGLSYNCSLPLAFDGSCSGIQHFSAMLRDEIGAKAVNLLPSAEYQDIYRIVSDKVNEVLKQDLINGTSTTVETVTDKKTGEITQRTKYGTKVMAQWWLEHGVNRGVTKRSVMTLVYGSKEFGFRDQVLSDTIQPAIDNGKGDMFLNPNQAAGYMAKLIWNAVSGTVVAAVEAMNWLKSAAKLLAAEVKDPKTDTVLRGRCAVHWVTPDGFPVWQEYKKPIQTRLNLMFLGQFRLQPTINTNKDSEIDAHKQESGIAPNFVHSQDGNHLRMTVVWAHEKYGIESFALIHDSFGTIPADAANLFKAVRETMVSTYESCDVLADFYDQFADQLHESQLDKMPALPAKGNLNLRDILKSDFAFA

SEQ ID NO: 703 - DNA, 2670 bp, synthetic construct
  misc_feature 1..2670: note = Variant of RNA polymerase
  source 1..2670: mol_type = other DNA
atgcaccatcaccatcaccatatgaacacgattaacattgctaagaacgacttctctgacatcgaactggctgctatcccgttcaacactctggctgaccattacggtgagcgtttagctcgcgaacagttggcccttgagcatgagtcttacgagatgggtgaagcacgcttccgcaagatgtttgagcgtcaacttaaagctggtgaggttgcggataacgctgccgccaagcctctcatcactaccctactccctaagatgattgcacgcatcaacgactggtttgaggaagtgaaagctaagcgcggcaagcgcccgacagccttccagttcctgcaagaaatcaagccggaagccgtagcgtacatcaccattaagaccactctggcttgcctaaccagtgcggacaatacaaccgttcaggctgtagcaagcgcaatcggtcgggccattgaggacgaggctcgcttcggtcgtatccgtgaccttgaagctaagcacttcaagaaaaacgttgaggaacaactcaacaagcgcgtagggcacccgtacaagaaagcatttatgcaagttgtcgaggctgacatgctctctaagggtctactcggtggcgaggcgtggtcttcgtggcataaggaagactctattcatgtaggagtacgctgcatcgagatgctcattgagtcaaccggaatggttagcttacaccgccaaaatgctggcgtagtaggtcaagactctgagactatcgaactcgcacctgaatacgctgaggctatcgcaacccgtgcaggtgcgctggctggcatctctccgatgttccaaccttgcgtagttcctcctaagccgtggactggcattactggtggtggctattgggctgcggggcgcaaacccctgcagttagtacgtactcgcagtctggcggcgcttcgccgctatgaagaagtgtcgatgccggaggtcatcaaagcagtcaacattgcgcagaatacagcatggcgtattaacaagaaagttctcgacgtagcgaataccatcacccaatggcagcactgtccagtcgcggatgtgcctgcgatggatcgtggcgaaatgccagctcgtccgttggacatcgataccaacgagattgcacttaaagcgtggaagaaagaagcttccgcgttctaccgcaaagacaaagcacgcgttagccgtcgtctgtcaatggagtttatgttatctcaggcgaacaagtttgcgaattataaagcaatctggtttccgcaaaacatggattggcgtgggcgcgtgtacgctgtcccgatgttcaatcctcagggcaacgatatgacgaaaggcctgctgacctttgcgcaggagaaacccattggtgaagacggcttctattggctcaagattcatggcgcaaatacagctggagtggataaagtaccgtttccacaacgcatcaaatttgttgaggataaccatacgaatattatggaatgcgcgaaagcaccgctggaaaacacttggtgggcggaacaggactcgccgttctgttttctggcgttctgctttgagtatgctggcgtcatcaatcatggtctgtcgtacaactgtagcttgcctctggcatttgatggtagttgctccggcattcaacatttctcagcgatgttacgcgacgaaattggcgccaaagctgtgaatctcctcccatctgcggaataccaggatatttattgtatcgtcagcgacaaagttaacgaggtgctgaaacaagatctgattaacggtacctctaccaccgtggaaacggtgactgataagaagacaggcgaaattacccaacgcacgaaatacgggaccaaagttatggcacagtggtggttagaacacggtgtgaatcgtggcgtcacgaaacgctcggttatgactttggtgtatgggagcaaagagtttggattccgcgatcaagtgctgagtgacaccattcaaccggcgatcgataacggcaaaggtgacatgtttctgaatccgaatcaggctgctggttacatggcgaaactgatctggaacgcagtgtccgggaccgtagtcgcagcagttgaggcgatgaactggctgaaaagtgcggcgaaattacttgctgctgaagtgaaggatcctaagacggatacagttctgcgtggccgctgcgcagtacattgggtgactcccgacggcttccctgtgtggcaggaatacaagaagcctattcagacgcgcttgaacctgatgttcctcggtcagttccgcttacagcctaccattaacaccaacaaagatagcgagattgatgcacacaaacaggagtctggtatcgctcctaactttgtacacagccaagacggtaaccaccttcgtatgactgtagtgtgggcacacgagaagtacggaatcgaatcttttgcactgattcacgactccttcggtaccattccggctgacgctgcgaacctgttcaaagcagtgcgcgaaactatggtttcgacatatgagtcttgtgatgtactggctgatttctacgaccagttcgctgaccagttgcacgagtctcaattggacaaaatgccagcacttccggctaaaggtaacttgaacctccgtgacatcttaaaatcggacttcgcgttcgcg

SEQ ID NO: 704 - protein, 890 aa, synthetic construct
  REGION 1..890: note = Variant of RNA polymerase
MHHHHHHMNTINIAKNDFSDIELAAIPFNTLADHYGERLAREQLALEHESYEMGEARFRKMFERQLKAGEVADNAAAKPLITTLLPKMIARINDWFEEVKAKRGKRPTAFQFLQEIKPEAVAYITIKTTLACLTSADNTTVQAVASAIGRAIEDEARFGRIRDLEAKHFKKNVEEQLNKRVGHPYKKAFMQVVEADMLSKGLLGGEAWSSWHKEDSIHVGVRCIEMLIESTGMVSLHRQNAGVVGQDSETIELAPEYAEAIATRAGALAGISPMFQPCVVPPKPWTGITGGGYWAAGRKPLQLVRTRSLAALRRYEEVSMPEVIKAVNIAQNTAWRINKKVLDVANTITQWQHCPVADVPAMDRGEMPARPLDIDTNEIALKAWKKEASAFYRKDKARVSRRLSMEFMLSQANKFANYKAIWFPQNMDWRGRVYAVPMFNPQGNDMTKGLLTFAQEKPIGEDGFYWLKIHGANTAGVDKVPFPQRIKFVEDNHTNIMECAKAPLENTWWAEQDSPFCFLAFCFEYAGVINHGLSYNCSLPLAFDGSCSGIQHFSAMLRDEIGAKAVNLLPSAEYQDIYCIVSDKVNEVLKQDLINGTSTTVETVTDKKTGEITQRTKYGTKVMAQWWLEHGVNRGVTKRSVMTLVYGSKEFGFRDQVLSDTIQPAIDNGKGDMFLNPNQAAGYMAKLIWNAVSGTVVAAVEAMNWLKSAAKLLAAEVKDPKTDTVLRGRCAVHWVTPDGFPVWQEYKKPIQTRLNLMFLGQFRLQPTINTNKDSEIDAHKQESGIAPNFVHSQDGNHLRMTVVWAHEKYGIESFALIHDSFGTIPADAANLFKAVRETMVSTYESCDVLADFYDQFADQLHESQLDKMPALPAKGNLNLRDILKSDFAFA

SEQ ID NO: 705 - DNA, 2670 bp, synthetic construct
  misc_feature 1..2670: note = Variant of RNA polymerase
  source 1..2670: mol_type = other DNA
atgcaccatcaccatcaccatatgaacacgattaacattgctaagaacgacttctctgacatcgaactggctgctatcccgttcaacactctggctgaccattacggtgagcgtttagctcgcgaacagttggcccttgagcatgagtcttacgagatgggtgaagcacgcttccgcaagatgtttgagcgtcaacttaaagctggtgaggttgcggataacgctgccgccaagcctctcatcactaccctactccctaagatgattgcacgcatcaacgactggtttgaggaagtgaaagctaagcgcggcaagcgcccgacagccttccagttcctgcaagaaatcaagccggaagccgtagcgtacatcaccattaagaccactctggcttgcctaaccagtgcggacaatacaaccgttcaggctgtagcaagcgcaatcggtcgggccattgaggacgaggctcgcttcggtcgtatccgtgaccttgaagctaagcacttcaagaagaacgttgaggaacaactcaacaagcgcgtagggcacgtgtacaagaaagcatttatgcaagttgtcgaggctgacatgctctctacgggtctactcggtggcgaggcgtggtcttcgtggcataaggaagactctattcatgtaggagtacgctgcatcgagatgctcattgagtcaaccggaatggttagcttacaccgccaaaatgctggcgtagtaggtcaagactctgagactatcgaactcgcacctgaatacgctgaggctatcgcaacccgtgcaggtgcgctggctggcatctctccgatgttccaaccttgcgtagttcctcctaagccgtggactggcattactggtggtggctattgggctgcggggcgcaaacccctgcagttagtacgtactcgcagtctggcggcgcttcgccgctatgaagaagtgtcgatgccggaggtcatcaaagcagtcaacattgcgcagaatacagcatggcgtattaacaagaaagttctcgacgtagcgaataccatcacccaatggcagcactgtccagtcgcggatgtgcctgcgatggatcgtggcgaaatgccagctcgtccgttggacatcgataccaacgagattgcacttaaagcgtggaagaaagaagcttccgcgttctaccgcaaagacaaagcacgcgttagccgtcgtctgtcaatggagtttatgttatctcaggcgaacaagtttgcgaatgagaaagcaatctggtttccgcaaaacatggattggcgtgggcgcgtgtacgctgtcccgatgttcaatcctcagggcaacgatatgacgaaaggcctgctgacctttgcgcaggagaaacccattggtgaagacggcttctattggctcaagattcatggcgcaaatacagctggagtggataaagtaccgtttccacaacgcatcaaatttgttgaggataaccatacgaatattatggaatgcgcgaaagcaccgctggaaaacacttggtgggcggaacaggactcgccgttctgttttctggcgttctgctttgagtatgctggcgtcatcaatcatggtctgtcgtacaactgtagcttgcctctggcatttgatggtagttgctccggcattcaacatttctcagcgatgttacgcgacgaaattggcggcaaagctgtgaatctcctcccatctgcggaataccaggatatttatcgtatcgtcagcgacaaagttaacgaggtactgaaacaagatctgattaacggtacctctaccaccgtggaaacggtgactgataagaagacaggcgaaattacccaacgcacgaaatacgggaccaaagttatggcacagtggtggttagaacacggtgtgaatcgtggcgtcacgaaacgctcggttatgactttggtgtatgggagcaaagagtttggattccgcgatcaagtgctgagtgacaccattcaaccggcgatcgataacggcaaaggtgacatgtttctgaatccgaatcaggctgctggttacatggcgaaactgatctggaacgcagtgtccgggaccgtagtcgcagcagttgaggcgatgaactggctgaaaagtgcggcgaaattacttgctgctgaagtgaaggatcctaagacggatacagttctgcgtggccgctgcgcagtacattgggtgactcccgacggcttccctgtgtggcaggaatacaagaagcctattcagacgcgcttgaacctgatgttcctcggtcagttccgcttacagcctaccattaacaccaacaaagatagcgagattgatgcacacaaacaggagtctggtatcgctcctaactttgtacacagccaagacggtaaccaccttcgtatgactgtagtgtgggcacacgagaagtacggaatcgaatcttttgcactgattcacgactccttcggtaccattccggctgacgctgcgaacctgttcaaagcagtgcgcgaaactatggtttcgacatatgagtcttgtgatgtactggctgatttctacgaccagttcgctgaccagttgcacgagtctcaattggacaaaatgccagcacttccggctaaaggtaacttgaacctccgtgacatcttaaaatcggacttcgcgttcgcg

SEQ ID NO: 706 - protein, 890 aa, synthetic construct
  REGION 1..890: note = Variant of RNA polymerase
MHHHHHHMNTINIAKNDFSDIELAAIPFNTLADHYGERLAREQLALEHESYEMGEARFRKMFERQLKAGEVADNAAAKPLITTLLPKMIARINDWFEEVKAKRGKRPTAFQFLQEIKPEAVAYITIKTTLACLTSADNTTVQAVASAIGRAIEDEARFGRIRDLEAKHFKKNVEEQLNKRVGHVYKKAFMQVVEADMLSTGLLGGEAWSSWHKEDSIHVGVRCIEMLIESTGMVSLHRQNAGVVGQDSETIELAPEYAEAIATRAGALAGISPMFQPCVVPPKPWTGITGGGYWAAGRKPLQLVRTRSLAALRRYEEVSMPEVIKAVNIAQNTAWRINKKVLDVANTITQWQHCPVADVPAMDRGEMPARPLDIDTNEIALKAWKKEASAFYRKDKARVSRRLSMEFMLSQANKFANEKAIWFPQNMDWRGRVYAVPMFNPQGNDMTKGLLTFAQEKPIGEDGFYWLKIHGANTAGVDKVPFPQRIKFVEDNHTNIMECAKAPLENTWWAEQDSPFCFLAFCFEYAGVINHGLSYNCSLPLAFDGSCSGIQHFSAMLRDEIGGKAVNLLPSAEYQDIYRIVSDKVNEVLKQDLINGTSTTVETVTDKKTGEITQRTKYGTKVMAQWWLEHGVNRGVTKRSVMTLVYGSKEFGFRDQVLSDTIQPAIDNGKGDMFLNPNQAAGYMAKLIWNAVSGTVVAAVEAMNWLKSAAKLLAAEVKDPKTDTVLRGRCAVHWVTPDGFPVWQEYKKPIQTRLNLMFLGQFRLQPTINTNKDSEIDAHKQESGIAPNFVHSQDGNHLRMTVVWAHEKYGIESFALIHDSFGTIPADAANLFKAVRETMVSTYESCDVLADFYDQFADQLHESQLDKMPALPAKGNLNLRDILKSDFAFA

SEQ ID NO: 707 - DNA, 2670 bp, synthetic construct
  misc_feature 1..2670: note = Variant of RNA polymerase
  source 1..2670: mol_type = other DNA
atgcaccatcaccatcaccatatgaacacgattaacattgctaagaacgacttctctgacatcgaactggctgctatcccgttcaacactctggctgaccattacggtgagcgtttagctcgcgaacagttggcccttgagcatgagtcttacgagatgggtgaagcacgcttccgcaagatgtttgagcgtcaacttaaagctggtgaggttgcggataacgctgccgccaagcctctcatcactaccctactccctaagatgattgcacgcatcaacgactggtttgaggaagtgaaagctaagcgcggcaagcgcccgacagccttccagttcctgcaagaaatcaagccggaagccgtagcgtacatcaccattaagaccactctggcttgcctaaccagtgcggacaatacaaccgttcaggctgtagcaagcgcaatcggtcgggccattgaggacgaggctcgcttcggtcgtatccgtgaccttgaagctaagcacttcaagaaaattgttgaggaacaactcaacaagcgcgtagggcacgtctacaagaaagcatttatgcaagttgtcgagaccgacatgctctctaagggtctactcggtggcgaggcgtggtcttcgtggcataaggaagactctattcatgtaggagtacgctgcatcgagatgctcattgagtcaaccggaatggttagcttacaccgccaaaatgctggcgtagtaggtcaagactctgagactatcgaactcgcacctgaatacgctgaggctatcgcaacccgtgcaggtgcgctggctggcatctctccgatgttccaaccttgcgtagttcctcctaagccgtggactggcattactggtggtggctattgggctgcggggcgcaaacccctgcagttagtacgtactcgcagtctggcggcgcttcgccgctatgaagaagtgtcgatgccggaggtcatcaaagcagtcaacattgcgcagaatacagcatggcgtattaacaagaaagttctcgacgtagcgaatgcaatcacccaatggcagcactgtccagtcgcggatgtgcctgcgatggatcgtggcgaaatgccagctcgtccgttggacatcgataccaacgagattgcacttaaagcgtggaagaaagaagcttccgcgttctaccgcaaagacaaagcacgcgttagccgtcgtctgtcaatggagtttatgttatctcaggcgaacaagtttgcgaattataaagcaatctggtttccgcaaaacatggattggcgtgggcgcgtgtacgctgtcccgatgttcaatcctcagggcaacgatatgacgaaaggcctgctgacctttgcgcaggagaaacccattggtgaagacggcttctattggctcaagattcatggcgcaaatacagctggagtggataaagtaccgtttccacaacgcatcaaatttgttgaggataaccatacgaatattatggaatgcgcgaaagcaccgctggaaaacacttggtgggcggaacaggactcgccgttctgttttctggcgttctgctttgagtatgctggcgtcatcaatcacggtctgtcgtacaactgtagcttgcctctggcatttgatggtagttgctccggcctgcaacatttctcagcgatgttacgcgacgaaattggcggcaaagctgtgaatctcctcccatctgcggaataccaggatatttatcgtatcgtcagcgacaaagttaacgaggtactgaaacaagatctgattaacggtacctctaccaccgtggaaacggtgactgataagaagacaggcgaaattacccaacgcacgaaatacgggaccaaagttatggcacagtggtggttagaacacggtgtgaatcgtggcgtcacgaaacgctcggttatgactttggtgtatgggagcaaagagtttggattccgcgatcaagtgctgagtgacaccattcaaccggcgatcgataacggcaaaggtgacatgtttctgaatccgaatcaggctgctggttacatggcgaaactgatctggaacgcagtgtccgggaccgtagtcgcagcagttgaggcgatgaactggctgaaaagtgcggcgaaattacttgctgctgaagtgaaggatcctaagacggatacagttctgcgtggccgctgcgcagtacattgggtgactcccgacggcttccctgtgtggcaggaatacaagaagcctattcagacgcgcttgaacctgatgttcctcggtcagttccgcttacagcctaccattaacaccaacaaagatagcgagattgatgcacacaaacaggagtctggtatcgctcctaactttgtacacagccaagacggtaaccaccttcgtatgactgtagtgtgggcacacgagaagtacggaatcgaatcttttgcactgattcacgactccttcggtaccattccggctgacgctgcgaacctgttcaaagcagtgcgcgaaactatggtttcgacatatgagtcttgtgatgtactggctgatttctacgaccagttcgctgaccagttgcacgagtctcaattggacaaaatgccagcacttccggctaaaggtaacttgaacctccgtgacatcttaaaatcggacttcgcgttcgcg

SEQ ID NO: 708 - protein, 890 aa, synthetic construct
  REGION 1..890: note = Variant of RNA polymerase
MHHHHHHMNTINIAKNDFSDIELAAIPFNTLADHYGERLAREQLALEHESYEMGEARFRKMFERQLKAGEVADNAAAKPLITTLLPKMIARINDWFEEVKAKRGKRPTAFQFLQEIKPEAVAYITIKTTLACLTSADNTTVQAVASAIGRAIEDEARFGRIRDLEAKHFKKIVEEQLNKRVGHVYKKAFMQVVETDMLSKGLLGGEAWSSWHKEDSIHVGVRCIEMLIESTGMVSLHRQNAGVVGQDSETIELAPEYAEAIATRAGALAGISPMFQPCVVPPKPWTGITGGGYWAAGRKPLQLVRTRSLAALRRYEEVSMPEVIKAVNIAQNTAWRINKKVLDVANAITQWQHCPVADVPAMDRGEMPARPLDIDTNEIALKAWKKEASAFYRKDKARVSRRLSMEFMLSQANKFANYKAIWFPQNMDWRGRVYAVPMFNPQGNDMTKGLLTFAQEKPIGEDGFYWLKIHGANTAGVDKVPFPQRIKFVEDNHTNIMECAKAPLENTWWAEQDSPFCFLAFCFEYAGVINHGLSYNCSLPLAFDGSCSGLQHFSAMLRDEIGGKAVNLLPSAEYQDIYRIVSDKVNEVLKQDLINGTSTTVETVTDKKTGEITQRTKYGTKVMAQWWLEHGVNRGVTKRSVMTLVYGSKEFGFRDQVLSDTIQPAIDNGKGDMFLNPNQAAGYMAKLIWNAVSGTVVAAVEAMNWLKSAAKLLAAEVKDPKTDTVLRGRCAVHWVTPDGFPVWQEYKKPIQTRLNLMFLGQFRLQPTINTNKDSEIDAHKQESGIAPNFVHSQDGNHLRMTVVWAHEKYGIESFALIHDSFGTIPADAANLFKAVRETMVSTYESCDVLADFYDQFADQLHESQLDKMPALPAKGNLNLRDILKSDFAFA

SEQ ID NO: 709 - DNA, 2670 bp, synthetic construct
  misc_feature 1..2670: note = Variant of RNA polymerase
  source 1..2670: mol_type = other DNA
atgcaccatcaccatcaccatatgaacacgattaacattgctaagaacgacttctctgacatcgaactggctgctatcccgttcaacactctggctgaccattacggtgagcgtttagctcgcgaacagttggcccttgagcatgagtcttacgagatgggtgaagcacgcttccgcaagatgtttgagcgtcaacttaaagctggtgaggttgcggataacgctgccgccaagcctctcatcactaccctactccctaagatgattgcacgcatcaacgactggtttgaggaagtgaaagctaagcgcggcaagcgcccgacagccttccagttcctgcaagaaatcaagccggaagccgtagcgtacatcaccattaagaccactctggcttgcctaaccagtgcggacaatacaaccgttcaggctgtagcaagcgcaatcggtcgggccattgaggacgaggctcgcttcggtcgtatccgtgaccttgaagctaagcacttcaagaaaaatgttgaggaacaactcaacaagcgcgtagggcacgtctacaagaaagcatttatgcaagttgtcgaggctgacgtgctctctaagggtctactcggtggcgaggcgtggtcttcgtggcataaggaagactctattcatgtaggagtacgctgcatcgagatgctcattgagtcaaccggaatggttagcttacaccgccaaaatgctggcgtagtaggtcaagactctgagactatcgaactcgcacctgaatacgctgaggctatcgcaacccgtgcaggtgcgctggctggcatctctccgatgttccaaccttgcgtagttcctcctaagccgtggactggcattactggtggtggctattgggctgcggggcgcaaacccctgcagttagtacgtactcgcagtctggcggcgcttcgccgctatgaagaagtgtcgatgccggaggtcatcaaagcagtcaacattgcgcagaatacagcatggcgtattaacaagaaagttctcgacgtagcgaataccatcacccaatggcagcactgtccagtcgcggatgtgcctgcgatggatcgtggcgaaatgccagctcgtccgttggacatcgataccaacgagattgcacttaaagcgtggaagaaagaagcttccgcgttctaccgcaaagacaaagcacgcgttagccgtcgtctgtcaatggagtttatgttatctcaggcgaacaagtttgcgaatgagaaagcaatctggtttccgcaaaacatggattggcgtgggcgcgtgtacgctgtcccgatgttcaatcctcagggcaacgatatgacgaaaggcctgctgacctttgcgcaggagaaacccattggtgaagacggcttctattggctcaagattcatggcgcaaatacagctggagtggataaagtaccgtttccacaacgcatcaaatttgttgaggataaccatacgaatattatggaatgcgcgaaagcaccgctggaaaacacttggtgggcggaacaggactcgccgttctgttttctggcgttctgctttgagtatgctggcgtcatcaatcacggtctgtcgtacaactgtagcttgcctctggcatttgatggtagttgctccggcattcaacatttctcagcgatgttacgcgacgaaattggcgccaaagctgtgaatctcctcccatctgcggaataccaggatatttatcgtatcgtcagcgacaaagttaacgaggtactgaaacaagatctgattaacggtacctctaccaccgtggaaacggtgactgataagaagacaggcgaaattacccaacgcacgaaatacgggaccaaagttatggcacagtggtggttagaacacggtgtgaatcgtggcgtcacgaaacgctcggttatgactttggtgtatgggagcaaagagtttggattccgcgatcaagtgctgagtgacaccattcaaccggcgatcgataacggcaaaggtgacatgtttctgaatccgaatcaggctgctggttacatggcgaaactgatctggaacgcagtgtccgggaccgtagtcgcagcagttgaggcgatgaactggctgaaaagtgcggcgaaattacttgctgctgaagtgaaggatcctaagacggatacagttctgcgtggccgctgcgcagtacattgggtgactcccgacggcttccctgtgtggcaggaatacaagaagcctattcagacgcgcttgaacctgatgttcctcggtcagttccgcttacagcctaccattaacaccaacaaagatagcgagattgatgcacacaaacaggagtctggtatcgctcctaactttgtacacagccaagacggtaaccaccttcgtatgactgtagtgtgggcacacgagaagtacggaatcgaatcttttgcactgattcacgactccttcggtaccattccggctgacgctgcgaacctgttcaaagcagtgcgcgaaactatggtttcgacatatgagtcttgtgatgtactggctgatttctacgaccagttcgctgaccagttgcacgagtctcaattggacaaaatgccagcacttccggctaaaggtaacttgaacctccgtgacatcttaaaatcggacttcgcgttcgcg

SEQ ID NO: 710 - protein, 890 aa, synthetic construct
  REGION 1..890: note = Variant of RNA polymerase
MHHHHHHMNTINIAKNDFSDIELAAIPFNTLADHYGERLAREQLALEHESYEMGEARFRKMFERQLKAGEVADNAAAKPLITTLLPKMIARINDWFEEVKAKRGKRPTAFQFLQEIKPEAVAYITIKTTLACLTSADNTTVQAVASAIGRAIEDEARFGRIRDLEAKHFKKNVEEQLNKRVGHVYKKAFMQVVEADVLSKGLLGGEAWSSWHKEDSIHVGVRCIEMLIESTGMVSLHRQNAGVVGQDSETIELAPEYAEAIATRAGALAGISPMFQPCVVPPKPWTGITGGGYWAAGRKPLQLVRTRSLAALRRYEEVSMPEVIKAVNIAQNTAWRINKKVLDVANTITQWQHCPVADVPAMDRGEMPARPLDIDTNEIALKAWKKEASAFYRKDKARVSRRLSMEFMLSQANKFANEKAIWFPQNMDWRGRVYAVPMFNPQGNDMTKGLLTFAQEKPIGEDGFYWLKIHGANTAGVDKVPFPQRIKFVEDNHTNIMECAKAPLENTWWAEQDSPFCFLAFCFEYAGVINHGLSYNCSLPLAFDGSCSGIQHFSAMLRDEIGAKAVNLLPSAEYQDIYRIVSDKVNEVLKQDLINGTSTTVETVTDKKTGEITQRTKYGTKVMAQWWLEHGVNRGVTKRSVMTLVYGSKEFGFRDQVLSDTIQPAIDNGKGDMFLNPNQAAGYMAKLIWNAVSGTVVAAVEAMNWLKSAAKLLAAEVKDPKTDTVLRGRCAVHWVTPDGFPVWQEYKKPIQTRLNLMFLGQFRLQPTINTNKDSEIDAHKQESGIAPNFVHSQDGNHLRMTVVWAHEKYGIESFALIHDSFGTIPADAANLFKAVRETMVSTYESCDVLADFYDQFADQLHESQLDKMPALPAKGNLNLRDILKSDFAFA

SEQ ID NO: 711 - DNA, 2670 bp, synthetic construct
  misc_feature 1..2670: note = Variant of RNA polymerase
  source 1..2670: mol_type = other DNA
atgcaccatcaccatcaccatatgaacacgattaacattgctaagaacgacttctctgacatcgaactggctgctatcccgttcaacactctggctgaccattacggtgagcgtttagctcgcgaacagttggcccttgagcatgagtcttacgagatgggtgaagcacgcttccgcaagatgtttgagcgtcaacttaaagctggtgaggttgcggataacgctgccgccaagcctctcatcactaccctactccctaagatgattgcacgcatcaacgactggtttgaggaagtgaaagctaagcgcggcaagcgcccgacagccttccagttcctgcaagaaatcaagccggaagccgtagcgtacatcaccattaagaccactctggcttgcctaaccagtgcggacaatacaaccgttcaggctgtagcaagcgcaatcggtcgggccattgaggacgaggctcgcttcggtcgtatccgtgaccttgaagctaagcacttcaagggcaacgttgaggaacaactcaacaagcgcgtagggcacgtgtacaagaaagcatttatgcaagttgtcgaggctgacatgctctctaagggtctactcggtggcgaggcgtggtcttcgtggcataaggaagactctattcatgtaggagtacgctgcatcgagatgctcattgagtcaaccggaatggttagcttacaccgccaaaatgctggcgtagtaggtcaagactctgagactatcgaactcgcacctgaatacgctgaggctatcgcaacccgtgcaggtgcgctggctggcatctctccgatgttccaaccttgcgtagttcctcctaagccgtggactggcattactggtggtggctattgggctgcggggcgcaaacccctgcagttagtacgtactcgcagtctggcggcgcttcgccgctatgaagaagtgtcgatgccggaggtcatcaaagcagtcaacattgcgcagaatacagcatggcgtattaacaagaaagttctcgacgtagcgaatgccatcacccaatggcagcactgtccagtcgcggatgtgcctgcgatggatcgtggcgaaatgccagctcgtccgttggacatcgataccaacgagattgcacttaaagcgtggaagaaagaagcttccgcgttctaccgcaaagacaaagcacgcgttagccgtcgtctgtcaatggagtttatgttatctcaggcgaacaagtttgcgaattataaagcaatctggtttccgcaaaacatggattggcgtgggcgcgtgtacgctgtcccgatgttcaatcctcagggcaacgatatgacgaaaggcctgctgacctttgcgcaggagaaacccattggtgaagacggcttctattggctcaagattcatggcgcaaatacagctggagtggataaagtaccgtttccacaacgcatcaaatttgttgaggataaccatacgaatattatggaatgcgcgaaagcaccgctggaaaacacttggtgggcggaacaggactcgccgttctgttttctggcgttctgctttgagtatgctggcgtcatcaatcatggtctgtcgtacaactgtagcttgcctctggcatttgatggtagttgctccggcatccaacatttctcagcgatgttacgcgacgaaattggcgccaaagctgtgaatctcctcccatctgcggaataccaggatatttatcgtatcgtcagcgacaaagttaacgaggtactgaaacaagatctgattaacggtacctctaccaccgtggaaacggtgactgataagaagacaggcgaaattacccaacgcacgaaatacgggaccaaagttatggcacagtggtggttagaacacggtgtgaatcgtggcgtcacgaaacgctcggttatgactttggtgtatgggagcaaagagtttggattccgcgatcaagtgctgagtgacaccattcaaccggcgatcgataacggcaaaggtgacatgtttctgaatccgaatcaggctgctggttacatggcgaaactgatctggaacgcagtgtccgggaccgtagtcgcagcagttgaggcgatgaactggctgaaaagtgcggcgaaattacttgctgctgaagtgaaggatcctaagacggatacagttctgcgtggccgctgcgcagtacattgggtgactcccgacggcttccctgtgtggcaggaatacaagaagcctattcagacgcgcttgaacctgatgttcctcggtcagttccgcttacagcctaccattaacaccaacaaagatagcgagattgatgcacacaaacaggagtctggtatcgctcctaactttgtacacagccaagacggtaaccaccttcgtatgactgtagtgtgggcacacgagaagtacggaatcgaatcttttgcactgattcacgactccttcggtaccattccggctgacgctgcgaacctgttcaaagcagtgcgcgaaactatggtttcgacatatgagtcttgtgatgtactggctgatttctacgaccagttcgctgaccagttgcacgagtctcaattggacaaaatgccagcacttccggctaaaggtaacttgaacctccgtgacatcttaaaatcggacttcgcgttcgcg

SEQ ID NO: 712 - protein, 890 aa, synthetic construct
  REGION 1..890: note = Variant of RNA polymerase
MHHHHHHMNTINIAKNDFSDIELAAIPFNTLADHYGERLAREQLALEHESYEMGEARFRKMFERQLKAGEVADNAAAKPLITTLLPKMIARINDWFEEVKAKRGKRPTAFQFLQEIKPEAVAYITIKTTLACLTSADNTTVQAVASAIGRAIEDEARFGRIRDLEAKHFKGNVEEQLNKRVGHVYKKAFMQVVEADMLSKGLLGGEAWSSWHKEDSIHVGVRCIEMLIESTGMVSLHRQNAGVVGQDSETIELAPEYAEAIATRAGALAGISPMFQPCVVPPKPWTGITGGGYWAAGRKPLQLVRTRSLAALRRYEEVSMPEVIKAVNIAQNTAWRINKKVLDVANAITQWQHCPVADVPAMDRGEMPARPLDIDTNEIALKAWKKEASAFYRKDKARVSRRLSMEFMLSQANKFANYKAIWFPQNMDWRGRVYAVPMFNPQGNDMTKGLLTFAQEKPIGEDGFYWLKIHGANTAGVDKVPFPQRIKFVEDNHTNIMECAKAPLENTWWAEQDSPFCFLAFCFEYAGVINHGLSYNCSLPLAFDGSCSGIQHFSAMLRDEIGAKAVNLLPSAEYQDIYRIVSDKVNEVLKQDLINGTSTTVETVTDKKTGEITQRTKYGTKVMAQWWLEHGVNRGVTKRSVMTLVYGSKEFGFRDQVLSDTIQPAIDNGKGDMFLNPNQAAGYMAKLIWNAVSGTVVAAVEAMNWLKSAAKLLAAEVKDPKTDTVLRGRCAVHWVTPDGFPVWQEYKKPIQTRLNLMFLGQFRLQPTINTNKDSEIDAHKQESGIAPNFVHSQDGNHLRMTVVWAHEKYGIESFALIHDSFGTIPADAANLFKAVRETMVSTYESCDVLADFYDQFADQLHESQLDKMPALPAKGNLNLRDILKSDFAFA

SEQ ID NO: 713 - DNA, 2670 bp, synthetic construct
  misc_feature 1..2670: note = Variant of RNA polymerase
  source 1..2670: mol_type = other DNA
atgcaccatcaccatcaccatatgaacacgattaacattgctaagaacgacttctctgacatcgaactggctgctatcccgttcaacactctggctgaccattacggtgagcgtttagctcgcgaacagttggcccttgagcatgagtcttacgagatgggtgaagcacgcttccgcaagatgtttgagcgtcaacttaaagctggtgaggttgcggataacgctgccgccaagcctctcatcactaccctactccctaagatgattgcacgcatcaacgactggtttgaggaagtgaaagctaagcgcggcaagcgcccgacagccttccagttcctgcaagaaatcaagccggaagccgtagcgtacatcaccattaagaccactctggcttgcctaaccagtgcggacaatacaaccgttcaggctgtagcaagcgcaatcggtcgggccattgaggacgaggctcgcttcggtcgtatccgtgaccttgaagctaagcacttcaagaagaacgttgaggaacaactcaacaagcgcgtagggcacgtgtacaagaaagcatttatgcaagttgtcgaggctgacatgctctctaagggtctactcggtggcgaggcgtggtcttcgtggcataaggaagactctattcatgtaggagtacgctgcatcgagatgctcattgagtcaaccggaatggttagcttacaccgccaaaatgctggcgtagtaggtcaagactctgagactatcgaactcgcacctgaatacgctgaggctatcgcaacccgtgcaggtgcgctggctggcatctctccgatgttccaaccttgcgtagttcctcctaagccgtggactggcattactggtggtggctattgggctgcggggcgcaaacccctgcagttagtacgtactcgcagtctggcggcgcttcgccgctatgaagaagtgtcgatgccggaggtcatcaaagcagtcaacattgcgcagaatacagcatggcgtattaacaagaaagttctcgacgtagcgaatgcaatcacccaatggcagcactgtccagtcgcggatgtgcctgcgatggatcgtggcgaaatgccagctcgtccgttggacatcgataccaacgagattgcacttaaagcgtggaagaaagaagcttccgcgttctaccgcaaagacaaagcacgcgttagccgtcgtctgtcaatggagtttatgttatctcaggcgaacaagtttgcgaattataaagcaatctggtttccgcaaaacatggattggcgtgggcgcgtgtacgctgtcccgatgttcaatcctcagggcaacgatatgacgaaaggcctgctgacctttgcgcaggagaaacccattggtgaagacggcttctattggctcaagattcatggcgcaaatacagctggagtggataaagtaccgtttccacaacgcatcaaatttgttgaggataaccatacgaatattatggaatgcgcgaaagcaccgctggaaaacacttggtgggcggaacaggactcgccgttctgttttctggcgttctgctttgagtatgctggcgtcatcaatagtggtctgtcgtacaactgtagcttgcctctggcatttgatggtagttgctccggcattcaacatttctcagcgatgttacgcgacgaaattggcgccaaagctgtgaatctcctcccatctgcggaataccaggatatttatcgtatcgtcagcgacaaagttaacgaggtactgaaacaagatctgattaacggtacctctaccaccgtggaaacggtgactgataagaagacaggcgaaattacccaacgcacgaaatacgggaccaaagttatggcacagtggtggttagaacacggtgtgaatcgtggcgtcacgaaacgctcggttatgactttggtgtatgggagcaaagagtttggattccgcgatcaagtgctgagtgacaccattcaaccggcgatcgataacggcaaaggtgacatgtttctgaatccgaatcaggctgctggttacatggcgaaactgatctggaacgcagtgtccgggaccgtagtcgcagcagttgaggcgatgaactggctgaaaagtgcggcgaaattacttgctgctgaagtgaaggatcctaagacggatacagttctgcgtggccgctgcgcagtacattgggtgactcccgacggcttccctgtgtggcaggaatacaagaagcctattcagacgcgcttgaacctgatgttcctcggtcagttccgcttacagcctaccattaacaccaacaaagatagcgagattgatgcacacaaacaggagtctggtatcgctcctaactttgtacacagccaagacggtaaccaccttcgtatgactgtagtgtgggcacacgagaagtacggaatcgaatcttttgcactgattcacgactccttcggtaccattccggctgacgctgcgaacctgttcaaagcagtgcgcgaaactatggtttcgacatatgagtcttgtgatgtactggctgatttctacgaccagttcgctgaccagttgcacgagtctcaattggacaaaatgccagcacttccggctaaaggtaacttgaacctccgtgacatcttaaaatcggacttcgcgttcgcg

SEQ ID NO: 714 - protein, 890 aa, synthetic construct
  REGION 1..890: note = Variant of RNA polymerase
MHHHHHHMNTINIAKNDFSDIELAAIPFNTLADHYGERLAREQLALEHESYEMGEARFRKMFERQLKAGEVADNAAAKPLITTLLPKMIARINDWFEEVKAKRGKRPTAFQFLQEIKPEAVAYITIKTTLACLTSADNTTVQAVASAIGRAIEDEARFGRIRDLEAKHFKKNVEEQLNKRVGHVYKKAFMQVVEADMLSKGLLGGEAWSSWHKEDSIHVGVRCIEMLIESTGMVSLHRQNAGVVGQDSETIELAPEYAEAIATRAGALAGISPMFQPCVVPPKPWTGITGGGYWAAGRKPLQLVRTRSLAALRRYEEVSMPEVIKAVNIAQNTAWRINKKVLDVANAITQWQHCPVADVPAMDRGEMPARPLDIDTNEIALKAWKKEASAFYRKDKARVSRRLSMEFMLSQANKFANYKAIWFPQNMDWRGRVYAVPMFNPQGNDMTKGLLTFAQEKPIGEDGFYWLKIHGANTAGVDKVPFPQRIKFVEDNHTNIMECAKAPLENTWWAEQDSPFCFLAFCFEYAGVINSGLSYNCSLPLAFDGSCSGIQHFSAMLRDEIGAKAVNLLPSAEYQDIYRIVSDKVNEVLKQDLINGTSTTVETVTDKKTGEITQRTKYGTKVMAQWWLEHGVNRGVTKRSVMTLVYGSKEFGFRDQVLSDTIQPAIDNGKGDMFLNPNQAAGYMAKLIWNAVSGTVVAAVEAMNWLKSAAKLLAAEVKDPKTDTVLRGRCAVHWVTPDGFPVWQEYKKPIQTRLNLMFLGQFRLQPTINTNKDSEIDAHKQESGIAPNFVHSQDGNHLRMTVVWAHEKYGIESFALIHDSFGTIPADAANLFKAVRETMVSTYESCDVLADFYDQFADQLHESQLDKMPALPAKGNLNLRDILKSDFAFA

SEQ ID NO: 715 - DNA, 2670 bp, synthetic construct
  misc_feature 1..2670: note = Variant of RNA polymerase
  source 1..2670: mol_type = other DNA
atgcaccatcaccatcaccatatgaacacgattaacattgctaagaacgacttctctgacatcgaactggctgctatcccgttcaacactctggctgaccattacggtgagcgtttagctcgcgaacagttggcccttgagcatgagtcttacgagatgggtgaagcacgcttccgcaagatgtttgagcgtcaacttaaagctggtgaggttgcggataacgctgccgccaagcctctcatcactaccctactccctaagatgattgcacgcatcaacgactggtttgaggaagtgaaagctaagcgcggcaagcgcccgacagccttccagttcctgcaagaaatcaagccggaagccgtagcgtacatcaccattaagaccactctggcttgcctaaccagtgcggacaatacaaccgttcaggctgtagcaagcgcaatcggtcgggccattgaggacgaggctcgcttcggtcgtatccgtgaccttgaagctaagcacttcaagaaaaacgttgaggaacaactcaacaagcgcgtagggcacgtctacaagaaagcatttatgccagttgtggaggctgacatgctctctaagggtctactcggtggcgaggcgtggtcttcgtggcataaggaagactctattcatgtaggagtacgctgcatcgagatgctcattgagtcaaccggaatggttagcttacaccgccaaaatgctggcgtagtaggtcaagactctgagactatcgaactcgcacctgaatacgctgaggctatcgcaacccgtgcaggtgcgctggctggcatctctccgatgttccaaccttgcgtagttcctcctaagccgtggactggcattactggtggtggctattgggctgcggggcgcaaacccctgcagttagtacgtactcgcagtctggcggcgcttcgccgctatgaagaagtgtcgatgccggaggtcatcaaagcagtcaacattgcgcagaatacagcatggcgtattaacaagaaagttctcgacgtagcgaatgccatcacccaatggcagcactgtccagtcgcggatgtgcctgcgatggatcgtggcgaaatgccagctcgtccgttggacatcgataccaacgagattgcacttaaagcgtggaagaaagaagcttccgcgttctaccgcaaagacaaagcacgcgttagccgtcgtctgtcaatggagtttatgttatctcaggcgaacaagtttgcgaatgagaaagcaatctggtttccgcaaaacatggattggcgtgggcgcgtgtacgctgtcccgatgttcaatcctcagggcaacgatatgacgaaaggcctgctgacctttgcgcaggagaaacccattggtgaagacggcttctattggctcaagattcatggcgcaaatacagctggagtggataaagtaccgtttccacaacgcatcaaatttgttgaggataaccatacgaatattatggaatgcgcgaaagcaccgctggaaaacacttggtgggcggaacaggactcgccgttctgttttctggcgttctgctttgagtatgctggcgtcatcaatagtggtctgtcgtacaactgtagcttgcctctggcatttgatggtagttgctccggcctgcaacatttctcagcgatgttacgcgacgaaattggcggcaaagctgtgaatctcctcccatctgcggaataccaggatatttatcgtatcgtcagcgacaaagttaacgaggtactgaaacaagatctgattaacggtacctctaccaccgtggaaacggtgactgataagaagacaggcgaaattacccaacgcacgaaatacgggaccaaagttatggcacagtggtggttagaacacggtgtgaatcgtggcgtcacgaaacgctcggttatgactttggtgtatgggagcaaagagtttggattccgcgatcaagtgctgagtgacaccattcaaccggcgatcgataacggcaaaggtgacatgtttctgaatccgaatcaggctgctggttacatggcgaaactgatctggaacgcagtgtccgggaccgtagtcgcagcagttgaggcgatgaactggctgaaaagtgcggcgaaattacttgctgctgaagtgaaggatcctaagacggatacagttctgcgtggccgctgcgcagtacattgggtgactcccgacggcttccctgtgtggcaggaatacaagaagcctattcagacgcgcttgaacctgatgttcctcggtcagttccgcttacagcctaccattaacaccaacaaagatagcgagattgatgcacacaaacaggagtctggtatcgctcctaactttgtacacagccaagacggtaaccaccttcgtatgactgtagtgtgggcacacgagaagtacggaatcgaatcttttgcactgattcacgactccttcggtaccattccggctgacgctgcgaacctgttcaaagcagtgcgcgaaactatggtttcgacatatgagtcttgtgatgtactggctgatttctacgaccagttcgctgaccagttgcacgagtctcaattggacaaaatgccagcacttccggctaaaggtaacttgaacctccgtgacatcttaaaatcggacttcgcgttcgcg

SEQ ID NO: 716 - protein, 890 aa, synthetic construct
  REGION 1..890: note = Variant of RNA polymerase
MHHHHHHMNTINIAKNDFSDIELAAIPFNTLADHYGERLAREQLALEHESYEMGEARFRKMFERQLKAGEVADNAAAKPLITTLLPKMIARINDWFEEVKAKRGKRPTAFQFLQEIKPEAVAYITIKTTLACLTSADNTTVQAVASAIGRAIEDEARFGRIRDLEAKHFKKNVEEQLNKRVGHVYKKAFMPVVEADMLSKGLLGGEAWSSWHKEDSIHVGVRCIEMLIESTGMVSLHRQNAGVVGQDSETIELAPEYAEAIATRAGALAGISPMFQPCVVPPKPWTGITGGGYWAAGRKPLQLVRTRSLAALRRYEEVSMPEVIKAVNIAQNTAWRINKKVLDVANAITQWQHCPVADVPAMDRGEMPARPLDIDTNEIALKAWKKEASAFYRKDKARVSRRLSMEFMLSQANKFANEKAIWFPQNMDWRGRVYAVPMFNPQGNDMTKGLLTFAQEKPIGEDGFYWLKIHGANTAGVDKVPFPQRIKFVEDNHTNIMECAKAPLENTWWAEQDSPFCFLAFCFEYAGVINSGLSYNCSLPLAFDGSCSGLQHFSAMLRDEIGGKAVNLLPSAEYQDIYRIVSDKVNEVLKQDLINGTSTTVETVTDKKTGEITQRTKYGTKVMAQWWLEHGVNRGVTKRSVMTLVYGSKEFGFRDQVLSDTIQPAIDNGKGDMFLNPNQAAGYMAKLIWNAVSGTVVAAVEAMNWLKSAAKLLAAEVKDPKTDTVLRGRCAVHWVTPDGFPVWQEYKKPIQTRLNLMFLGQFRLQPTINTNKDSEIDAHKQESGIAPNFVHSQDGNHLRMTVVWAHEKYGIESFALIHDSFGTIPADAANLFKAVRETMVSTYESCDVLADFYDQFADQLHESQLDKMPALPAKGNLNLRDILKSDFAFA

SEQ ID NO: 717 - DNA, 2670 bp, synthetic construct
  misc_feature 1..2670: note = Variant of RNA polymerase
  source 1..2670: mol_type = other DNA
atgcaccatcaccatcaccatatgaacacgattaacattgctaagaacgacttctctgacatcgaactggctgctatcccgttcaacactctggctgaccattacggtgagcgtttagctcgcgaacagttggcccttgagcatgagtcttacgagatgggtgaagcacgcttccgcaagatgtttgagcgtcaacttaaagctggtgaggttgcggataacgctgccgccaagcctctcatcactaccctactccctaagatgattgcacgcatcaacgactggtttgaggaagtgaaagctaagcgcggcaagcgcccgacagccttccagttcctgcaagaaatcaagccggaagccgtagcgtacatcaccattaagaccactctggcttgcctaaccagtgcggacaatacaaccgttcaggctgtagcaagcgcaatcggtcgggccattgaggacgaggctcgcttcggtcgtatccgtgaccttgaagctaagcacttcaagaaaattgttgaggaacaactcaacaagcgcgtagggcacgtctacaagaaagcatttatgcaagttgtcgagcacgacatgctctctaagggtctactcggtggcgaggcgtggtcttcgtggcataaggaagactctattcatgtaggagtacgctgcatcgagatgctcattgagtcaaccggaatggttagcttacaccgccaaaatgctggcgtagtaggtcaagactctgagactatcgaactcgcacctgaatacgctgaggctatcgcaacccgtgcaggtgcgctggctggcatctctccgatgttccaaccttgcgtagttcctcctaagccgtggactggcattactggtggtggctattgggctgcggggcgcaaacccctgcagttagtacgtactcgcagtctggcggcgcttcgccgctatgaagaagtgtcgatgccggaggtcatcaaagcagtcaacattgcgcagaatacagcatggcgtattaacaagaaagttctcgacgtagcgaatgcaatcacccaatggcagcactgtccagtcgcggatgtgcctgcgatggatcgtggcgaaatgccagctcgtccgttggacatcgataccaacgagattgcacttaaagcgtggaagaaagaagcttccgcgttctaccgcaaagacaaagcacgcgttagccgtcgtctgtcaatggagtttatgttatctcaggcgaacaagtttgcgaattataaagcaatctggtttccgcaaaacatggattggcgtgggcgcgtgtacgctgtcccgatgttcaatcctcagggcaacgatatgacgaaaggcctgctgacctttgcgcaggagaaacccattggtgaagacggcttctattggctcaagattcatggcgcaaatacagctggagtggataaagtaccgtttccacaacgcatcaaatttgttgaggataaccatacgaatattatggaatgcgcgaaagcaccgctggaaaacacttggtgggcggaacaggactcgccgttctgttttctggcgttctgctttgagtatgctggcgtcatcaatagtggtctgtcgtacaactgtagcttgcctctggcatttgatggtagttgctccggcattcaacatttctcagcgatgttacgcgacgaaattggcggcaaagctgtgaatctcctcccatctgcggaataccaggatatttatcgtatcgtcagcgacaaagttaacgaggcgctgaaacaagatctgattaacggtacctctaccaccgtggaaacggtgactgataagaagacaggcgaaattacccaacgcacgaaatacgggaccaaagttatggcacagtggtggttagaacacggtgtgaatcgtggcgtcacgaaacgctcggttatgactttggtgtatgggagcaaagagtttggattccgcgatcaagtgctgagtgacaccattcaaccggcgatcgataacggcaaaggtgacatgtttctgaatccgaatcaggctgctggttacatggcgaaactgatctggaacgcagtgtccgggaccgtagtcgcagcagttgaggcgatgaactggctgaaaagtgcggcgaaattacttgctgctgaagtgaaggatcctaagacggatacagttctgcgtggccgctgcgcagtacattgggtgactcccgacggcttccctgtgtggcaggaatacaagaagcctattcagacgcgcttgaacctgatgttcctcggtcagttccgcttacagcctaccattaacaccaacaaagatagcgagattgatgcacacaaacaggagtctggtatcgctcctaactttgtacacagccaagacggtaaccaccttcgtatgactgtagtgtgggcacacgagaagtacggaatcgaatcttttgcactgattcacgactccttcggtaccattccggctgacgctgcgaacctgttcaaagcagtgcgcgaaactatggtttcgacatatgagtcttgtgatgtactggctgatttctacgaccagttcgctgaccagttgcacgagtctcaattggacaaaatgccagcacttccggctaaaggtaacttgaacctccgtgacatcttaaaatcggacttcgcgttcgcg

SEQ ID NO: 718 - protein, 890 aa, synthetic construct
  REGION 1..890: note = Variant of RNA polymerase
MHHHHHHMNTINIAKNDFSDIELAAIPFNTLADHYGERLAREQLALEHESYEMGEARFRKMFERQLKAGEVADNAAAKPLITTLLPKMIARINDWFEEVKAKRGKRPTAFQFLQEIKPEAVAYITIKTTLACLTSADNTTVQAVASAIGRAIEDEARFGRIRDLEAKHFKKIVEEQLNKRVGHVYKKAFMQVVEHDMLSKGLLGGEAWSSWHKEDSIHVGVRCIEMLIESTGMVSLHRQNAGVVGQDSETIELAPEYAEAIATRAGALAGISPMFQPCVVPPKPWTGITGGGYWAAGRKPLQLVRTRSLAALRRYEEVSMPEVIKAVNIAQNTAWRINKKVLDVANAITQWQHCPVADVPAMDRGEMPARPLDIDTNEIALKAWKKEASAFYRKDKARVSRRLSMEFMLSQANKFANYKAIWFPQNMDWRGRVYAVPMFNPQGNDMTKGLLTFAQEKPIGEDGFYWLKIHGANTAGVDKVPFPQRIKFVEDNHTNIMECAKAPLENTWWAEQDSPFCFLAFCFEYAGVINSGLSYNCSLPLAFDGSCSGIQHFSAMLRDEIGGKAVNLLPSAEYQDIYRIVSDKVNEALKQDLINGTSTTVETVTDKKTGEITQRTKYGTKVMAQWWLEHGVNRGVTKRSVMTLVYGSKEFGFRDQVLSDTIQPAIDNGKGDMFLNPNQAAGYMAKLIWNAVSGTVVAAVEAMNWLKSAAKLLAAEVKDPKTDTVLRGRCAVHWVTPDGFPVWQEYKKPIQTRLNLMFLGQFRLQPTINTNKDSEIDAHKQESGIAPNFVHSQDGNHLRMTVVWAHEKYGIESFALIHDSFGTIPADAANLFKAVRETMVSTYESCDVLADFYDQFADQLHESQLDKMPALPAKGNLNLRDILKSDFAFA

SEQ ID NO: 719 - DNA, 2670 bp, synthetic construct
  misc_feature 1..2670: note = Variant of RNA polymerase
  source 1..2670: mol_type = other DNA
atgcaccatcaccatcaccatatgaacacgattaacattgctaagaacgacttctctgacatcgaactggctgctatcccgttcaacactctggctgaccattacggtgagcgtttagctcgcgaacagttggcccttgagcatgagtcttacgagatgggtgaagcacgcttccgcaagatgtttgagcgtcaacttaaagctggtgaggttgcggataacgctgccgccaagcctctcatcactaccctactccctaagatgattgcacgcatcaacgactggtttgaggaagtgaaagctaagcgcggcaagcgcccgacagccttccagttcctgcaagaaatcaagccggaagccgtagcgtacatcaccattaagaccactctggcttgcctaaccagtgcggacaatacaaccgttcaggctgtagcaagcgcaatcggtcgggccattgaggacgaggctcgcttcggtcgtatccgtgaccttgaagctaagcacttcaagaaaaatgttgaggaacaactcaacaagcgcgtagggcacgtctacaaaaaagcatttatgcaagttgtcgaggctgacatgctctctaagggtctactcggtggcgaggcgtggtcttcgtggcataaggaagactctattcatgtaggagtacgctgcatcgagatgctcattgagtcaaccggaatggttagcttacaccgccaaaatgctggcgtagtaggtcaagactctgagactatcgaactcgcacctgaatacgctgaggctatcgcaacccgtgcaggtgcgctggctggcatctctccgatgttccaaccttgcgtagttcctcctaagccgtggactggcattactggtggtggctattgggctgcggggcgcaaacccctgcagttagtacgtactcgcagtctggcggcgcttcgccgctatgaagaagtgtcgatgccggaggtcatcaaagcagtcaacattgcgcagaatacagcatggcgtattaacaagaaagttctcgacgtagcgaataccatcacccaatggcagcactgtccagtcgcggatgtgcctgcgatggatcgtggcgaaatgccagctcgtccgttggacatcgataccaacgagattgcacttaaagcgtggaagaaagaagcttccgcgttctaccgcaaagacaaagcacgcgttagccgtcgtctgtcaatggagtttatgttatctcaggcgaacaagtttgcgaattataaagcaatctggtttccgcaaaacatggattggcgtgggcgcgtgtacgctgtcccgatgttcaatcctcagggcaacgatatgacgaaaggcctgctgacctttgcgcaggagaaacccattggtgaagacggcttctattggctcaagattcatggcgcaaatacagctggagtggataaagtaccgtttccacaacgcatcaaatttgttgaggataaccatacgaatattatggaatgcgcgaaagcaccgctggaaaacacttggtgggcggaacaggactcgccgttctgttttctggcgttctgctttgagtatgctggcgtcatcaatagtggtctgtcgtacaactgtagcttgcctctggcatttgatggtagttgctccggcatccaacatttctcagcgatgttacgcgacgaaattggcgccaaagctgtgaatctcctcccatctgcggaataccaggatatttatcgtatcgtcagcgacaaagttaacgaggtactgaaacaagatctgattaacggtacctctaccaccgtggaaacggtgactgataagaagacaggcgaaattacccaacgcacgaaatacgggaccaaagttatggcacagtggtggttagaacacggtgtgaatcgtggcgtcacgaaacgctcggttatgactttggtgtatgggagcaaagagtttggattccgcgatcaagtgctgagtgacaccattcaaccggcgatcgataacggcaaaggtgacatgtttctgaatccgaatcaggctgctggttacatggcgaaactgatctggaacgcagtgtccgggaccgtagtcgcagcagttgaggcgatgaactggctgaaaagtgcggcgaaattacttgctgctgaagtgaaggatcctaagacggatacagttctgcgtggccgctgcgcagtacattgggtgactcccgacggcttccctgtgtggcaggaatacaagaagcctattcagacgcgcttgaacctgatgttcctcggtcagttccgcttacagcctaccattaacaccaacaaagatagcgagattgatgcacacaaacaggagtctggtatcgctcctaactttgtacacagccaagacggtaaccaccttcgtatgactgtagtgtgggcacacgagaagtacggaatcgaatcttttgcactgattcacgactccttcggtaccattccggctgacgctgcgaacctgttcaaagcagtgcgcgaaactatggtttcgacatatgagtcttgtgatgtactggctgatttctacgaccagttcgctgaccagttgcacgagtctcaattggacaaaatgccagcacttccggctaaaggtaacttgaacctccgtgacatcttaaaatcggacttcgcgttcgcg

SEQ ID NO: 720 - protein, 890 aa, synthetic construct
  REGION 1..890: note = Variant of RNA polymerase
MHHHHHHMNTINIAKNDFSDIELAAIPFNTLADHYGERLAREQLALEHESYEMGEARFRKMFERQLKAGEVADNAAAKPLITTLLPKMIARINDWFEEVKAKRGKRPTAFQFLQEIKPEAVAYITIKTTLACLTSADNTTVQAVASAIGRAIEDEARFGRIRDLEAKHFKKNVEEQLNKRVGHVYKKAFMQVVEADMLSKGLLGGEAWSSWHKEDSIHVGVRCIEMLIESTGMVSLHRQNAGVVGQDSETIELAPEYAEAIATRAGALAGISPMFQPCVVPPKPWTGITGGGYWAAGRKPLQLVRTRSLAALRRYEEVSMPEVIKAVNIAQNTAWRINKKVLDVANTITQWQHCPVADVPAMDRGEMPARPLDIDTNEIALKAWKKEASAFYRKDKARVSRRLSMEFMLSQANKFANYKAIWFPQNMDWRGRVYAVPMFNPQGNDMTKGLLTFAQEKPIGEDGFYWLKIHGANTAGVDKVPFPQRIKFVEDNHTNIMECAKAPLENTWWAEQDSPFCFLAFCFEYAGVINSGLSYNCSLPLAFDGSCSGIQHFSAMLRDEIGAKAVNLLPSAEYQDIYRIVSDKVNEVLKQDLINGTSTTVETVTDKKTGEITQRTKYGTKVMAQWWLEHGVNRGVTKRSVMTLVYGSKEFGFRDQVLSDTIQPAIDNGKGDMFLNPNQAAGYMAKLIWNAVSGTVVAAVEAMNWLKSAAKLLAAEVKDPKTDTVLRGRCAVHWVTPDGFPVWQEYKKPIQTRLNLMFLGQFRLQPTINTNKDSEIDAHKQESGIAPNFVHSQDGNHLRMTVVWAHEKYGIESFALIHDSFGTIPADAANLFKAVRETMVSTYESCDVLADFYDQFADQLHESQLDKMPALPAKGNLNLRDILKSDFAFA

SEQ ID NO: 721 - DNA, 2670 bp, synthetic construct
  misc_feature 1..2670: note = Variant of RNA polymerase
  source 1..2670: mol_type = other DNA
atgcaccatcaccatcaccatatgaacacgattaacattgctaagaacgacttctctgacatcgaactggctgctatcccgttcaacactctggctgaccattacggtgagcgtttagctcgcgaacagttggcccttgagcatgagtcttacgagatgggtgaagcacgcttccgcaagatgtttgagcgtcaacttaaagctggtgaggttgcggataacgctgccgccaagcctctcatcactaccctactccctaagatgattgcacgcatcaacgactggtttgaggaagtgaaagctaagcgcggcaagcgcccgacagccttccagttcctgcaagaaatcaagccggaagccgtagcgtacatcaccattaagaccactctggcttgcctaaccagtgcggacaatacaaccgttcaggctgtagcaagcgcaatcggtcgggccattgaggacgaggctcgcttcggtcgtatccgtgaccttgaagctaagcacgtcaagaaaaacgttgaggaacaactcaacaagcgcccagggcacgtctacaagaaagcatttatgcaagttgtcgaggctgacatgtcgtctaagggtctactcggtggcgaggcgtggtcttcgtggcataaggaagactctattcatgtaggagtacgctgcatcgagatgctcattgagtcaaccggaatggttagcttacaccgccaaaatgctggcgtagtaggtcaagactctgagactatcgaactcgcacctgaatacgctgaggctatcgcaacccgtgcaggtgcgctggctggcatctctccgatgttccaaccttgcgtagttcctcctaagccgtggactggcattactggtggtggctattgggctgcggggcgcaaacccctgcagttagtacgtactcgcagtctggcggcgcttcgccgctatgaagaagtgtcgatgccggaggtcatcaaagcagtcaacattgcgcagaatacagcatggcgtattaacaagaaagttctcgacgtagcgaatgcaatcacccaatggcagcactgtccagtcgcggatgtgcctgcgatggatcgtggcgaaatgccagctcgtccgttggacatcgataccaacgagattgcacttaaagcgtggaagaaagaagcttccgcgttctaccgcaaagacaaagcacgcgttagccgtcgtctgtcaatggagtttatgttatctcaggcgaacaagtttgcgaattataaggcaatctggtttccgcaaaacatggattggcgtgggcgcgtgtacgctgtcccgatgttcaatcctcagggcaacgatatgacgaaaggcctgctgacctttgcgcaggagaaacccattggtgaagacggcttctattggctcaagattcatggcgcaaatacagctggagtggataaagtaccgtttccacaacgcatcaaatttgttgaggataaccatacgaatattatggaatgcgcgaaagcaccgctggaaaacacttggtgggcggaacaggactcgccgttctgttttctggcgttctgctttgagtatgctggcgtcatcaatcacggtctgtcgtacaactgtagcttgcctctggcatttgatggtagttgctccggcattcaacatttctcagcgatgttacgcgacgaaattggcggcaaagctgtgaatctcctcccatctgcggaataccaggatatttatcgtatcgtcagcgacaaagttaacgaggtactgaaacaagatctgattaacggtacctctaccaccgtggaaacggtgactgataagaagacaggcgaaattacccaacgcacgaaatacgggaccaaagttatggcacagtggtggttagaacacggtgtgaatcgtggcgtcacgaaacgctcggttatgactttggtgtatgggagcaaagagtttggattccgcgatcaagtgctgagtgacaccattcaaccggcgatcgataacggcaaaggtgacatgtttctgaatccgaatcaggctgctggttacatggcgaaactgatctggaacgcagtgtccgggaccgtagtcgcagcagttgaggcgatgaactggctgaaaagtgcggcgaaattacttgctgctgaagtgaaggatccaaagacgggcacagttctgcgtggccgctgcgcagtacattgggtgactcccgacggcttccctgtgtggcaggaatacaagaagcctattcagacgcgcttgaacctgatgttcctcggtcagttccgcttacagcctaccattaacaccaacaaagatagcgagattgatgcacacaaacaggagtctggtatcgctcctaactttgtacacagccaagacggtaaccaccttcgtatgactgtagtgtgggcacacgagaagtacggaatcgaatcttttgcactgattcacgactccttcggtaccattccggctgacgctgcgaacctgttcaaagcagtgcgcgaaactatggttagcacatatgagtcttgtgatgtactggctgatttctacgaccagttcgctgaccagttgcacgagtctcaacgcgacaaaatgccagcacttccggctaaaggtaacttgaacctccgtgacatcttaaaatcggacttcgcgttcgcg

SEQ ID NO: 722 - protein, 890 aa, synthetic construct
  REGION 1..890: note = Variant of RNA polymerase
MHHHHHHMNTINIAKNDFSDIELAAIPFNTLADHYGERLAREQLALEHESYEMGEARFRKMFERQLKAGEVADNAAAKPLITTLLPKMIARINDWFEEVKAKRGKRPTAFQFLQEIKPEAVAYITIKTTLACLTSADNTTVQAVASAIGRAIEDEARFGRIRDLEAKHVKKNVEEQLNKRPGHVYKKAFMQVVEADMSSKGLLGGEAWSSWHKEDSIHVGVRCIEMLIESTGMVSLHRQNAGVVGQDSETIELAPEYAEAIATRAGALAGISPMFQPCVVPPKPWTGITGGGYWAAGRKPLQLVRTRSLAALRRYEEVSMPEVIKAVNIAQNTAWRINKKVLDVANAITQWQHCPVADVPAMDRGEMPARPLDIDTNEIALKAWKKEASAFYRKDKARVSRRLSMEFMLSQANKFANYKAIWFPQNMDWRGRVYAVPMFNPQGNDMTKGLLTFAQEKPIGEDGFYWLKIHGANTAGVDKVPFPQRIKFVEDNHTNIMECAKAPLENTWWAEQDSPFCFLAFCFEYAGVINHGLSYNCSLPLAFDGSCSGIQHFSAMLRDEIGGKAVNLLPSAEYQDIYRIVSDKVNEVLKQDLINGTSTTVETVTDKKTGEITQRTKYGTKVMAQWWLEHGVNRGVTKRSVMTLVYGSKEFGFRDQVLSDTIQPAIDNGKGDMFLNPNQAAGYMAKLIWNAVSGTVVAAVEAMNWLKSAAKLLAAEVKDPKTGTVLRGRCAVHWVTPDGFPVWQEYKKPIQTRLNLMFLGQFRLQPTINTNKDSEIDAHKQESGIAPNFVHSQDGNHLRMTVVWAHEKYGIESFALIHDSFGTIPADAANLFKAVRETMVSTYESCDVLADFYDQFADQLHESQRDKMPALPAKGNLNLRDILKSDFAFA

SEQ ID NO: 723 - DNA, 2670 bp, synthetic construct
  misc_feature 1..2670: note = Variant of RNA polymerase
  source 1..2670: mol_type = other DNA
atgcaccatcaccatcaccatatgaacacgattaacattgctaagaacgacttctctgacatcgaactggctgctatcccgttcaacactctggctgaccattacggtgagcgtttagctcgcgaacagttggcccttgagcatgagtcttacgagatgggtgaagcacgcttccgcaagatgtttgagcgtcaacttaaagctggtgaggttgcggataacgctgccgccaagcctctcatcactaccctactccctaagatgattgcacgcatcaacgactggtttgaggaagtgaaagctaagcgcggcaagcgcccgacagccttccagttcctgcaagaaatcaagccggaagccgtagcgtacatcaccattaagaccactctggcttgcctaaccagtgcggacaatacaaccgttcaggctgtagcaagcgcaatcggtcgggccattgaggacgaggctcgcttcggtcgtatccgtgaccttgaagctaagcacttcaagggcaacgttgaggaacaactcaacaagcgcgtagggcacgtctacaagaaagcatttatgcaagttgtcgaggctgacatgctctctaagggtctactcggtggcgaggcgtggtcttcgtggcataaggaagactctattcatgtaggagtacgctgcatcgagatgctcattgagtcaaccggaatggttagcttacaccgccaaaatgctggcgtagtaggtcaagactctgagactatcgaactcgcacctgaatacgctgaggctatcgcaacccgtgcaggtgcgctggctggcatctctccgatgttccaaccttgcgtagttcctcctaagccgtggactggcattactggtggtggctattgggctgcggggcgcaaacccctgcagttagtacgtactcgcagtctggcggcgcttcgccgctatgaagaagtgtcgatgccggaggtcatcaaagcagtcaacattgcgcagaatacagcatggcgtattaacaagaaagttctcgacgtagcgaatgccatcacccaatggcagcactgtccagtcgcggatgtgcctgcgatggatcgtggcgaaatgccagctcgtccgttggacatcgataccaacgagattgcacttaaagcgtggaagaaagaagcttccgcgttctaccgcaaagacaaagcacgcgttagccgtcgtctgtcaatggagtttatgttatctcaggcgaacaagtttgcgaatgagaaagcaatctggtttccgcaaaacatggattggcgtgggcgcgtgtacgctgtcccgatgttcaatcctcagggcaacgatatgacgaaaggcctgctgacctttgcgcaggagaaacccattggtgaagacggcttctattggctcaagattcatggcgcaaatacagctggagtggataaagtaccgtttccacaacgcatcaaatttgttgaggataaccatacgaatattatggaatgcgcgaaagcaccgctggaaaacacttggtgggcggaacaggactcgccgttctgttttctggcgttctgctttgagtatgctggcgtcatcaatcatggtctgtcgtacaactgtagcttgcctctggcatttgatggtagttgctccggcatccaacatttctcagcgatgttacgcgacgaaattggcggcaaagctgtgaatctcctcccatctgcggaataccaggatatttatcgtatcgtcagcgacaaagttaacgagatgctgaaacaagatctgattaacggtacctctaccaccgtggaaacggtgactgataagaagacaggcgaaattacccaacgcacgaaatacgggaccaaagttatggcacagtggtggttagaacacggtgtgaatcgtggcgtcacgaaacgctcggttatgactttggtgtatgggagcaaagagtttggattccgcgatcaagtgctgagtgacaccattcaaccggcgatcgataacggcaaaggtgacatgtttctgaatccgaatcaggctgctggttacatggcgaaactgatctggaacgcagtgtccgggaccgtagtcgcagcagttgaggcgatgaactggctgaaaagtgcggcgaaattacttgctgctgaagtgaaggatcctaagacggatacagttctgcgtggccgctgcgcagtacattgggtgactcccgacggcttccctgtgtggcaggaatacaagaagcctattcagacgcgcttgaacctgatgttcctcggtcagttccgcttacagcctaccattaacaccaacaaagatagcgagattgatgcacacaaacaggagtctggtatcgctcctaactttgtacacagccaagacggtaaccaccttcgtatgactgtagtgtgggcacacgagaagtacggaatcgaatcttttgcactgattcacgactccttcggtaccattccggctgacgctgcgaacctgttcaaagcagtgcgcgaaactatggtttcgacatatgagtcttgtgatgtactggctgatttctacgaccagttcgctgaccagttgcacgagtctcaattggacaaaatgccagcacttccggctaaaggtaacttgaacctccgtgacatcttaaaatcggacttcgcgttcgcg

SEQ ID NO: 724 - protein, 890 aa, synthetic construct
  REGION 1..890: note = Variant of RNA polymerase
MHHHHHHMNTINIAKNDFSDIELAAIPFNTLADHYGERLAREQLALEHESYEMGEARFRKMFERQLKAGEVADNAAAKPLITTLLPKMIARINDWFEEVKAKRGKRPTAFQFLQEIKPEAVAYITIKTTLACLTSADNTTVQAVASAIGRAIEDEARFGRIRDLEAKHFKGNVEEQLNKRVGHVYKKAFMQVVEADMLSKGLLGGEAWSSWHKEDSIHVGVRCIEMLIESTGMVSLHRQNAGVVGQDSETIELAPEYAEAIATRAGALAGISPMFQPCVVPPKPWTGITGGGYWAAGRKPLQLVRTRSLAALRRYEEVSMPEVIKAVNIAQNTAWRINKKVLDVANAITQWQHCPVADVPAMDRGEMPARPLDIDTNEIALKAWKKEASAFYRKDKARVSRRLSMEFMLSQANKFANEKAIWFPQNMDWRGRVYAVPMFNPQGNDMTKGLLTFAQEKPIGEDGFYWLKIHGANTAGVDKVPFPQRIKFVEDNHTNIMECAKAPLENTWWAEQDSPFCFLAFCFEYAGVINHGLSYNCSLPLAFDGSCSGIQHFSAMLRDEIGGKAVNLLPSAEYQDIYRIVSDKVNEMLKQDLINGTSTTVETVTDKKTGEITQRTKYGTKVMAQWWLEHGVNRGVTKRSVMTLVYGSKEFGFRDQVLSDTIQPAIDNGKGDMFLNPNQAAGYMAKLIWNAVSGTVVAAVEAMNWLKSAAKLLAAEVKDPKTDTVLRGRCAVHWVTPDGFPVWQEYKKPIQTRLNLMFLGQFRLQPTINTNKDSEIDAHKQESGIAPNFVHSQDGNHLRMTVVWAHEKYGIESFALIHDSFGTIPADAANLFKAVRETMVSTYESCDVLADFYDQFADQLHESQLDKMPALPAKGNLNLRDILKSDFAFA

SEQ ID NO: 725 - DNA, 2670 bp, synthetic construct
  misc_feature 1..2670: note = Variant of RNA polymerase
  source 1..2670: mol_type = other DNA
atgcaccatcaccatcaccatatgaacacgattaacattgctaagaacgacttctctgacatcgaactggctgctatcccgttcaacactctggctgaccattacggtgagcgtttagctcgcgaacagttggcccttgagcatgagtcttacgagatgggtgaagcacgcttccgcaagatgtttgagcgtcaacttaaagctggtgaggttgcggataacgctgccgccaagcctctcatcactaccctactccctaagatgattgcacgcatcaacgactggtttgaggaagtgaaagctaagcgcggcaagcgcccgacagccttccagttcctgcaagaaatcaagccggaagccgtagcgtacatcaccattaagaccactctggcttgcctaaccagtgcggacaatacaaccgttcaggctgtagcaagcgcaatcggtcgggccattgaggacgaggctcgcttcggtcgtatccgtgaccttgaagctaagcacttcaagaagaacgttgaggaacaactcaacaagcgcgtagggcacccgtacaagaaagcatttatgcaagttgtcgaggctgacatgctctctaagggtctactcggtggcgaggcgtggtcttcgtggcataaggaagactctattcatgtaggagtacgctgcatcgagatgctcattgagtcaaccggaatggttagcttacaccgccaaaatgctggcgtagtaggtcaagactctgagactatcgaactcgcacctgaatacgctgaggctatcgcaacccgtgcaggtgcgctggctggcatctctccgatgttccaaccttgcgtagttcctcctaagccgtggactggcattactggtggtggctattgggctgcggggcgcaaacccctgcagttagtacgtactcgcagtctggcggcgcttcgccgctatgaagaagtgtcgatgccggaggtcatcaaagcagtcaacattgcgcagaatacagcatggcgtattaacaagaaagttctcgacgtagcgaatgccatcacccaatggcagcactgtccagtcgcggatgtgcctgcgatggatcgtggcgaaatgccagctcgtccgttggacatcgataccaacgagattgcacttaaagcgtggaagaaagaagcttccgcgttctaccgcaaagacaaagcacgcgttagccgtcgtctgtcaatggagtttatgttatctcaggcgaacaagtttgcgaatgagaaagcaatctggtttccgcaaaacatggattggcgtgggcgcgtgtacgctgtcccgatgttcaatcctcagggcaacgatatgacgaaaggcctgctgacctttgcgcaggagaaacccattggtgaagacggcttctattggctcaagattcatggcgcaaatacagctggagtggataaagtaccgtttccacaacgcatcaaatttgttgaggataaccatacgaatattatggaatgcgcgaaagcaccgctggaaaacacttggtgggcggaacaggactcgccgttctgttttctggcgttctgctttgagtatgctggcgtcatcaatcatggtctgtcgtacaactgtagcttgcctctggcatttgatggtagttgctccggcatccaacatttctcagcgatgttacgcgacgaaattggcggcaaagctgtgaatctcctcccatctgcggaataccaggatatttatcgtatcgtcagcgacaaagttaacgagcgtctgaaacaagatctgattaacggtacctctaccaccgtggaaacggtgactgataagaagacaggcgaaattacccaacgcacgaaatacgggaccaaagttatggcacagtggtggttagaacacggtgtgaatcgtggcgtcacgaaacgctcggttatgactttggtgtatgggagcaaagagtttggattccgcgatcaagtgctgagtgacaccattcaaccggcgatcgataacggcaaaggtgacatgtttctgaatccgaatcaggctgctggttacatggcgaaactgatctggaacgcagtgtccgggaccgtagtcgcagcagttgaggcgatgaactggctgaaaagtgcggcgaaattacttgctgctgaagtgaaggatcctaagacggatacagttctgcgtggccgctgcgcagtacattgggtgactcccgacggcttccctgtgtggcaggaatacaagaagcctattcagacgcgcttgaacctgatgttcctcggtcagttccgcttacagcctaccattaacaccaacaaagatagcgagattgatgcacacaaacaggagtctggtatcgctcctaactttgtacacagccaagacggtaaccaccttcgtatgactgtagtgtgggcacacgagaagtacggaatcgaatcttttgcactgattcacgactccttcggtaccattccggctgacgctgcgaacctgttcaaagcagtgcgcgaaactatggtttcgacatatgagtcttgtgatgtactggctgatttctacgaccagttcgctgaccagttgcacgagtctcaattggacaaaatgccagcacttccggctaaaggtaacttgaacctccgtgacatcttaaaatcggacttcgcgttcgcg

SEQ ID NO: 726 - protein, 890 aa, synthetic construct
  REGION 1..890: note = Variant of RNA polymerase
MHHHHHHMNTINIAKNDFSDIELAAIPFNTLADHYGERLAREQLALEHESYEMGEARFRKMFERQLKAGEVADNAAAKPLITTLLPKMIARINDWFEEVKAKRGKRPTAFQFLQEIKPEAVAYITIKTTLACLTSADNTTVQAVASAIGRAIEDEARFGRIRDLEAKHFKKNVEEQLNKRVGHPYKKAFMQVVEADMLSKGLLGGEAWSSWHKEDSIHVGVRCIEMLIESTGMVSLHRQNAGVVGQDSETIELAPEYAEAIATRAGALAGISPMFQPCVVPPKPWTGITGGGYWAAGRKPLQLVRTRSLAALRRYEEVSMPEVIKAVNIAQNTAWRINKKVLDVANAITQWQHCPVADVPAMDRGEMPARPLDIDTNEIALKAWKKEASAFYRKDKARVSRRLSMEFMLSQANKFANEKAIWFPQNMDWRGRVYAVPMFNPQGNDMTKGLLTFAQEKPIGEDGFYWLKIHGANTAGVDKVPFPQRIKFVEDNHTNIMECAKAPLENTWWAEQDSPFCFLAFCFEYAGVINHGLSYNCSLPLAFDGSCSGIQHFSAMLRDEIGGKAVNLLPSAEYQDIYRIVSDKVNERLKQDLINGTSTTVETVTDKKTGEITQRTKYGTKVMAQWWLEHGVNRGVTKRSVMTLVYGSKEFGFRDQVLSDTIQPAIDNGKGDMFLNPNQAAGYMAKLIWNAVSGTVVAAVEAMNWLKSAAKLLAAEVKDPKTDTVLRGRCAVHWVTPDGFPVWQEYKKPIQTRLNLMFLGQFRLQPTINTNKDSEIDAHKQESGIAPNFVHSQDGNHLRMTVVWAHEKYGIESFALIHDSFGTIPADAANLFKAVRETMVSTYESCDVLADFYDQFADQLHESQLDKMPALPAKGNLNLRDILKSDFAFA

SEQ ID NO: 727 - DNA, 2670 bp, synthetic construct
  misc_feature 1..2670: note = Variant of RNA polymerase
  source 1..2670: mol_type = other DNA
atgcaccatcaccatcaccatatgaacacgattaacattgctaagaacgacttctctgacatcgaactggctgctatcccgttcaacactctggctgaccattacggtgagcgtttagctcgcgaacagttggcccttgagcatgagtcttacgagatgggtgaagcacgcttccgcaagatgtttgagcgtcaacttaaagctggtgaggttgcggataacgctgccgccaagcctctcatcactaccctactccctaagatgattgcacgcatcaacgactggtttgaggaagtgaaagctaagcgcggcaagcgcccgacagccttccagttcctgcaagaaatcaagccggaagccgtagcgtacatcaccattaagaccactctggcttgcctaaccagtgcggacaatacaaccgttcaggctgtagcaagcgcaatcggtcgggccattgaggacgaggctcgcttcggtcgtatccgtgaccttgaagctaagcacttcaagaaaaacgttgaggaacaactcaacaagcgcgtagggcacgtctacaagaaagcatttatgcaagttgtcgaggctgacatgctctctaagggtctactcggtggcgaggcgtggtcttcgtggcataaggaagactctattcatgtaggagtacgctgcatcgagatgctcattgagtcaaccggaatggttagcttacaccgccaaaatgctggcgtagtaggtcaagactctgagactatcgaactcgcacctgaatacgctgaggctatcgcaacccgtgcaggtgcgctggctggcatctctccgatgttccaaccttgcgtagttcctcctaagccgtggactggcattactggtggtggctattgggctgcggggcgcaaacccctgcagttagtacgtactcgcagtctggcggcgcttcgccgctatgaagaagtgtcgatgccggaggtcatcaaagcagtcaacattgcgcagaatacagcatggcgtattaacaagaaagttctcgacgtagcgaatgcaatcacccaatggcagcactgtccagtcgcggatgtgcctgcgatggatcgtggcgaaatgccagctcgtccgttggacatcgataccaacgagattgcacttaaagcgtggaagaaagaagcttccgcgttctaccgcaaagacaaagcacgcgttagccgtcgtctgtcaatggagtttatgttatctcaggcgaacaagtttgcgaattataaagcaatctggtttccgcaaaacatggattggcgtgggcgcgtgtacgctgtcccgatgttcaatcctcagggcaacgatatgacgaaaggcctgctgacctttgcgcaggagaaacccattggtgaagacggcttctattggctcaagattcatggcgcaaatacagctggagtggataaagtaccgtttccacaacgcatcaaatttgttgaggataaccatacgaatattatggaatgcgcgaaagcaccgctggaaaacacttggtgggcggaacaggactcgccgttctgttttctggcgttctgctttgagtatgctggcgtcatcaatcacggtctgtcgtacaactgtagcttgcctcaggcatttgatggtagttgctccggcattcaacatttctcagcgatgttacgcgacgaaattggcggcaaagctgtgaatctcctcccatctgcggaataccaggatatttatcgtatcgtcagcgacaaagttaacgaggtactgaaacaagatctgattaacggtacctctaccaccgtggaaacggtgactgataagaagacaggcgaaattacccaacgcacgaaatacgggaccaaagttatggcacagtggtggttagaacacggtgtgaatcgtggcgtcacgaaacgctcggttatgactttggtgtatgggagcaaagagtttggattccgcgatcaagtgctgagtgacaccattcaaccggcgatcgataacggcaaaggtgacatgtttctgaatccgaatcaggctgctggttacatggcgaaactgatctggaacgcagtgtccgggaccgtagtcgcagcagttgaggcgatgaactggctgaaaagtgcggcgaaattacttgctgctgaagtgaaggatcctaagacggatacagttctgcgtggccgctgcgcagtacattgggtgactcccgacggcttccctgtgtggcaggaatacaagaagcctattcagacgcgcttgaacctgatgttcctcggtcagttccgcttacagcctaccattaacaccaacaaagatagcgagattgatgcacacaaacaggagtctggtatcgctcctaactttgtacacagccaagacggtaaccaccttcgtatgactgtagtgtgggcacacgagaagtacggaatcgaatcttttgcactgattcacgactccttcggtaccattccggctgacgctgcgaacctgttcaaagcagtgcgcgaaactatggtttcgacatatgagtcttgtgatgtactggctgatttctacgaccagttcgctgaccagttgcacgagtctcaattggacaaaatgccagcacttccggctaaaggtaacttgaacctccgtgacatcttaaaatcggacttcgcgttcgcg

SEQ ID NO: 728 - protein, 890 aa, synthetic construct
  REGION 1..890: note = Variant of RNA polymerase
MHHHHHHMNTINIAKNDFSDIELAAIPFNTLADHYGERLAREQLALEHESYEMGEARFRKMFERQLKAGEVADNAAAKPLITTLLPKMIARINDWFEEVKAKRGKRPTAFQFLQEIKPEAVAYITIKTTLACLTSADNTTVQAVASAIGRAIEDEARFGRIRDLEAKHFKKNVEEQLNKRVGHVYKKAFMQVVEADMLSKGLLGGEAWSSWHKEDSIHVGVRCIEMLIESTGMVSLHRQNAGVVGQDSETIELAPEYAEAIATRAGALAGISPMFQPCVVPPKPWTGITGGGYWAAGRKPLQLVRTRSLAALRRYEEVSMPEVIKAVNIAQNTAWRINKKVLDVANAITQWQHCPVADVPAMDRGEMPARPLDIDTNEIALKAWKKEASAFYRKDKARVSRRLSMEFMLSQANKFANYKAIWFPQNMDWRGRVYAVPMFNPQGNDMTKGLLTFAQEKPIGEDGFYWLKIHGANTAGVDKVPFPQRIKFVEDNHTNIMECAKAPLENTWWAEQDSPFCFLAFCFEYAGVINHGLSYNCSLPQAFDGSCSGIQHFSAMLRDEIGGKAVNLLPSAEYQDIYRIVSDKVNEVLKQDLINGTSTTVETVTDKKTGEITQRTKYGTKVMAQWWLEHGVNRGVTKRSVMTLVYGSKEFGFRDQVLSDTIQPAIDNGKGDMFLNPNQAAGYMAKLIWNAVSGTVVAAVEAMNWLKSAAKLLAAEVKDPKTDTVLRGRCAVHWVTPDGFPVWQEYKKPIQTRLNLMFLGQFRLQPTINTNKDSEIDAHKQESGIAPNFVHSQDGNHLRMTVVWAHEKYGIESFALIHDSFGTIPADAANLFKAVRETMVSTYESCDVLADFYDQFADQLHESQLDKMPALPAKGNLNLRDILKSDFAFA

SEQ ID NO: 729 - DNA, 2670 bp, synthetic construct
  misc_feature 1..2670: note = Variant of RNA polymerase
  source 1..2670: mol_type = other DNA
atgcaccatcaccatcaccatatgaacacgattaacattgctaagaacgacttctctgacatcgaactggctgctatcccgttcaacactctggctgaccattacggtgagcgtttagctcgcgaacagttggcccttgagcatgagtcttacgagatgggtgaagcacgcttccgcaagatgtttgagcgtcaacttaaagctggtgaggttgcggataacgctgccgccaagcctctcatcactaccctactccctaagatgattgcacgcatcaacgactggtttgaggaagtgaaagctaagcgcggcaagcgcccgacagccttccagttcctgcaagaaatcaagccggaagccgtagcgtacatcaccattaagaccactctggcttgcctaaccagtgcggacaatacaaccgttcaggctgtagcaagcgcaatcggtcgggccattgaggacgaggctcgcttcggtcgtatccgtgaccttgaagctaagcacttcaagaagaacgttgaggaacaactcaacaagcgcgtagggcacgtctacaagaaagcatttatgcaagttgtcgaggctgacatgctctctaagggtctactcggtggcgaggcgtggtcttcgtggcataaggaagactctattcatgtaggagtacgctgcatcgagatgctcattgagtcaaccggaatggttagcttacaccgccaaaatgctggcgtagtaggtcaagactctgagactatcgaactcgcacctgaatacgctgaggctatcgcaacccgtgcaggtgcgctggctggcatctctccgatgttccaaccttgcgtagttcctcctaagccgtggactggcattactggtggtggctattgggctgcggggcgcaaacccctgcagttagtacgtactcgcagtctggcggcgcttcgccgctatgaagaagtgtcgatgccggaggtcatcaaagcagtcaacattgcgcagaatacagcatggcgtattaacaagaaagttctcgacgtagcgaatgccatcacccaatggcagcactgtccagtcgcggatgtgcctgcgatggatcgtggcgaaatgccagctcgtccgttggacatcgataccaacgagattgcacttaaagcgtggaagaaagaagcttccgcgttctaccgcaaagacaaagcacgcgttagccgtcgtctgtcaatggagtttatgttatctcaggcgaacaagtttgcgaatgagaaagcaatctggtttccgcaaaacatggattggcgtgggcgcgtgtacgctgtcccgatgttcaatcctcagggcaacgatatgacgaaaggcctgctgacctttgcgcaggagaaacccattggtgaagacggcttctattggctcaagattcatggcgcaaatacagctggagtggataaagtaccgtttccacaacgcatcaaatttgttgaggataaccatacgaatattatggaatgcgcgaaagcaccgctggaaaacacttggtgggcggaacaggactcgccgttctgttttctggcgttctgctttgagtatgctggcgtcatcaatcacggtctgtcgtacaactgtagcttgcctctggcatttgatggtagttgctccggcctgcaacatttctcagcgatgttacgcgacgaaattggcggcaaagctgtgaatctcctcccatctgcggaataccaggatatttatcgtatcgtcagcgacaaagttaacgaggtactgaaacaagatctgattaacggtacctctaccaccgtggaaacggtgactgataagaagacaggcgaaattacccaacgcacgaaatacgggaccaaagttatggcacagtggtggttagaacacggtgtgaatcgtggcgtcacgaaacgctcggttatgactttggtgtatgggagcaaagagtttggattccgcgatcaagtgctgagtgacaccattcaaccggcgatcgataacggcaaaggtgacatgtttctgaatccgaatcaggctgctggttacatggcgaaactgatctggaacgcagtgtccgggaccgtagtcgcagcagttgaggcgatgaactggctgaaaagtgcggcgaaattacttgctgctgaagtgaaggatcctaagacggatacagttctgcgtggccgctgcgcagtacattgggtgactcccgacggcttccctgtgtggcaggaatacaagaagcctattcagacgcgcttgaacctgatgttcctcggtcagttccgcttacagcctaccattaacaccaacaaagatagcgagattgatgcacacaaacaggagtctggtatcgctcctaactttgtacacagccaagacggtaaccaccttcgtatgactgtagtgtgggcacacgagaagtacggaatcgaatcttttgcactgattcacgactccttcggtaccattccggctgacgctgcgaacctgttcaaagcagtgcgcgaaactatggtttcgacatatgagtcttgtgatgtactggctgatttctacgaccagttcgctgaccagttgcacgagtctcaattggacaaaatgccagcacttccggctaaaggtaacttgaacctccgtgacatcttaaaatcggacttcgcgttcgcg

SEQ ID NO: 730 - protein, 890 aa, synthetic construct
  REGION 1..890: note = Variant of RNA polymerase
MHHHHHHMNTINIAKNDFSDIELAAIPFNTLADHYGERLAREQLALEHESYEMGEARFRKMFERQLKAGEVADNAAAKPLITTLLPKMIARINDWFEEVKAKRGKRPTAFQFLQEIKPEAVAYITIKTTLACLTSADNTTVQAVASAIGRAIEDEARFGRIRDLEAKHFKKNVEEQLNKRVGHVYKKAFMQVVEADMLSKGLLGGEAWSSWHKEDSIHVGVRCIEMLIESTGMVSLHRQNAGVVGQDSETIELAPEYAEAIATRAGALAGISPMFQPCVVPPKPWTGITGGGYWAAGRKPLQLVRTRSLAALRRYEEVSMPEVIKAVNIAQNTAWRINKKVLDVANAITQWQHCPVADVPAMDRGEMPARPLDIDTNEIALKAWKKEASAFYRKDKARVSRRLSMEFMLSQANKFANEKAIWFPQNMDWRGRVYAVPMFNPQGNDMTKGLLTFAQEKPIGEDGFYWLKIHGANTAGVDKVPFPQRIKFVEDNHTNIMECAKAPLENTWWAEQDSPFCFLAFCFEYAGVINHGLSYNCSLPLAFDGSCSGLQHFSAMLRDEIGGKAVNLLPSAEYQDIYRIVSDKVNEVLKQDLINGTSTTVETVTDKKTGEITQRTKYGTKVMAQWWLEHGVNRGVTKRSVMTLVYGSKEFGFRDQVLSDTIQPAIDNGKGDMFLNPNQAAGYMAKLIWNAVSGTVVAAVEAMNWLKSAAKLLAAEVKDPKTDTVLRGRCAVHWVTPDGFPVWQEYKKPIQTRLNLMFLGQFRLQPTINTNKDSEIDAHKQESGIAPNFVHSQDGNHLRMTVVWAHEKYGIESFALIHDSFGTIPADAANLFKAVRETMVSTYESCDVLADFYDQFADQLHESQLDKMPALPAKGNLNLRDILKSDFAFA

SEQ ID NO: 731 - DNA, 2670 bp, synthetic construct
  misc_feature 1..2670: note = Variant of RNA polymerase
  source 1..2670: mol_type = other DNA
atgcaccatcaccatcaccatatgaacacgattaacattgctaagaacgacttctctgacatcgaactggctgctatcccgttcaacactctggctgaccattacggtgagcgtttagctcgcgaacagttggcccttgagcatgagtcttacgagatgggtgaagcacgcttccgcaagatgtttgagcgtcaacttaaagctggtgaggttgcggataacgctgccgccaagcctctcatcactaccctactccctaagatgattgcacgcatcaacgactggtttgaggaagtgaaagctaagcgcggcaagcgcccgacagccttccagttcctgcaagaaatcaagccggaagccgtagcgtacatcaccattaagaccactctggcttgcctaaccagtgcggacaatacaaccgttcaggctgtagcaagcgcaatcggtcgggccattgaggacgaggctcgcttcggtcgtatccgtgaccttgaagctaagcacttcaagaaaattgttgaggaacaactcaacaagcgcgtagggcacgtctacaagaaagcatttatgcaagttgtcgaggctgacatgctctctaagggtctactcggtggcgaggcgtggtcttcgtggcataaggaagactctattcatgtaggagtacgctgcatcgagatgctcattgagtcaaccggaatggttagcttacaccgccaaaatgctggcgtagtaggtcaagactctgagactatcgaactcgcacctgaatacgctgaggctatcgcaacccgtgcaggtgcgctggctggcatctctccgatgttccaaccttgcgtagttcctcctaagccgtggactggcattactggtggtggctattgggctgcggggcgcaaacccctgcagttagtacgtactcgcagtctggcggcgcttcgccgctatgaagaagtgtcgatgccggaggtcatcaaagcagtcaacattgcgcagaatacagcatggcgtattaacaagaaagttctcgacgtagcgaataccatcacccaatggcagcactgtccagtcgcggatgtgcctgcgatggatcgtggcgaaatgccagctcgtccgttggacatcgataccaacgagattgcacttaaagcgtggaagaaagaagcttccgcgttctaccgcaaagacaaagcacgcgttagccgtcgtctgtcaatggagtttatgttatctcaggcgaacaagtttgcgaattataaagcaatctggtttccgcaaaacatggattggcgtgggcgcgtgtacgctgtcccgatgttcaatcctcagggcaacgatatgacgaaaggcctgctgacctttgcgcaggagaaacccattggtgaagacggcttctattggctcaagattcatggcgcaaatacagctggagtggataaagtaccgtttccacaacgcatcaaatttgttgaggataaccatacgaatattatggaatgcgcgaaagcaccgctggaaaacacttggtgggcggaacaggactcgccgttctgttttctggcgttctgctttgagtatgctggcgtcatcaatagtggtctgtcgtacaactgtagcttgcctctggcatttgatggtagttgctccggcattcaacatttctcagcgatgttacgcgacgaaattggcggcaaagctgtgaatctcctcccatctgcggaataccaggatatttatcgtatcgtcagcgacaaagttaacgagcgtctgaaacaagatctgattaacggtacctctaccaccgtggaaacggtgactgataagaagacaggcgaaattacccaacgcacgaaatacgggaccaaagttatggcacagtggtggttagaacacggtgtgaatcgtggcgtcacgaaacgctcggttatgactttggtgtatgggagcaaagagtttggattccgcgatcaagtgctgagtgacaccattcaaccggcgatcgataacggcaaaggtgacatgtttctgaatccgaatcaggctgctggttacatggcgaaactgatctggaacgcagtgtccgggaccgtagtcgcagcagttgaggcgatgaactggctgaaaagtgcggcgaaattacttgctgctgaagtgaaggatcctaagacggatacagttctgcgtggccgctgcgcagtacattgggtgactcccgacggcttccctgtgtggcaggaatacaagaagcctattcagacgcgcttgaacctgatgttcctcggtcagttccgcttacagcctaccattaacaccaacaaagatagcgagattgatgcacacaaacaggagtctggtatcgctcctaactttgtacacagccaagacggtaaccaccttcgtatgactgtagtgtgggcacacgagaagtacggaatcgaatcttttgcactgattcacgactccttcggtaccattccggctgacgctgcgaacctgttcaaagcagtgcgcgaaactatggtttcgacatatgagtcttgtgatgtactggctgatttctacgaccagttcgctgaccagttgcacgagtctcaattggacaaaatgccagcacttccggctaaaggtaacttgaacctccgtgacatcttaaaatcggacttcgcgttcgcg

SEQ ID NO: 732 - protein, 890 aa, synthetic construct
  REGION 1..890: note = Variant of RNA polymerase
MHHHHHHMNTINIAKNDFSDIELAAIPFNTLADHYGERLAREQLALEHESYEMGEARFRKMFERQLKAGEVADNAAAKPLITTLLPKMIARINDWFEEVKAKRGKRPTAFQFLQEIKPEAVAYITIKTTLACLTSADNTTVQAVASAIGRAIEDEARFGRIRDLEAKHFKKIVEEQLNKRVGHVYKKAFMQVVEADMLSKGLLGGEAWSSWHKEDSIHVGVRCIEMLIESTGMVSLHRQNAGVVGQDSETIELAPEYAEAIATRAGALAGISPMFQPCVVPPKPWTGITGGGYWAAGRKPLQLVRTRSLAALRRYEEVSMPEVIKAVNIAQNTAWRINKKVLDVANTITQWQHCPVADVPAMDRGEMPARPLDIDTNEIALKAWKKEASAFYRKDKARVSRRLSMEFMLSQANKFANYKAIWFPQNMDWRGRVYAVPMFNPQGNDMTKGLLTFAQEKPIGEDGFYWLKIHGANTAGVDKVPFPQRIKFVEDNHTNIMECAKAPLENTWWAEQDSPFCFLAFCFEYAGVINSGLSYNCSLPLAFDGSCSGIQHFSAMLRDEIGGKAVNLLPSAEYQDIYRIVSDKVNERLKQDLINGTSTTVETVTDKKTGEITQRTKYGTKVMAQWWLEHGVNRGVTKRSVMTLVYGSKEFGFRDQVLSDTIQPAIDNGKGDMFLNPNQAAGYMAKLIWNAVSGTVVAAVEAMNWLKSAAKLLAAEVKDPKTDTVLRGRCAVHWVTPDGFPVWQEYKKPIQTRLNLMFLGQFRLQPTINTNKDSEIDAHKQESGIAPNFVHSQDGNHLRMTVVWAHEKYGIESFALIHDSFGTIPADAANLFKAVRETMVSTYESCDVLADFYDQFADQLHESQLDKMPALPAKGNLNLRDILKSDFAFA

SEQ ID NO: 733 - DNA, 2670 bp, synthetic construct
  misc_feature 1..2670: note = Variant of RNA polymerase
  source 1..2670: mol_type = other DNA
atgcaccatcaccatcaccatatgaacacgattaacattgctaagaacgacttctctgacatcgaactggctgctatcccgttcaacactctggctgaccattacggtgagcgtttagctcgcgaacagttggcccttgagcatgagtcttacgagatgggtgaagcacgcttccgcaagatgtttgagcgtcaacttaaagctggtgaggttgcggataacgctgccgccaagcctctcatcactaccctactccctaagatgattgcacgcatcaacgactggtttgaggaagtgaaagctaagcgcggcaagcgcccgacagccttccagttcctgcaagaaatcaagccggaagccgtagcgtacatcaccattaagaccactctggcttgcctaaccagtgcggacaatacaaccgttcaggctgtagcaagcgcaatcggtcgggccattgaggacgaggctcgcttcggtcgtatccgtgaccttgaagctaagcacttcaagaaaattgttgaggaacaactcaacaagcgcgtagggcacgtctacaaagtagcatttatgcaagttgtcgaggctgacatgctctctaagggtctactcggtggcgaggcgtggtcttcgtggcataaggaagactctattcatgtaggagtacgctgcatcgagatgctcattgagtcaaccggaatggttagcttacaccgccaaaatgctggcgtagtaggtcaagactctgagactatcgaactcgcacctgaatacgctgaggctatcgcaacccgtgcaggtgcgctggctggcatctctccgatgttccaaccttgcgtagttcctcctaagccgtggactggcattactggtggtggctattgggctgcggggcgcaaacccctgcagttagtacgtactcgcagtctggcggcgcttcgccgctatgaagaagtgtcgatgccggaggtcatcaaagcagtcaacattgcgcagaatacagcatggcgtattaacaagaaagttctcgacgtagcgaatgccatcacccaatggcagcactgtccagtcgcggatgtgcctgcgatggatcgtggcgaaatgccagctcgtccgttggacatcgataccaacgagattgcacttaaagcgtggaagaaagaagcttccgcgttctaccgcaaagacaaagcacgcgttagccgtcgtctgtcaatggagtttatgttatctcaggcgaacaagtttgcgaattataaagcaatctggtttccgcaaaacatggattggcgtgggcgcgtgtacgctgtcccgatgttcaatcctcagggcaacgatatgacgaaaggcctgctgacctttgcgcaggagaaacccattggtgaagacggcttctattggctcaagattcatggcgcaaatacagctggagtggataaagtaccgtttccacaacgcatcaaatttgttgaggataaccatacgaatattatggaatgcgcgaaagcaccgctggaaaacacttggtgggcggaacaggactcgccgttctgttttctggcgttctgctttgagtatgctggcgtcatcaatcatggtctgtcgtacaactgtagcttgcctctggcatttgatggtagttgctccggcctgcaacatttctcagcgatgttacgcgacgaaattggcggcaaagctgtgaatctcctcccatctgcggaataccaggatatttatcgtatcgtcagcgacaaagttaacgaggtactgaaacaagatctgattaacggtacctctaccaccgtggaaacggtgactgataagaagacaggcgaaattacccaacgcacgaaatacgggaccaaagttatggcacagtggtggttagaacacggtgtgaatcgtggcgtcacgaaacgctcggttatgactttggtgtatgggagcaaagagtttggattccgcgatcaagtgctgagtgacaccattcaaccggcgatcgataacggcaaaggtgacatgtttctgaatccgaatcaggctgctggttacatggcgaaactgatctggaacgcagtgtccgggaccgtagtcgcagcagttgaggcgatgaactggctgaaaagtgcggcgaaattacttgctgctgaagtgaaggatcctaagacggatacagttctgcgtggccgctgcgcagtacattgggtgactcccgacggcttccctgtgtggcaggaatacaagaagcctattcagacgcgcttgaacctgatgttcctcggtcagttccgcttacagcctaccattaacaccaacaaagatagcgagattgatgcacacaaacaggagtctggtatcgctcctaactttgtacacagccaagacggtaaccaccttcgtatgactgtagtgtgggcacacgagaagtacggaatcgaatcttttgcactgattcacgactccttcggtaccattccggctgacgctgcgaacctgttcaaagcagtgcgcgaaactatggtttcgacatatgagtcttgtgatgtactggctgatttctacgaccagttcgctgaccagttgcacgagtctcaattggacaaaatgccagcacttccggctaaaggtaacttgaacctccgtgacatcttaaaatcggacttcgcgttcgcg

SEQ ID NO: 734 - protein, 890 aa, synthetic construct
  REGION 1..890: note = Variant of RNA polymerase
MHHHHHHMNTINIAKNDFSDIELAAIPFNTLADHYGERLAREQLALEHESYEMGEARFRKMFERQLKAGEVADNAAAKPLITTLLPKMIARINDWFEEVKAKRGKRPTAFQFLQEIKPEAVAYITIKTTLACLTSADNTTVQAVASAIGRAIEDEARFGRIRDLEAKHFKKIVEEQLNKRVGHVYKVAFMQVVEADMLSKGLLGGEAWSSWHKEDSIHVGVRCIEMLIESTGMVSLHRQNAGVVGQDSETIELAPEYAEAIATRAGALAGISPMFQPCVVPPKPWTGITGGGYWAAGRKPLQLVRTRSLAALRRYEEVSMPEVIKAVNIAQNTAWRINKKVLDVANAITQWQHCPVADVPAMDRGEMPARPLDIDTNEIALKAWKKEASAFYRKDKARVSRRLSMEFMLSQANKFANYKAIWFPQNMDWRGRVYAVPMFNPQGNDMTKGLLTFAQEKPIGEDGFYWLKIHGANTAGVDKVPFPQRIKFVEDNHTNIMECAKAPLENTWWAEQDSPFCFLAFCFEYAGVINHGLSYNCSLPLAFDGSCSGLQHFSAMLRDEIGGKAVNLLPSAEYQDIYRIVSDKVNEVLKQDLINGTSTTVETVTDKKTGEITQRTKYGTKVMAQWWLEHGVNRGVTKRSVMTLVYGSKEFGFRDQVLSDTIQPAIDNGKGDMFLNPNQAAGYMAKLIWNAVSGTVVAAVEAMNWLKSAAKLLAAEVKDPKTDTVLRGRCAVHWVTPDGFPVWQEYKKPIQTRLNLMFLGQFRLQPTINTNKDSEIDAHKQESGIAPNFVHSQDGNHLRMTVVWAHEKYGIESFALIHDSFGTIPADAANLFKAVRETMVSTYESCDVLADFYDQFADQLHESQLDKMPALPAKGNLNLRDILKSDFAFA

SEQ ID NO: 735 - DNA, 2670 bp, synthetic construct
  misc_feature 1..2670: note = Variant of RNA polymerase
  source 1..2670: mol_type = other DNA
atgcaccatcaccatcaccatatgaacacgattaacattgctaagaacgacttctctgacatcgaactggctgctatcccgttcaacactctggctgaccattacggtgagcgtttagctcgcgaacagttggcccttgagcatgagtcttacgagatgggtgaagcacgcttccgcaagatgtttgagcgtcaacttaaagctggtgaggttgcggataacgctgccgccaagcctctcatcactaccctactccctaagatgattgcacgcatcaacgactggtttgaggaagtgaaagctaagcgcggcaagcgcccgacagccttccagttcctgcaagaaatcaagccggaagccgtagcgtacatcaccattaagaccactctggcttgcctaaccagtgcggacaatacaaccgttcaggctgtagcaagcgcaatcggtcgggccattgaggacgaggctcgcttcggtcgtatccgtgaccttgaagctaagcacgtcaagaaaaacgttgaggaacaactcaacaagcgcccagggcacgtctacaagaaagcatttatacaagttgtcgaggctgacatgctctctaagggtctactcggtggcgaggcgtggtcttcgtggcataaggaagactctattcatgtaggagtacgctgcatcgagatgctcattgagtcaaccggaatggttagcttacaccgccaaaatgctggcgtagtaggtcaagactctgagactatcgaactcgcacctgaatacgctgaggctatcgcaacccgtgcaggtgcgctggctggcatctctccgatgttccaaccttgcgtagttcctcctaagccgtggactggcattactggtggtggctattgggctgcggggcgcaaacccctgcagttagtacgtactcgcagtctggcggcgcttcgccgctatgaagaagtgtcgatgccggaggtcatcaaagcagtcaacattgcgcagaatacagcatggcgtattaacaagaaagttctcgacgtagcgaatgcaatcacccaatggcagcactgtccagtcgcggatgtgcctgcgatggatcgtggcgaaatgccagctcgtccgttggacatcgataccaacgagattgcacttaaagcgtggaagaaagaagcttccgcgttctaccgcaaagacaaagcacgcgttagccgtcgtctgtcaatggagtttatgttatctcaggcgaacaagtttgcgaattataacgcaatctggtttccgcaaaacatggattggcgtgggcgcgtgtacgctgtcccgatgttcaatcctcagggcaacgatatgacgaaaggcctgctgacctttgcgcaggagaaacccattggtgaagacggcttctattggctcaagattcatggcgcaaatacagctggagtggataaagtaccgtttccacaacgcatcaaatttgttgaggataaccatacgaatattatggaatgcgcgaaagcaccgctggaaaacacttggtgggcggaacaggactcgccgttctgttttctggcgttctgctttgagtatgctggcgtcatcaatcacggtctgtcgtacaactgtagcttgcctctggcatttgatggtagttgctccggcattcaacatttctcagcgatgttacgcgacgaaattggcggcaaagctgtgaatctcctcccatctgcggaataccaggatatttatcgtatcgtcagcgacaaagttaacgaggtactgaaacaagatctgattaacggtacctctaccaccgtggaaacggtgactgataagaagacaggcgaaattacccaacgcacgaaatacgggaccaaagttatggcacagtggtggttagaacacggtgtgaatcgtggcgtcacgaaacgctcggttatgactttggtgtatgggagcaaagagtttggattccgcgatcaagtgctgagtgacaccattcaaccggcgatcgataacggcaaaggtgacatgtttctgaatccgaatcaggctgctggttacatggcgaaactgatctggaacgcagtgtccgggaccgtagtcgcagcagttgaggcgatgaactggctgaaaagtgcggcgaaattacttgctgctgaagtgaaggatcctaagacggatacagttctgcgtggccgctgcgcagtacattgggtgactcccgacggcttccctgtgtggcaggaatacaagaagcctattcagacgcgcttgaacctgatgttcctcggtcagttccgcttacagcctaccattaacaccaacaaagatagcgagattgatgcacacaaacaggagtctggtatcgctcctaactttgtacacagccaagacggtaaccaccttcgtatgactgtagtgtgggcacacgagaagtacggaatcgaatcttttgcactgattcacgactccttcggtaccattccggctgacgctgcgaacctgttcaaagcagtgcgcgaaactatggtttcgacatatgagtcttgtgatgtactggctgatttctacgaccagttcgctgaccagttgcacgagtctcaattggacaaaatgccagcacttccggctaaaggtaacttgaacctccgtgacatcttaaaatcggacttcgcgttcgcg

SEQ ID NO: 736 - protein, 890 aa, synthetic construct
  REGION 1..890: note = Variant of RNA polymerase
MHHHHHHMNTINIAKNDFSDIELAAIPFNTLADHYGERLAREQLALEHESYEMGEARFRKMFERQLKAGEVADNAAAKPLITTLLPKMIARINDWFEEVKAKRGKRPTAFQFLQEIKPEAVAYITIKTTLACLTSADNTTVQAVASAIGRAIEDEARFGRIRDLEAKHVKKNVEEQLNKRPGHVYKKAFIQVVEADMLSKGLLGGEAWSSWHKEDSIHVGVRCIEMLIESTGMVSLHRQNAGVVGQDSETIELAPEYAEAIATRAGALAGISPMFQPCVVPPKPWTGITGGGYWAAGRKPLQLVRTRSLAALRRYEEVSMPEVIKAVNIAQNTAWRINKKVLDVANAITQWQHCPVADVPAMDRGEMPARPLDIDTNEIALKAWKKEASAFYRKDKARVSRRLSMEFMLSQANKFANYNAIWFPQNMDWRGRVYAVPMFNPQGNDMTKGLLTFAQEKPIGEDGFYWLKIHGANTAGVDKVPFPQRIKFVEDNHTNIMECAKAPLENTWWAEQDSPFCFLAFCFEYAGVINHGLSYNCSLPLAFDGSCSGIQHFSAMLRDEIGGKAVNLLPSAEYQDIYRIVSDKVNEVLKQDLINGTSTTVETVTDKKTGEITQRTKYGTKVMAQWWLEHGVNRGVTKRSVMTLVYGSKEFGFRDQVLSDTIQPAIDNGKGDMFLNPNQAAGYMAKLIWNAVSGTVVAAVEAMNWLKSAAKLLAAEVKDPKTDTVLRGRCAVHWVTPDGFPVWQEYKKPIQTRLNLMFLGQFRLQPTINTNKDSEIDAHKQESGIAPNFVHSQDGNHLRMTVVWAHEKYGIESFALIHDSFGTIPADAANLFKAVRETMVSTYESCDVLADFYDQFADQLHESQLDKMPALPAKGNLNLRDILKSDFAFA

SEQ ID NO: 737 - DNA, 2670 bp, synthetic construct
  misc_feature 1..2670: note = Variant of RNA polymerase
  source 1..2670: mol_type = other DNA
atgcaccatcaccatcaccatatgaacacgattaacattgctaagaacgacttctctgacatcgaactggctgctatcccgttcaacactctggctgaccattacggtgagcgtttagctcgcgaacagttggcccttgagcatgagtcttacgagatgggtgaagcacgcttccgcaagatgtttgagcgtcaacttaaagctggtgaggttgcggataacgctgccgccaagcctctcatcactaccctactccctaagatgattgcacgcatcaacgactggtttgaggaagtgaaagctaagcgcggcaagcgcccgacagccttccagttcctgcaagaaatcaagccggaagccgtagcgtacatcaccattaagaccactctggcttgcctaaccagtgcggacaatacaaccgttcaggctgtagcaagcgcaatcggtcgggccattgaggacgaggctcgcttcggtcgtatccgtgaccttgaagctaagcacttcaagaaaaacgttgaggaacaactcaacaagcgcgtagggcacgtctacaagaaagcatttatgcaagttgtcgaggctgacatgctctctaagggtctactcggtggcgaggcgtggtcttcgtggcataaggaagactctattcatgtaggagtacgctgcatcgagatgctcattgagtcaaccggaatggttagcttacaccgccaaaatgctggcgtagtaggtcaagactctgagactatcgaactcgcacctgaatacgctgaggctatcgcaacccgtgcaggtgcgctggctggcatctctccgatgttccaaccttgcgtagttcctcctaagccgtggactggcattactggtggtggctattgggctgcggggcgcaaacccctgcagttagtacgtactcgcagtctggcggcgcttcgccgctatgaagaagtgtcgatgccggaggtcatcaaagcagtcaacattgcgcagaatacagcatggcgtattaacaagaaagttctcgacgtagcgaatgcaatcacccaatggcagcactgtccagtcgcggatgtgcctgcgatggatcgtggcgaaatgccagctcgtccgttggacatcgataccaacgagattgcacttaaagcgtggaagaaagaagcttccgcgttctaccgcaaagacaaagcacgcgttagccgtcgtctgtcaatggagtttatgttatctcaggcgaacaagtttgcgaattataaagcaatctggtttccgcaaaacatggattggcgtgggcgcgtgtacgctgtcccgatgttcaatcctcagggcaacgatatgacgaaaggcctgctgacctttgcgcaggagaaacccattggtgaagacggcttctattggctcaagattcatggcgcaaatacagctggagtggataaagtaccgtttccacaacgcatcaaatttgttgaggataaccatacgaatattatggaatgcgcgaaagcaccgctggaaaacacttggtgggcggaacaggactcgccgttctgttttctggcgttctgctttgagtatgctggcgtcatcaatcacggtctgtcgtacaactgtagcttgcctctggcatttgatggtagttgctccggcattcaacatttctcagcgatgttacgcgacgaaattggcggcaaagctgtgaatctcctcccatctgcggaataccaggatatttatcgtatcgtcagcgacaaagttaacgaggtactgaaacaagatctgattaacggtacctctaccaccgtggaaacggtgactgataagaagacaggcgaaattacccaacgcacgaaatacgggaccaaagttatggcacagtggtggttagaacacggtgtgaatcgtggcgtcacgaaacgctcggttatgactttggtgtatgggagcaaagagtttggattccgcgatcaagtgctgagtgacaccattcaaccggcgatcgataacggcaaaggtgacatgtttctgaatccgaatcaggctgctggttacatggcgaaactgatctggaacgcagtgtccgggaccgtagtcgcagcagttgaggcgatgaactggctgaaaagtgcggcgaaattacttgctgctgaagtgaaggatccaaagacgggcacagttctgcgtggccgctgcgcagtacattgggtgactcccgacggcttccctgtgtggcaggaatacaagaagcctattcagacgcgcttgaacctgatgttcctcggtcagttccgcttacagcctaccattaacaccaacaaagatagcgagattgatgcacacaaacaggagtctggtatcgctcctaactttgtacacagccaagacggtaaccaccttcgtatgactgtagtgtgggcacacgagaagtacggaatcgaatcttttgcactgattcacgactccttcggtaccattccggctgacgctgcgaacctgttcaaagcagtgcgcgaaactatggttgacacatatgagtcttgtgatgtactggctgatttctacgaccagttcgctgaccagttgcacgagtctcaactggacaaaatgccagcacttccggctaaaggtaacttgaacctccgtgacatcttaaaatcggacttcgcgttcgcg

SEQ ID NO: 738 - protein, 890 aa, synthetic construct
  REGION 1..890: note = Variant of RNA polymerase
MHHHHHHMNTINIAKNDFSDIELAAIPFNTLADHYGERLAREQLALEHESYEMGEARFRKMFERQLKAGEVADNAAAKPLITTLLPKMIARINDWFEEVKAKRGKRPTAFQFLQEIKPEAVAYITIKTTLACLTSADNTTVQAVASAIGRAIEDEARFGRIRDLEAKHFKKNVEEQLNKRVGHVYKKAFMQVVEADMLSKGLLGGEAWSSWHKEDSIHVGVRCIEMLIESTGMVSLHRQNAGVVGQDSETIELAPEYAEAIATRAGALAGISPMFQPCVVPPKPWTGITGGGYWAAGRKPLQLVRTRSLAALRRYEEVSMPEVIKAVNIAQNTAWRINKKVLDVANAITQWQHCPVADVPAMDRGEMPARPLDIDTNEIALKAWKKEASAFYRKDKARVSRRLSMEFMLSQANKFANYKAIWFPQNMDWRGRVYAVPMFNPQGNDMTKGLLTFAQEKPIGEDGFYWLKIHGANTAGVDKVPFPQRIKFVEDNHTNIMECAKAPLENTWWAEQDSPFCFLAFCFEYAGVINHGLSYNCSLPLAFDGSCSGIQHFSAMLRDEIGGKAVNLLPSAEYQDIYRIVSDKVNEVLKQDLINGTSTTVETVTDKKTGEITQRTKYGTKVMAQWWLEHGVNRGVTKRSVMTLVYGSKEFGFRDQVLSDTIQPAIDNGKGDMFLNPNQAAGYMAKLIWNAVSGTVVAAVEAMNWLKSAAKLLAAEVKDPKTGTVLRGRCAVHWVTPDGFPVWQEYKKPIQTRLNLMFLGQFRLQPTINTNKDSEIDAHKQESGIAPNFVHSQDGNHLRMTVVWAHEKYGIESFALIHDSFGTIPADAANLFKAVRETMVDTYESCDVLADFYDQFADQLHESQLDKMPALPAKGNLNLRDILKSDFAFA

SEQ ID NO: 739 - DNA, 2670 bp, synthetic construct
  misc_feature 1..2670: note = Variant of RNA polymerase
  source 1..2670: mol_type = other DNA
atgcaccatcaccatcaccatatgaacacgattaacattgctaagaacgacttctctgacatcgaactggctgctatcccgttcaacactctggctgaccattacggtgagcgtttagctcgcgaacagttggcccttgagcatgagtcttacgagatgggtgaagcacgcttccgcaagatgtttgagcgtcaacttaaagctggtgaggttgcggataacgctgccgccaagcctctcatcactaccctactccctaagatgattgcacgcatcaacgactggtttgaggaagtgaaagctaagcgcggcaagcgcccgacagccttccagttcctgcaagaaatcaagccggaagccgtagcgtacatcaccattaagaccactctggcttgcctaaccagtgcggacaatacaaccgttcaggctgtagcaagcgcaatcggtcgggccattgaggacgaggctcgcttcggtcgtatccgtgaccttgaagctaagcacttcaagaaaaatgttgaggaacaactcaacaagcgcgtagggcacgtgtacaagaaagcatttatgcaagttgtcgaggctgacatgctctctaagggtctactcggtggcgaggcgtggtcttcgtggcataaggaagactctattcatgtaggagtacgctgcatcgagatgctcattgagtcaaccggaatggttagcttacaccgccaaaatgctggcgtagtaggtcaagactctgagactatcgaactcgcacctgaatacgctgaggctatcgcaacccgtgcaggtgcgctggctggcatctctccgatgttccaaccttgcgtagttcctcctaagccgtggactggcattactggtggtggctattgggctgcggggcgcaaacccctgcagttagtacgtactcgcagtctggcggcgcttcgccgctatgaagaagtgtcgatgccggaggtcatcaaagcagtcaacattgcgcagaatacagcatggcgtattaacaagaaagttctcgacgtagcgaataccatcacccaatggcagcactgtccagtcgcggatgtgcctgcgatggatcgtggcgaaatgccagctcgtccgttggacatcgataccaacgagattgcacttaaagcgtggaagaaagaagcttccgcgttctaccgcaaagacaaagcacgcgttagccgtcgtctgtcaatggagtttatgttatctcaggcgaacaagtttgcgaatgagaaagcaatctggtttccgcaaaacatggattggcgtgggcgcgtgtacgctgtcccgatgttcaatcctcagggcaacgatatgacgaaaggcctgctgacctttgcgcaggagaaacccattggtgaagacggcttctattggctcaagattcatggcgcaaatacagctggagtggataaagtaccgtttccacaacgcatcaaatttgttgaggataaccatacgaatattatggaatgcgcgaaagcaccgctggaaaacacttggtgggcggaacaggactcgccgttctgttttctggcgttctgctttgagtatgctggcgtcatcaatcatggtctgtcgtacaactgtagcttgcctctggcatttgatggtagttgctccggcattcaacatttctcagcgatgttacgcgacgaaattggcgccaaagctgtgaatctcctcccatctgcggaataccaggatatttatcgtatcgtcagcgacaaagttaacgaggtactgaaacaagatctgattaacggtacctctaccaccgtggaaacggtgactgataagaagacaggcgaaattacccaacgcacgaaatacgggaccaaagttatggcacagtggtggttagaacacggtgtgaatcgtggcgtcacgaaacgctcggttatgactttggtgtatgggagcaaagagtttggattccgcgatcaagtgctgagtgacaccattcaaccggcgatcgataacggcaaaggtgacatgtttctgaatccgaatcaggctgctggttacatggcgaaactgatctggaacgcagtgtccgggaccgtagtcgcagcagttgaggcgatgaactggctgaaaagtgcggcgaaattacttgctgctgaagtgaaggatcctaagacggatacagttctgcgtggccgctgcgcagtacattgggtgactcccgacggcttccctgtgtggcaggaatacaagaagcctattcagacgcgcttgaacctgatgttcctcggtcagttccgcttacagcctaccattaacaccaacaaagatagcgagattgatgcacacaaacaggagtctggtatcgctcctaactttgtacacagccaagacggtaaccaccttcgtatgactgtagtgtgggcacacgagaagtacggaatcgaatcttttgcactgattcacgactccttcggtaccattccggctgacgctgcgaacctgttcaaagcagtgcgcgaaactatggtttcgacatatgagtcttgtgatgtactggctgatttctacgaccagttcgctgaccagttgcacgagtctcaattggacaaaatgccagcacttccggctaaaggtaacttgaacctccgtgacatcttaaaatcggacttcgcgttcgcg

SEQ ID NO: 740 - protein, 890 aa, synthetic construct
  REGION 1..890: note = Variant of RNA polymerase
MHHHHHHMNTINIAKNDFSDIELAAIPFNTLADHYGERLAREQLALEHESYEMGEARFRKMFERQLKAGEVADNAAAKPLITTLLPKMIARINDWFEEVKAKRGKRPTAFQFLQEIKPEAVAYITIKTTLACLTSADNTTVQAVASAIGRAIEDEARFGRIRDLEAKHFKKNVEEQLNKRVGHVYKKAFMQVVEADMLSKGLLGGEAWSSWHKEDSIHVGVRCIEMLIESTGMVSLHRQNAGVVGQDSETIELAPEYAEAIATRAGALAGISPMFQPCVVPPKPWTGITGGGYWAAGRKPLQLVRTRSLAALRRYEEVSMPEVIKAVNIAQNTAWRINKKVLDVANTITQWQHCPVADVPAMDRGEMPARPLDIDTNEIALKAWKKEASAFYRKDKARVSRRLSMEFMLSQANKFANEKAIWFPQNMDWRGRVYAVPMFNPQGNDMTKGLLTFAQEKPIGEDGFYWLKIHGANTAGVDKVPFPQRIKFVEDNHTNIMECAKAPLENTWWAEQDSPFCFLAFCFEYAGVINHGLSYNCSLPLAFDGSCSGIQHFSAMLRDEIGAKAVNLLPSAEYQDIYRIVSDKVNEVLKQDLINGTSTTVETVTDKKTGEITQRTKYGTKVMAQWWLEHGVNRGVTKRSVMTLVYGSKEFGFRDQVLSDTIQPAIDNGKGDMFLNPNQAAGYMAKLIWNAVSGTVVAAVEAMNWLKSAAKLLAAEVKDPKTDTVLRGRCAVHWVTPDGFPVWQEYKKPIQTRLNLMFLGQFRLQPTINTNKDSEIDAHKQESGIAPNFVHSQDGNHLRMTVVWAHEKYGIESFALIHDSFGTIPADAANLFKAVRETMVSTYESCDVLADFYDQFADQLHESQLDKMPALPAKGNLNLRDILKSDFAFA

SEQ ID NO: 741 - DNA, 2670 bp, synthetic construct
  misc_feature 1..2670: note = Variant of RNA polymerase
  source 1..2670: mol_type = other DNA
atgcaccatcaccatcaccatatgaacacgattaacattgctaagaacgacttctctgacatcgaactggctgctatcccgttcaacactctggctgaccattacggtgagcgtttagctcgcgaacagttggcccttgagcatgagtcttacgagatgggtgaagcacgcttccgcaagatgtttgagcgtcaacttaaagctggtgaggttgcggataacgctgccgccaagcctctcatcactaccctactccctaagatgattgcacgcatcaacgactggtttgaggaagtgaaagctaagcgcggcaagcgcccgacagccttccagttcctgcaagaaatcaagccggaagccgtagcgtacatcaccattaagaccactctggcttgcctaaccagtgcggacaatacaaccgttcaggctgtagcaagcgcaatcggtcgggccattgaggacgaggctcgcttcggtcgtatccgtgaccttgaagctaagcacttcaagaagaacgttgaggaacaactcaacaagcgcgtagggcacgtctaccaaaaagcatttatgcaagttgtcgaggctgacgtgctctctacgggtctactcggtggcgaggcgtggtcttcgtggcataaggaagactctattcatgtaggagtacgctgcatcgagatgctcattgagtcaaccggaatggttagcttacaccgccaaaatgctggcgtagtaggtcaagactctgagactatcgaactcgcacctgagtacgctgaggctatcgcaacccgtgcaggtgcgctggctggcatctctccgatgttccaaccttgcgtagttcctcctaagccgtggactggcattactggtggtggctattgggctgcggggcgcaaacccctgcagttagtacgtactcgcagtctggcggcgcttcgccgctatgaagaagtgtcgatgccggaggtcatcaaagcagtcaacattgcgcagaatacagcatggcgtattaacaagaaagttctcgacgtagcgaatgccatcacccaatggcagcactgtccagtcgcggatgtgcctgcgatggatcgtggcgaaatgccagctcgtccgttggacatcgataccaacgagattgcacttaaagcgtggaagaaagaagcttccgcgttctaccgcaaagacaaagcacgcgttagccgtcgtctgtcaatggagtttatgttatctcaggcgaacaagtttgcgaattataaagcaatctggtttccgcaaaacatggattggcgtgggcgcgtgtacgctgtcccgatgttcaatcctcagggcaacgatatgacgaaaggcctgctgacctttgcgcaggagaaacccattggtgaagacggcttctattggctcaagattcatggcgcaaatacagctggagtggataaagtaccgtttccacaacgcatcaaatttgttgaggataaccatacgaatattatggaatgcgcgaaagcaccgctggaaaacacttggtgggcggaacaggactcgccgttctgttttctggcgttctgctttgagtatgctggcgtcatcaatcatggtctgtcgtacaactgtagcttgcctctggcatttgatggtagttgctccggcctgcaacatttctcagcgatgttacgcgacgaaattggcggcaaagctgtgaatctcctcccatctgcggaataccaggatatttatcgtatcgtcagcgacaaagttaacgaggtgctgaaacaagatctgattaacggtacctctaccaccgtggaaacggtgactgataagaagacaggcgaaattacccaacgcacgaaatacgggaccaaagttatggcacagtggtggttagaacacggtgtgaatcgtggcgtcacgaaacgctcggttatgactttggtgtatgggagcaaagagtttggattccgcgatcaagtgctgagtgacaccattcaaccggcgatcgataacggcaaaggtgacatgtttctgaatccgaatcaggctgctggttacatggcgaaactgatctggaacgcagtgtccgggaccgtagtcgcagcagttgaggcgatgaactggctgaaaagtgcggcgaaattacttgctgctgaagtgaaggatcctaagacggatacagttctgcgtggccgctgcgcagtacattgggtgactcccgacggcttccctgtgtggcaggaatacaagaagcctattcagacgcgcttgaacctgatgttcctcggtcagttccgcttacagcctaccattaacaccaacaaagatagcgagattgatgcacacaaacaggagtctggtatcgctcctaactttgtacacagccaagacggtaaccaccttcgtatgactgtagtgtgggcacacgagaagtacggaatcgaatcttttgcactgattcacgactccttcggtaccattccggctgacgctgcgaacctgttcaaagcagtgcgcgaaactatggtttcgacatatgagtcttgtgatgtactggctgatttctacgaccagttcgctgaccagttgcacgagtctcaattggacaaaatgccagcacttccggctaaaggtaacttgaacctccgtgacatcttaaaatcggacttcgcgttcgcg

SEQ ID NO: 742 - protein, 890 aa, synthetic construct
  REGION 1..890: note = Variant of RNA polymerase
MHHHHHHMNTINIAKNDFSDIELAAIPFNTLADHYGERLAREQLALEHESYEMGEARFRKMFERQLKAGEVADNAAAKPLITTLLPKMIARINDWFEEVKAKRGKRPTAFQFLQEIKPEAVAYITIKTTLACLTSADNTTVQAVASAIGRAIEDEARFGRIRDLEAKHFKKNVEEQLNKRVGHVYQKAFMQVVEADVLSTGLLGGEAWSSWHKEDSIHVGVRCIEMLIESTGMVSLHRQNAGVVGQDSETIELAPEYAEAIATRAGALAGISPMFQPCVVPPKPWTGITGGGYWAAGRKPLQLVRTRSLAALRRYEEVSMPEVIKAVNIAQNTAWRINKKVLDVANAITQWQHCPVADVPAMDRGEMPARPLDIDTNEIALKAWKKEASAFYRKDKARVSRRLSMEFMLSQANKFANYKAIWFPQNMDWRGRVYAVPMFNPQGNDMTKGLLTFAQEKPIGEDGFYWLKIHGANTAGVDKVPFPQRIKFVEDNHTNIMECAKAPLENTWWAEQDSPFCFLAFCFEYAGVINHGLSYNCSLPLAFDGSCSGLQHFSAMLRDEIGGKAVNLLPSAEYQDIYRIVSDKVNEVLKQDLINGTSTTVETVTDKKTGEITQRTKYGTKVMAQWWLEHGVNRGVTKRSVMTLVYGSKEFGFRDQVLSDTIQPAIDNGKGDMFLNPNQAAGYMAKLIWNAVSGTVVAAVEAMNWLKSAAKLLAAEVKDPKTDTVLRGRCAVHWVTPDGFPVWQEYKKPIQTRLNLMFLGQFRLQPTINTNKDSEIDAHKQESGIAPNFVHSQDGNHLRMTVVWAHEKYGIESFALIHDSFGTIPADAANLFKAVRETMVSTYESCDVLADFYDQFADQLHESQLDKMPALPAKGNLNLRDILKSDFAFA

SEQ ID NO: 743 - DNA, 2670 bp, synthetic construct
  misc_feature 1..2670: note = Variant of RNA polymerase
  source 1..2670: mol_type = other DNA
atgcaccatcaccatcaccatatgaacacgattaacattgctaagaacgacttctctgacatcgaactggctgctatcccgttcaacactctggctgaccattacggtgagcgtttagctcgcgaacagttggcccttgagcatgagtcttacgagatgggtgaagcacgcttccgcaagatgtttgagcgtcaacttaaagctggtgaggttgcggataacgctgccgccaagcctctcatcactaccctactccctaagatgattgcacgcatcaacgactggtttgaggaagtgaaagctaagcgcggcaagcgcccgacagccttccagttcctgcaagaaatcaagccggaagccgtagcgtacatcaccattaagaccactctggcttgcctaaccagtgcggacaatacaaccgttcaggctgtagcaagcgcaatcggtcgggccattgaggacgaggctcgcttcggtcgtatccgtgaccttgaagctaagcacttcaagaaaaatgttgaggaacaactcaacaagcgcgtagggcacgtctacaagaaagcatttatgcaagttgtcgaggctgacatgctctctaagggtctactcggtggcgaggcgtggtcttcgtggcataaggaagactctattcatgtaggagtacgctgcatcgagatgctcattgagtcaaccggaatggttagcttacaccgccaaaatgctggcgtagtaggtcaagactctgagactatcgaactcgcacctgaatacgctgaggctatcgcaacccgtgcaggtgcgctggctggcatctctccgatgttccaaccttgcgtagttcctcctaagccgtggactggcattactggtggtggctattgggctgcggggcgcaaacccctgcagttagtacgtactcgcagtctggcggcgcttcgccgctatgaagaagtgtcgatgccggaggtcatcaaagcagtcaacattgcgcagaatacagcatggcgtattaacaagaaagttctcgacgtagcgaataccatcacccaatggcagcactgtccagtcgcggatgtgcctgcgatggatcgtggcgaaatgccagctcgtccgttggacatcgataccaacgagattgcacttaaagcgtggaagaaagaagcttccgcgttctaccgcaaagacaaagcacgcgttagccgtcgtctgtcaatggagtttatgttatctcaggcgaacaagtttgcgaattataaagcaatctggtttccgcaaaacatggattggcgtgggcgcgtgtacgctgtcccgatgttcaatcctcagggcaacgatatgacgaaaggcctgctgacctttgcgcaggagaaacccattggtgaagacggcttctattggctcaagattcatggcgcaaatacagctggagtggataaagtaccgtttccacaacgcatcaaatttgttgaggataaccatacgaatattatggaatgcgcgaaagcaccgctggaaaacacttggtgggcggaacaggactcgccgttctgttttctggcgttctgctttgagtatgctggcgtcatcaatcatggtctgtcgtacaactgtagcttgcctctggcatttgatggtagttgctccggcctgcaacatttctcagcgatgttacgcgacgaaattggcggcaaagctgtgaatctcctcccatctgcggaataccaggatatttatcgtatcgtcagcgacaaagttaacgaggtactgaaacaagatctgattaacggtacctctaccaccgtggaaacggtgactgataagaagacaggcgaaattacccaacgcacgaaatacgggaccaaagttatggcacagtggtggttagaacacggtgtgaatcgtggcgtcacgaaacgctcggttatgactttggtgtatgggagcaaagagtttggattccgcgatcaagtgctgagtgacaccattcaaccggcgatcgataacggcaaaggtgacatgtttctgaatccgaatcaggctgctggttacatggcgaaactgatctggaacgcagtgtccgggaccgtagtcgcagcagttgaggcgatgaactggctgaaaagtgcggcgaaattacttgctgctgaagtgaaggatcctaagacggatacagttctgcgtggccgctgcgcagtacattgggtgactcccgacggcttccctgtgtggcaggaatacaagaagcctattcagacgcgcttgaacctgatgttcctcggtcagttccgcttacagcctaccattaacaccaacaaagatagcgagattgatgcacacaaacaggagtctggtatcgctcctaactttgtacacagccaagacggtaaccaccttcgtatgactgtagtgtgggcacacgagaagtacggaatcgaatcttttgcactgattcacgactccttcggtaccattccggctgacgctgcgaacctgttcaaagcagtgcgcgaaactatggtttcgacatatgagtcttgtgatgtactggctgatttctacgaccagttcgctgaccagttgcacgagtctcaattggacaaaatgccagcacttccggctaaaggtaacttgaacctccgtgacatcttaaaatcggacttcgcgttcgcg

SEQ ID NO: 744 - protein, 890 aa, synthetic construct
  REGION 1..890: note = Variant of RNA polymerase
MHHHHHHMNTINIAKNDFSDIELAAIPFNTLADHYGERLAREQLALEHESYEMGEARFRKMFERQLKAGEVADNAAAKPLITTLLPKMIARINDWFEEVKAKRGKRPTAFQFLQEIKPEAVAYITIKTTLACLTSADNTTVQAVASAIGRAIEDEARFGRIRDLEAKHFKKNVEEQLNKRVGHVYKKAFMQVVEADMLSKGLLGGEAWSSWHKEDSIHVGVRCIEMLIESTGMVSLHRQNAGVVGQDSETIELAPEYAEAIATRAGALAGISPMFQPCVVPPKPWTGITGGGYWAAGRKPLQLVRTRSLAALRRYEEVSMPEVIKAVNIAQNTAWRINKKVLDVANTITQWQHCPVADVPAMDRGEMPARPLDIDTNEIALKAWKKEASAFYRKDKARVSRRLSMEFMLSQANKFANYKAIWFPQNMDWRGRVYAVPMFNPQGNDMTKGLLTFAQEKPIGEDGFYWLKIHGANTAGVDKVPFPQRIKFVEDNHTNIMECAKAPLENTWWAEQDSPFCFLAFCFEYAGVINHGLSYNCSLPLAFDGSCSGLQHFSAMLRDEIGGKAVNLLPSAEYQDIYRIVSDKVNEVLKQDLINGTSTTVETVTDKKTGEITQRTKYGTKVMAQWWLEHGVNRGVTKRSVMTLVYGSKEFGFRDQVLSDTIQPAIDNGKGDMFLNPNQAAGYMAKLIWNAVSGTVVAAVEAMNWLKSAAKLLAAEVKDPKTDTVLRGRCAVHWVTPDGFPVWQEYKKPIQTRLNLMFLGQFRLQPTINTNKDSEIDAHKQESGIAPNFVHSQDGNHLRMTVVWAHEKYGIESFALIHDSFGTIPADAANLFKAVRETMVSTYESCDVLADFYDQFADQLHESQLDKMPALPAKGNLNLRDILKSDFAFA

SEQ ID NO: 745 - DNA, 2670 bp, synthetic construct
  misc_feature 1..2670: note = Variant of RNA polymerase
  source 1..2670: mol_type = other DNA
atgcaccatcaccatcaccatatgaacacgattaacattgctaagaacgacttctctgacatcgaactggctgctatcccgttcaacactctggctgaccattacggtgagcgtttagctcgcgaacagttggcccttgagcatgagtcttacgagatgggtgaagcacgcttccgcaagatgtttgagcgtcaacttaaagctggtgaggttgcggataacgctgccgccaagcctctcatcactaccctactccctaagatgattgcacgcatcaacgactggtttgaggaagtgaaagctaagcgcggcaagcgcccgacagccttccagttcctgcaagaaatcaagccggaagccgtagcgtacatcaccattaagaccactctggcttgcctaaccagtgcggacaatacaaccgttcaggctgtagcaagcgcaatcggtcgggccattgaggacgaggctcgcttcggtcgtatccgtgaccttgaagctaagcacttcaagaaaattgttgaggaacaactcaacaagcgcgtagggcacgtgtacaagaaagcatttatgcaagttgtcgaggctgacatgctctctacgggtctactcggtggcgaggcgtggtcttcgtggcataaggaagactctattcatgtaggagtacgctgcatcgagatgctcattgagtcaaccggaatggttagcttacaccgccaaaatgctggcgtagtaggtcaagactctgagactatcgaactcgcacctgaatacgctgaggctatcgcaacccgtgcaggtgcgctggctggcatctctccgatgttccaaccttgcgtagttcctcctaagccgtggactggcattactggtggtggctattgggctgcggggcgcaaacccctgcagttagtacgtactcgcagtctggcggcgcttcgccgctatgaagaagtgtcgatgccggaggtcatcaaagcagtcaacattgcgcagaatacagcatggcgtattaacaagaaagttctcgacgtagcgaatgccatcacccaatggcagcactgtccagtcgcggatgtgcctgcgatggatcgtggcgaaatgccagctcgtccgttggacatcgataccaacgagattgcacttaaagcgtggaagaaagaagcttccgcgttctaccgcaaagacaaagcacgcgttagccgtcgtctgtcaatggagtttatgttatctcaggcgaacaagtttgcgaattataaagcaatctggtttccgcaaaacatggattggcgtgggcgcgtgtacgctgtcccgatgttcaatcctcagggcaacgatatgacgaaaggcctgctgacctttgcgcaggagaaacccattggtgaagacggcttctattggctcaagattcatggcgcaaatacagctggagtggataaagtaccgtttccacaacgcatcaaatttgttgaggataaccatacgaatattatggaatgcgcgaaagcaccgctggaaaacacttggtgggcggaacaggactcgccgttctgttttctggcgttctgctttgagtatgctggcgtcatcaatcatggtctgtcgtacaactgtagcttgcctctggcatttgatggtagttgctccggcatccaacatttctcagcgatgttacgcgacgaaattggcggcaaagctgtgaatctcctcccatctgcggaataccaggatatttatcgtatcgtcagcgacaaagttaacgaggcgctgaaacaagatctgattaacggtacctctaccaccgtggaaacggtgactgataagaagacaggcgaaattacccaacgcacgaaatacgggaccaaagttatggcacagtggtggttagaacacggtgtgaatcgtggcgtcacgaaacgctcggttatgactttggtgtatgggagcaaagagtttggattccgcgatcaagtgctgagtgacaccattcaaccggcgatcgataacggcaaaggtgacatgtttctgaatccgaatcaggctgctggttacatggcgaaactgatctggaacgcagtgtccgggaccgtagtcgcagcagttgaggcgatgaactggctgaaaagtgcggcgaaattacttgctgctgaagtgaaggatcctaagacggatacagttctgcgtggccgctgcgcagtacattgggtgactcccgacggcttccctgtgtggcaggaatacaagaagcctattcagacgcgcttgaacctgatgttcctcggtcagttccgcttacagcctaccattaacaccaacaaagatagcgagattgatgcacacaaacaggagtctggtatcgctcctaactttgtacacagccaagacggtaaccaccttcgtatgactgtagtgtgggcacacgagaagtacggaatcgaatcttttgcactgattcacgactccttcggtaccattccggctgacgctgcgaacctgttcaaagcagtgcgcgaaactatggtttcgacatatgagtcttgtgatgtactggctgatttctacgaccagttcgctgaccagttgcacgagtctcaattggacaaaatgccagcacttccggctaaaggtaacttgaacctccgtgacatcttaaaatcggacttcgcgttcgcg

SEQ ID NO: 746 - protein, 890 aa, synthetic construct
  REGION 1..890: note = Variant of RNA polymerase
MHHHHHHMNTINIAKNDFSDIELAAIPFNTLADHYGERLAREQLALEHESYEMGEARFRKMFERQLKAGEVADNAAAKPLITTLLPKMIARINDWFEEVKAKRGKRPTAFQFLQEIKPEAVAYITIKTTLACLTSADNTTVQAVASAIGRAIEDEARFGRIRDLEAKHFKKIVEEQLNKRVGHVYKKAFMQVVEADMLSTGLLGGEAWSSWHKEDSIHVGVRCIEMLIESTGMVSLHRQNAGVVGQDSETIELAPEYAEAIATRAGALAGISPMFQPCVVPPKPWTGITGGGYWAAGRKPLQLVRTRSLAALRRYEEVSMPEVIKAVNIAQNTAWRINKKVLDVANAITQWQHCPVADVPAMDRGEMPARPLDIDTNEIALKAWKKEASAFYRKDKARVSRRLSMEFMLSQANKFANYKAIWFPQNMDWRGRVYAVPMFNPQGNDMTKGLLTFAQEKPIGEDGFYWLKIHGANTAGVDKVPFPQRIKFVEDNHTNIMECAKAPLENTWWAEQDSPFCFLAFCFEYAGVINHGLSYNCSLPLAFDGSCSGIQHFSAMLRDEIGGKAVNLLPSAEYQDIYRIVSDKVNEALKQDLINGTSTTVETVTDKKTGEITQRTKYGTKVMAQWWLEHGVNRGVTKRSVMTLVYGSKEFGFRDQVLSDTIQPAIDNGKGDMFLNPNQAAGYMAKLIWNAVSGTVVAAVEAMNWLKSAAKLLAAEVKDPKTDTVLRGRCAVHWVTPDGFPVWQEYKKPIQTRLNLMFLGQFRLQPTINTNKDSEIDAHKQESGIAPNFVHSQDGNHLRMTVVWAHEKYGIESFALIHDSFGTIPADAANLFKAVRETMVSTYESCDVLADFYDQFADQLHESQLDKMPALPAKGNLNLRDILKSDFAFA

SEQ ID NO: 747 - DNA, 2670 bp, synthetic construct
  misc_feature 1..2670: note = Variant of RNA polymerase
  source 1..2670: mol_type = other DNA
atgcaccatcaccatcaccatatgaacacgattaacattgctaagaacgacttctctgacatcgaactggctgctatcccgttcaacactctggctgaccattacggtgagcgtttagctcgcgaacagttggcccttgagcatgagtcttacgagatgggtgaagcacgcttccgcaagatgtttgagcgtcaacttaaagctggtgaggttgcggataacgctgccgccaagcctctcatcactaccctactccctaagatgattgcacgcatcaacgactggtttgaggaagtgaaagctaagcgcggcaagcgcccgacagccttccagttcctgcaagaaatcaagccggaagccgtagcgtacatcaccattaagaccactctggcttgcctaaccagtgcggacaatacaaccgttcaggctgtagcaagcgcaatcggtcgggccattgaggacgaggctcgcttcggtcgtatccgtgaccttgaagctaagcacttcaagaagaacgttgaggaacaactcaacaagcgcgtagggcacgtctaccaaaaagcatttatgcaagttgtcgaggctgacatgctctctaagggtctactcggtggcgaggcgtggtcttcgtggcataaggaagactctattcatgtaggagtacgctgcatcgagatgctcattgagtcaaccggaatggttagcttacaccgccaaaatgctggcgtagtaggtcaagactctgagactatcgaactcgcacctgaatacgctgaggctatcgcaacccgtgcaggtgcgctggctggcatctctccgatgttccaaccttgcgtagttcctcctaagccgtggactggcattactggtggtggctattgggctgcggggcgcaaacccctgcagttagtacgtactcgcagtctggcggcgcttcgccgctatgaagaagtgtcgatgccggaggtcatcaaagcagtcaacattgcgcagaatacagcatggcgtattaacaagaaagttctcgacgtagcgaatgccatcacccaatggcagcactgtccagtcgcggatgtgcctgcgatggatcgtggcgaaatgccagctcgtccgttggacatcgataccaacgagattgcacttaaagcgtggaagaaagaagcttccgcgttctaccgcaaagacaaagcacgcgttagccgtcgtctgtcaatggagtttatgttatctcaggcgaacaagtttgcgaattataaagcaatctggtttccgcaaaacatggattggcgtgggcgcgtgtacgctgtcccgatgttcaatcctcagggcaacgatatgacgaaaggcctgctgacctttgcgcaggagaaacccattggtgaagacggcttctattggctcaagattcatggcgcaaatacagctggagtggataaagtaccgtttccacaacgcatcaaatttgttgaggataaccatacgaatattatggaatgcgcgaaagcaccgctggaaaacacttggtgggcggaacaggactcgccgttctgttttctggcgttctgctttgagtatgctggcgtcatcaatcacggtctgtcgtacaactgtagcttgcctctggcatttgatggtagttgctccggcattcaacatttctcagcgatgttacgcgacgaaattggcgccaaagctgtgaatctcctcccatctgcggaataccaggatatttatcgtatcgtcagcgacaaagttaacgaggtactgaaacaagatctgattaacggtacctctaccaccgtggaaacggtgactgataagaagacaggcgaaattacccaacgcacgaaatacgggaccaaagttatggcacagtggtggttagaacacggtgtgaatcgtggcgtcacgaaacgctcggttatgactttggtgtatgggagcaaagagtttggattccgcgatcaagtgctgagtgacaccattcaaccggcgatcgataacggcaaaggtgacatgtttctgaatccgaatcaggctgctggttacatggcgaaactgatctggaacgcagtgtccgggaccgtagtcgcagcagttgaggcgatgaactggctgaaaagtgcggcgaaattacttgctgctgaagtgaaggatcctaagacggatacagttctgcgtggccgctgcgcagtacattgggtgactcccgacggcttccctgtgtggcaggaatacaagaagcctattcagacgcgcttgaacctgatgttcctcggtcagttccgcttacagcctaccattaacaccaacaaagatagcgagattgatgcacacaaacaggagtctggtatcgctcctaactttgtacacagccaagacggtaaccaccttcgtatgactgtagtgtgggcacacgagaagtacggaatcgaatcttttgcactgattcacgactccttcggtaccattccggctgacgctgcgaacctgttcaaagcagtgcgcgaaactatggtttcgacatatgagtcttgtgatgtactggctgatttctacgaccagttcgctgaccagttgcacgagtctcaattggacaaaatgccagcacttccggctaaaggtaacttgaacctccgtgacatcttaaaatcggacttcgcgttcgcg

SEQ ID NO: 748 - protein, 890 aa, synthetic construct
  REGION 1..890: note = Variant of RNA polymerase
MHHHHHHMNTINIAKNDFSDIELAAIPFNTLADHYGERLAREQLALEHESYEMGEARFRKMFERQLKAGEVADNAAAKPLITTLLPKMIARINDWFEEVKAKRGKRPTAFQFLQEIKPEAVAYITIKTTLACLTSADNTTVQAVASAIGRAIEDEARFGRIRDLEAKHFKKNVEEQLNKRVGHVYQKAFMQVVEADMLSKGLLGGEAWSSWHKEDSIHVGVRCIEMLIESTGMVSLHRQNAGVVGQDSETIELAPEYAEAIATRAGALAGISPMFQPCVVPPKPWTGITGGGYWAAGRKPLQLVRTRSLAALRRYEEVSMPEVIKAVNIAQNTAWRINKKVLDVANAITQWQHCPVADVPAMDRGEMPARPLDIDTNEIALKAWKKEASAFYRKDKARVSRRLSMEFMLSQANKFANYKAIWFPQNMDWRGRVYAVPMFNPQGNDMTKGLLTFAQEKPIGEDGFYWLKIHGANTAGVDKVPFPQRIKFVEDNHTNIMECAKAPLENTWWAEQDSPFCFLAFCFEYAGVINHGLSYNCSLPLAFDGSCSGIQHFSAMLRDEIGAKAVNLLPSAEYQDIYRIVSDKVNEVLKQDLINGTSTTVETVTDKKTGEITQRTKYGTKVMAQWWLEHGVNRGVTKRSVMTLVYGSKEFGFRDQVLSDTIQPAIDNGKGDMFLNPNQAAGYMAKLIWNAVSGTVVAAVEAMNWLKSAAKLLAAEVKDPKTDTVLRGRCAVHWVTPDGFPVWQEYKKPIQTRLNLMFLGQFRLQPTINTNKDSEIDAHKQESGIAPNFVHSQDGNHLRMTVVWAHEKYGIESFALIHDSFGTIPADAANLFKAVRETMVSTYESCDVLADFYDQFADQLHESQLDKMPALPAKGNLNLRDILKSDFAFA

SEQ ID NO: 749 - DNA, 2670 bp, synthetic construct
  misc_feature 1..2670: note = Variant of RNA polymerase
  source 1..2670: mol_type = other DNA
atgcaccatcaccatcaccatatgaacacgattaacattgctaagaacgacttctctgacatcgaactggctgctatcccgttcaacactctggctgaccattacggtgagcgtttagctcgcgaacagttggcccttgagcatgagtcttacgagatgggtgaagcacgcttccgcaagatgtttgagcgtcaacttaaagctggtgaggttgcggataacgctgccgccaagcctctcatcactaccctactccctaagatgattgcacgcatcaacgactggtttgaggaagtgaaagctaagcgcggcaagcgcccgacagccttccagttcctgcaagaaatcaagccggaagccgtagcgtacatcaccattaagaccactctggcttgcctaaccagtgcggacaatacaaccgttcaggctgtagcaagcgcaatcggtcgggccattgaggacgaggctcgcttcggtcgtatccgtgaccttgaagctaagcacttcaagaaaattgttgaggaacaactcaacaagcgcgtagggcacgtctaccaaaaagcatttatgcaagttgtcgaggctgacatgctctctaagggtctactcggtggcgaggcgtggtcttcgtggcataaggaagactctattcatgtaggagtacgctgcatcgagatgctcattgagtcaaccggaatggttagcttacaccgccaaaatgctggcgtagtaggtcaagactctgagactatcgaactcgcacctgaatacgctgaggctatcgcaacccgtgcaggtgcgctggctggcatctctccgatgttccaaccttgcgtagttcctcctaagccgtggactggcattactggtggtggctattgggctgcggggcgcaaacccctgcagttagtacgtactcgcagtctggcggcgcttcgccgctatgaagaagtgtcgatgccggaggtcatcaaagcagtcaacattgcgcagaatacagcatggcgtattaacaagaaagttctcgacgtagcgaataccatcacccaatggcagcactgtccagtcgcggatgtgcctgcgatggatcgtggcgaaatgccagctcgtccgttggacatcgataccaacgagattgcacttaaagcgtggaagaaagaagcttccgcgttctaccgcaaagacaaagcacgcgttagccgtcgtctgtcaatggagtttatgttatctcaggcgaacaagtttgcgaattataaagcaatctggtttccgcaaaacatggattggcgtgggcgcgtgtacgctgtcccgatgttcaatcctcagggcaacgatatgacgaaaggcctgctgacctttgcgcaggagaaacccattggtgaagacggcttctattggctcaagattcatggcgcaaatacagctggagtggataaagtaccgtttccacaacgcatcaaatttgttgaggataaccatacgaatattatggaatgcgcgaaagcaccgctggaaaacacttggtgggcggaacaggactcgccgttctgttttctggcgttctgctttgagtatgctggcgtcatcaatagtggtctgtcgtacaactgtagcttgcctctggcatttgatggtagttgctccggcattcaacatttctcagcgatgttacgcgacgaaattggcggcaaagctgtgaatctcctcccatctgcggaataccaggatatttatcgtatcgtcagcgacaaagttaacgagcgtctgaaacaagatctgattaacggtacctctaccaccgtggaaacggtgactgataagaagacaggcgaaattacccaacgcacgaaatacgggaccaaagttatggcacagtggtggttagaacacggtgtgaatcgtggcgtcacgaaacgctcggttatgactttggtgtatgggagcaaagagtttggattccgcgatcaagtgctgagtgacaccattcaaccggcgatcgataacggcaaaggtgacatgtttctgaatccgaatcaggctgctggttacatggcgaaactgatctggaacgcagtgtccgggaccgtagtcgcagcagttgaggcgatgaactggctgaaaagtgcggcgaaattacttgctgctgaagtgaaggatcctaagacggatacagttctgcgtggccgctgcgcagtacattgggtgactcccgacggcttccctgtgtggcaggaatacaagaagcctattcagacgcgcttgaacctgatgttcctcggtcagttccgcttacagcctaccattaacaccaacaaagatagcgagattgatgcacacaaacaggagtctggtatcgctcctaactttgtacacagccaagacggtaaccaccttcgtatgactgtagtgtgggcacacgagaagtacggaatcgaatcttttgcactgattcacgactccttcggtaccattccggctgacgctgcgaacctgttcaaagcagtgcgcgaaactatggtttcgacatatgagtcttgtgatgtactggctgatttctacgaccagttcgctgaccagttgcacgagtctcaattggacaaaatgccagcacttccggctaaaggtaacttgaacctccgtgacatcttaaaatcggacttcgcgttcgcg

SEQ ID NO: 750 - protein, 890 aa, synthetic construct
  REGION 1..890: note = Variant of RNA polymerase
MHHHHHHMNTINIAKNDFSDIELAAIPFNTLADHYGERLAREQLALEHESYEMGEARFRKMFERQLKAGEVADNAAAKPLITTLLPKMIARINDWFEEVKAKRGKRPTAFQFLQEIKPEAVAYITIKTTLACLTSADNTTVQAVASAIGRAIEDEARFGRIRDLEAKHFKKIVEEQLNKRVGHVYQKAFMQVVEADMLSKGLLGGEAWSSWHKEDSIHVGVRCIEMLIESTGMVSLHRQNAGVVGQDSETIELAPEYAEAIATRAGALAGISPMFQPCVVPPKPWTGITGGGYWAAGRKPLQLVRTRSLAALRRYEEVSMPEVIKAVNIAQNTAWRINKKVLDVANTITQWQHCPVADVPAMDRGEMPARPLDIDTNEIALKAWKKEASAFYRKDKARVSRRLSMEFMLSQANKFANYKAIWFPQNMDWRGRVYAVPMFNPQGNDMTKGLLTFAQEKPIGEDGFYWLKIHGANTAGVDKVPFPQRIKFVEDNHTNIMECAKAPLENTWWAEQDSPFCFLAFCFEYAGVINSGLSYNCSLPLAFDGSCSGIQHFSAMLRDEIGGKAVNLLPSAEYQDIYRIVSDKVNERLKQDLINGTSTTVETVTDKKTGEITQRTKYGTKVMAQWWLEHGVNRGVTKRSVMTLVYGSKEFGFRDQVLSDTIQPAIDNGKGDMFLNPNQAAGYMAKLIWNAVSGTVVAAVEAMNWLKSAAKLLAAEVKDPKTDTVLRGRCAVHWVTPDGFPVWQEYKKPIQTRLNLMFLGQFRLQPTINTNKDSEIDAHKQESGIAPNFVHSQDGNHLRMTVVWAHEKYGIESFALIHDSFGTIPADAANLFKAVRETMVSTYESCDVLADFYDQFADQLHESQLDKMPALPAKGNLNLRDILKSDFAFA

SEQ ID NO: 751 - DNA, 2670 bp, synthetic construct
  misc_feature 1..2670: note = Variant of RNA polymerase
  source 1..2670: mol_type = other DNA
atgcaccatcaccatcaccatatgaacacgattaacattgctaagaacgacttctctgacatcgaactggctgctatcccgttcaacactctggctgaccattacggtgagcgtttagctcgcgaacagttggcccttgagcatgagtcttacgagatgggtgaagcacgcttccgcaagatgtttgagcgtcaacttaaagctggtgaggttgcggataacgctgccgccaagcctctcatcactaccctactccctaagatgattgcacgcatcaacgactggtttgaggaagtgaaagctaagcgcggcaagcgcccgacagccttccagttcctgcaagaaatcaagccggaagccgtagcgtacatcaccattaagaccactctggcttgcctaaccagtgcggacaatacaaccgttcaggctgtagcaagcgcaatcggtcgggccattgaggacgaggctcgcttcggtcgtatccgtgaccttgaagctaagcacttcaagaaaattgttgaggaacaactcaacaagcgcgtagggcacccgtacaagaaagcatttatgcaagttgtcgaggctgacatgctctctaagggtctactcggtggcgaggcgtggtcttcgtggcataaggaagactctattcatgtaggagtacgctgcatcgagatgctcattgagtcaaccggaatggttagcttacaccgccaaaatgctggcgtagtaggtcaagactctgagactatcgaactcgcacctgaatacgctgaggctatcgcaacccgtgcaggtgcgctggctggcatctctccgatgttccaaccttgcgtagttcctcctaagccgtggactggcattactggtggtggctattgggctgcggggcgcaaacccctgcagttagtacgtactcgcagtctggcggcgcttcgccgctatgaagaagtgtcgatgccggaggtcatcaaagcagtcaacattgcgcagaatacagcatggcgtattaacaagaaagttctcgacgtagcgaatgccatcacccaatggcagcactgtccagtcgcggatgtgcctgcgatggatcgtggcgaaatgccagctcgtccgttggacatcgataccaacgagattgcacttaaagcgtggaagaaagaagcttccgcgttctaccgcaaagacaaagcacgcgttagccgtcgtctgtcaatggagtttatgttatctcaggcgaacaagtttgcgaatgagaaagcaatctggtttccgcaaaacatggattggcgtgggcgcgtgtacgctgtcccgatgttcaatcctcagggcaacgatatgacgaaaggcctgctgacctttgcgcaggagaaacccattggtgaagacggcttctattggctcaagattcatggcgcaaatacagctggagtggataaagtaccgtttccacaacgcatcaaatttgttgaggataaccatacgaatattatggaatgcgcgaaagcaccgctggaaaacacttggtgggcggaacaggactcgccgttctgttttctggcgttctgctttgagtatgctggcgtcatcaatcatggtctgtcgtacaactgtagcttgcctctggcatttgatggtagttgctccggcattcaacatttctcagcgatgttacgcgacgaaattggcggcaaagctgtgaatctcctcccatctgcggaataccaggatatttatcgtatcgtcagcgacaaagttaacgagatgctgaaacaagatctgattaacggtacctctaccaccgtggaaacggtgactgataagaagacaggcgaaattacccaacgcacgaaatacgggaccaaagttatggcacagtggtggttagaacacggtgtgaatcgtggcgtcacgaaacgctcggttatgactttggtgtatgggagcaaagagtttggattccgcgatcaagtgctgagtgacaccattcaaccggcgatcgataacggcaaaggtgacatgtttctgaatccgaatcaggctgctggttacatggcgaaactgatctggaacgcagtgtccgggaccgtagtcgcagcagttgaggcgatgaactggctgaaaagtgcggcgaaattacttgctgctgaagtgaaggatcctaagacggatacagttctgcgtggccgctgcgcagtacattgggtgactcccgacggcttccctgtgtggcaggaatacaagaagcctattcagacgcgcttgaacctgatgttcctcggtcagttccgcttacagcctaccattaacaccaacaaagatagcgagattgatgcacacaaacaggagtctggtatcgctcctaactttgtacacagccaagacggtaaccaccttcgtatgactgtagtgtgggcacacgagaagtacggaatcgaatcttttgcactgattcacgactccttcggtaccattccggctgacgctgcgaacctgttcaaagcagtgcgcgaaactatggtttcgacatatgagtcttgtgatgtactggctgatttctacgaccagttcgctgaccagttgcacgagtctcaattggacaaaatgccagcacttccggctaaaggtaacttgaacctccgtgacatcttaaaatcggacttcgcgttcgcg

SEQ ID NO: 752 - protein, 890 aa, synthetic construct
  REGION 1..890: note = Variant of RNA polymerase
MHHHHHHMNTINIAKNDFSDIELAAIPFNTLADHYGERLAREQLALEHESYEMGEARFRKMFERQLKAGEVADNAAAKPLITTLLPKMIARINDWFEEVKAKRGKRPTAFQFLQEIKPEAVAYITIKTTLACLTSADNTTVQAVASAIGRAIEDEARFGRIRDLEAKHFKKIVEEQLNKRVGHPYKKAFMQVVEADMLSKGLLGGEAWSSWHKEDSIHVGVRCIEMLIESTGMVSLHRQNAGVVGQDSETIELAPEYAEAIATRAGALAGISPMFQPCVVPPKPWTGITGGGYWAAGRKPLQLVRTRSLAALRRYEEVSMPEVIKAVNIAQNTAWRINKKVLDVANAITQWQHCPVADVPAMDRGEMPARPLDIDTNEIALKAWKKEASAFYRKDKARVSRRLSMEFMLSQANKFANEKAIWFPQNMDWRGRVYAVPMFNPQGNDMTKGLLTFAQEKPIGEDGFYWLKIHGANTAGVDKVPFPQRIKFVEDNHTNIMECAKAPLENTWWAEQDSPFCFLAFCFEYAGVINHGLSYNCSLPLAFDGSCSGIQHFSAMLRDEIGGKAVNLLPSAEYQDIYRIVSDKVNEMLKQDLINGTSTTVETVTDKKTGEITQRTKYGTKVMAQWWLEHGVNRGVTKRSVMTLVYGSKEFGFRDQVLSDTIQPAIDNGKGDMFLNPNQAAGYMAKLIWNAVSGTVVAAVEAMNWLKSAAKLLAAEVKDPKTDTVLRGRCAVHWVTPDGFPVWQEYKKPIQTRLNLMFLGQFRLQPTINTNKDSEIDAHKQESGIAPNFVHSQDGNHLRMTVVWAHEKYGIESFALIHDSFGTIPADAANLFKAVRETMVSTYESCDVLADFYDQFADQLHESQLDKMPALPAKGNLNLRDILKSDFAFA

SEQ ID NO: 753 - DNA, 2670 bp, synthetic construct
  misc_feature 1..2670: note = Variant of RNA polymerase
  source 1..2670: mol_type = other DNA
atgcaccatcaccatcaccatatgaacacgattaacattgctaagaacgacttctctgacatcgaactggctgctatcccgttcaacactctggctgaccattacggtgagcgtttagctcgcgaacagttggcccttgagcatgagtcttacgagatgggtgaagcacgcttccgcaagatgtttgagcgtcaacttaaagctggtgaggttgcggataacgctgccgccaagcctctcatcactaccctactccctaagatgattgcacgcatcaacgactggtttgaggaagtgaaagctaagcgcggcaagcgcccgacagccttccagttcctgcaagaaatcaagccggaagccgtagcgtacatcaccattaagaccactctggcttgcctaaccagtgcggacaatacaaccgttcaggctgtagcaagcgcaatcggtcgggccattgaggacgaggctcgcttcggtcgtatccgtgaccttgaagctaagcacttcaagggcaacgttgaggaacaactcaacaagcgcgtagggcacgtgtacaagaaagcatttatgcaagttgtcgaggctgacatgctctctaagggtctactcggtggcgaggcgtggtcttcgtggcataaggaagactctattcatgtaggagtacgctgcatcgagatgctcattgagtcaaccggaatggttagcttacaccgccaaaatgctggcgtagtaggtcaagactctgagactatcgaactcgcacctgaatacgctgaggctatcgcaacccgtgcaggtgcgctggctggcatctctccgatgttccaaccttgcgtagttcctcctaagccgtggactggcattactggtggtggctattgggctgcggggcgcaaacccctgcagttagtacgtactcgcagtctggcggcgcttcgccgctatgaagaagtgtcgatgccggaggtcatcaaagcagtcaacattgcgcagaatacagcatggcgtattaacaagaaagttctcgacgtagcgaataccatcacccaatggcagcactgtccagtcgcggatgtgcctgcgatggatcgtggcgaaatgccagctcgtccgttggacatcgataccaacgagattgcacttaaagcgtggaagaaagaagcttccgcgttctaccgcaaagacaaagcacgcgttagccgtcgtctgtcaatggagtttatgttatctcaggcgaacaagtttgcgaatgagaaagcaatctggtttccgcaaaacatggattggcgtgggcgcgtgtacgctgtcccgatgttcaatcctcagggcaacgatatgacgaaaggcctgctgacctttgcgcaggagaaacccattggtgaagacggcttctattggctcaagattcatggcgcaaatacagctggagtggataaagtaccgtttccacaacgcatcaaatttgttgaggataaccatacgaatattatggaatgcgcgaaagcaccgctggaaaacacttggtgggcggaacaggactcgccgttctgttttctggcgttctgctttgagtatgctggcgtcatcaatcatggtctgtcgtacaactgtagcttgcctctggcatttgatggtagttgctccggcatccaacatttctcagcgatgttacgcgacgaaattggcgccaaagctgtgaatctcctcccatctgcggaataccaggatatttatcgtatcgtcagcgacaaagttaacgaggtactgaaacaagatctgattaacggtacctctaccaccgtggaaacggtgactgataagaagacaggcgaaattacccaacgcacgaaatacgggaccaaagttatggcacagtggtggttagaacacggtgtgaatcgtggcgtcacgaaacgctcggttatgactttggtgtatgggagcaaagagtttggattccgcgatcaagtgctgagtgacaccattcaaccggcgatcgataacggcaaaggtgacatgtttctgaatccgaatcaggctgctggttacatggcgaaactgatctggaacgcagtgtccgggaccgtagtcgcagcagttgaggcgatgaactggctgaaaagtgcggcgaaattacttgctgctgaagtgaaggatcctaagacggatacagttctgcgtggccgctgcgcagtacattgggtgactcccgacggcttccctgtgtggcaggaatacaagaagcctattcagacgcgcttgaacctgatgttcctcggtcagttccgcttacagcctaccattaacaccaacaaagatagcgagattgatgcacacaaacaggagtctggtatcgctcctaactttgtacacagccaagacggtaaccaccttcgtatgactgtagtgtgggcacacgagaagtacggaatcgaatcttttgcactgattcacgactccttcggtaccattccggctgacgctgcgaacctgttcaaagcagtgcgcgaaactatggtttcgacatatgagtcttgtgatgtactggctgatttctacgaccagttcgctgaccagttgcacgagtctcaattggacaaaatgccagcacttccggctaaaggtaacttgaacctccgtgacatcttaaaatcggacttcgcgttcgcg

SEQ ID NO: 754 - protein, 890 aa, synthetic construct
  REGION 1..890: note = Variant of RNA polymerase
MHHHHHHMNTINIAKNDFSDIELAAIPFNTLADHYGERLAREQLALEHESYEMGEARFRKMFERQLKAGEVADNAAAKPLITTLLPKMIARINDWFEEVKAKRGKRPTAFQFLQEIKPEAVAYITIKTTLACLTSADNTTVQAVASAIGRAIEDEARFGRIRDLEAKHFKGNVEEQLNKRVGHVYKKAFMQVVEADMLSKGLLGGEAWSSWHKEDSIHVGVRCIEMLIESTGMVSLHRQNAGVVGQDSETIELAPEYAEAIATRAGALAGISPMFQPCVVPPKPWTGITGGGYWAAGRKPLQLVRTRSLAALRRYEEVSMPEVIKAVNIAQNTAWRINKKVLDVANTITQWQHCPVADVPAMDRGEMPARPLDIDTNEIALKAWKKEASAFYRKDKARVSRRLSMEFMLSQANKFANEKAIWFPQNMDWRGRVYAVPMFNPQGNDMTKGLLTFAQEKPIGEDGFYWLKIHGANTAGVDKVPFPQRIKFVEDNHTNIMECAKAPLENTWWAEQDSPFCFLAFCFEYAGVINHGLSYNCSLPLAFDGSCSGIQHFSAMLRDEIGAKAVNLLPSAEYQDIYRIVSDKVNEVLKQDLINGTSTTVETVTDKKTGEITQRTKYGTKVMAQWWLEHGVNRGVTKRSVMTLVYGSKEFGFRDQVLSDTIQPAIDNGKGDMFLNPNQAAGYMAKLIWNAVSGTVVAAVEAMNWLKSAAKLLAAEVKDPKTDTVLRGRCAVHWVTPDGFPVWQEYKKPIQTRLNLMFLGQFRLQPTINTNKDSEIDAHKQESGIAPNFVHSQDGNHLRMTVVWAHEKYGIESFALIHDSFGTIPADAANLFKAVRETMVSTYESCDVLADFYDQFADQLHESQLDKMPALPAKGNLNLRDILKSDFAFA

SEQ ID NO: 755 - DNA, 2670 bp, synthetic construct
  misc_feature 1..2670: note = Variant of RNA polymerase
  source 1..2670: mol_type = other DNA
atgcaccatcaccatcaccatatgaacacgattaacattgctaagaacgacttctctgacatcgaactggctgctatcccgttcaacactctggctgaccattacggtgagcgtttagctcgcgaacagttggcccttgagcatgagtcttacgagatgggtgaagcacgcttccgcaagatgtttgagcgtcaacttaaagctggtgaggttgcggataacgctgccgccaagcctctcatcactaccctactccctaagatgattgcacgcatcaacgactggtttgaggaagtgaaagctaagcgcggcaagcgcccgacagccttccagttcctgcaagaaatcaagccggaagccgtagcgtacatcaccattaagaccactctggcttgcctaaccagtgcggacaatacaaccgttcaggctgtagcaagcgcaatcggtcgggccattgaggacgaggctcgcttcggtcgtatccgtgaccttgaagctaagcacttcaagaaaaacgttgaggaacaactcaacaagcgcgtagggcacccgtacaagaaagcatttatgcaagttgtcgaggctgacatgctctctacgggtctactcggtggcgaggcgtggtcttcgtggcataaggaagactctattcatgtaggagtacgctgcatcgagatgctcattgagtcaaccggaatggttagcttacaccgccaaaatgctggcgtagtaggtcaagactctgagactatcgaactcgcacctgaatacgctgaggctatcgcaacccgtgcaggtgcgctggctggcatctctccgatgttccaaccttgcgtagttcctcctaagccgtggactggcattactggtggtggctattgggctgcggggcgcaaacccctgcagttagtacgtactcgcagtctggcggcgcttcgccgctatgaagaagtgtcgatgccggaggtcatcaaagcagtcaacattgcgcagaatacagcatggcgtattaacaagaaagttctcgacgtagcgaatgcaatcacccaatggcagcactgtccagtcgcggatgtgcctgcgatggatcgtggcgaaatgccagctcgtccgttggacatcgataccaacgagattgcacttaaagcgtggaagaaagaagcttccgcgttctaccgcaaagacaaagcacgcgttagccgtcgtctgtcaatggagtttatgttatctcaggcgaacaagtttgcgaattataaagcaatctggtttccgcaaaacatggattggcgtgggcgcgtgtacgctgtcccgatgttcaatcctcagggcaacgatatgacgaaaggcctgctgacctttgcgcaggagaaacccattggtgaagacggcttctattggctcaagattcatggcgcaaatacagctggagtggataaagtaccgtttccacaacgcatcaaatttgttgaggataaccatacgaatattatggaatgcgcgaaagcaccgctggaaaacacttggtgggcggaacaggactcgccgttctgttttctggcgttctgctttgagtatgctggcgtcatcaatcatggtctgtcgtacaactgtagcttgcctctggcatttgatggtagttgctccggcattcaacatttctcagcgatgttacgcgacgaaattggcggcaaagctgtgaatctcctcccatctgcggaataccaggatatttatcgtatcgtcagcgacaaagttaacgaggtactgaaacaagatctgattaacggtacctctaccaccgtggaaacggtgactgataagaagacaggcgaaattacccaacgcacgaaatacgggaccaaagttatggcacagtggtggttagaacacggtgtgaatcgtggcgtcacgaaacgctcggttatgactttggtgtatgggagcaaagagtttggattccgcgatcaagtgctgagtgacaccattcaaccggcgatcgataacggcaaaggtgacatgtttctgaatccgaatcaggctgctggttacatggcgaaactgatctggaacgcagtgtccgggaccgtagtcgcagcagttgaggcgatgaactggctgaaaagtgcggcgaaattacttgctgctgaagtgaaggatcctaagacggatacagttctgcgtggccgctgcgcagtacattgggtgactcccgacggcttccctgtgtggcaggaatacaagaagcctattcagacgcgcttgaacctgatgttcctcggtcagttccgcttacagcctaccattaacaccaacaaagatagcgagattgatgcacacaaacaggagtctggtatcgctcctaactttgtacacagccaagacggtaaccaccttcgtatgactgtagtgtgggcacacgagaagtacggaatcgaatcttttgcactgattcacgactccttcggtaccattccggctgacgctgcgaacctgttcaaagcagtgcgcgaaactatggtttcgacatatgagtcttgtgatgtactggctgatttctacgaccagttcgctgaccagttgcacgagtctcaattggacaaaatgccagcacttccggctaaaggtaacttgaacctccgtgacatcttaaaatcggacttcgcgttcgcg

SEQ ID NO: 756 - protein, 890 aa, synthetic construct
  REGION 1..890: note = Variant of RNA polymerase
MHHHHHHMNTINIAKNDFSDIELAAIPFNTLADHYGERLAREQLALEHESYEMGEARFRKMFERQLKAGEVADNAAAKPLITTLLPKMIARINDWFEEVKAKRGKRPTAFQFLQEIKPEAVAYITIKTTLACLTSADNTTVQAVASAIGRAIEDEARFGRIRDLEAKHFKKNVEEQLNKRVGHPYKKAFMQVVEADMLSTGLLGGEAWSSWHKEDSIHVGVRCIEMLIESTGMVSLHRQNAGVVGQDSETIELAPEYAEAIATRAGALAGISPMFQPCVVPPKPWTGITGGGYWAAGRKPLQLVRTRSLAALRRYEEVSMPEVIKAVNIAQNTAWRINKKVLDVANAITQWQHCPVADVPAMDRGEMPARPLDIDTNEIALKAWKKEASAFYRKDKARVSRRLSMEFMLSQANKFANYKAIWFPQNMDWRGRVYAVPMFNPQGNDMTKGLLTFAQEKPIGEDGFYWLKIHGANTAGVDKVPFPQRIKFVEDNHTNIMECAKAPLENTWWAEQDSPFCFLAFCFEYAGVINHGLSYNCSLPLAFDGSCSGIQHFSAMLRDEIGGKAVNLLPSAEYQDIYRIVSDKVNEVLKQDLINGTSTTVETVTDKKTGEITQRTKYGTKVMAQWWLEHGVNRGVTKRSVMTLVYGSKEFGFRDQVLSDTIQPAIDNGKGDMFLNPNQAAGYMAKLIWNAVSGTVVAAVEAMNWLKSAAKLLAAEVKDPKTDTVLRGRCAVHWVTPDGFPVWQEYKKPIQTRLNLMFLGQFRLQPTINTNKDSEIDAHKQESGIAPNFVHSQDGNHLRMTVVWAHEKYGIESFALIHDSFGTIPADAANLFKAVRETMVSTYESCDVLADFYDQFADQLHESQLDKMPALPAKGNLNLRDILKSDFAFA

SEQ ID NO: 757 - DNA, 2670 bp, synthetic construct
  misc_feature 1..2670: note = Variant of RNA polymerase
  source 1..2670: mol_type = other DNA
atgcaccatcaccatcaccatatgaacacgattaacattgctaagaacgacttctctgacatcgaactggctgctatcccgttcaacactctggctgaccattacggtgagcgtttagctcgcgaacagttggcccttgagcatgagtcttacgagatgggtgaagcacgcttccgcaagatgtttgagcgtcaacttaaagctggtgaggttgcggataacgctgccgccaagcctctcatcactaccctactccctaagatgattgcacgcatcaacgactggtttgaggaagtgaaagctaagcgcggcaagcgcccgacagccttccagttcctgcaagaaatcaagccggaagccgtagcgtacatcaccattaagaccactctggcttgcctaaccagtgcggacaatacaaccgttcaggctgtagcaagcgcaatcggtcgggccattgaggacgaggctcgcttcggtcgtatccgtgaccttgaagctaagcacttcaagaaaattgttgaggaacaactcaacaagcgcgtagggcacgtgtacaagaaagcatttatgcaagttgtcgaggctgacatgctctctaagggtctactcggtggcgaggcgtggtcttcgtggcataaggaagactctattcatgtaggagtacgctgcatcgagatgctcattgagtcaaccggaatggttagcttacaccgccaaaatgctggcgtagtaggtcaagactctgagactatcgaactcgcacctgaatacgctgaggctatcgcaacccgtgcaggtgcgctggctggcatctctccgatgttccaaccttgcgtagttcctcctaagccgtggactggcattactggtggtggctattgggctgcggggcgcaaacccctgcagttagtacgtactcgcagtctggcggcgcttcgccgctatgaagaagtgtcgatgccggaggtcatcaaagcagtcaacattgcgcagaatacagcatggcgtattaacaagaaagttctcgacgtagcgaataccatcacccaatggcagcactgtccagtcgcggatgtgcctgcgatggatcgtggcgaaatgccagctcgtccgttggacatcgataccaacgagattgcacttaaagcgtggaagaaagaagcttccgcgttctaccgcaaagacaaagcacgcgttagccgtcgtctgtcaatggagtttatgttatctcaggcgaacaagtttgcgaatgagaaagcaatctggtttccgcaaaacatggattggcgtgggcgcgtgtacgctgtcccgatgttcaatcctcagggcaacgatatgacgaaaggcctgctgacctttgcgcaggagaaacccattggtgaagacggcttctattggctcaagattcatggcgcaaatacagctggagtggataaagtaccgtttccacaacgcatcaaatttgttgaggataaccatacgaatattatggaatgcgcgaaagcaccgctggaaaacacttggtgggcggaacaggactcgccgttctgttttctggcgttctgctttgagtatgctggcgtcatcaatcacggtctgtcgtacaactgtagcttgcctctggcatttgatggtagttgctccggcattcaacatttctcagcgatgttacgcgacgaaattggcggcaaagctgtgaatctcctcccatctgcggaataccaggatatttatcgtatcgtcagcgacaaagttaacgagcgtctgaaacaagatctgattaacggtacctctaccaccgtggaaacggtgactgataagaagacaggcgaaattacccaacgcacgaaatacgggaccaaagttatggcacagtggtggttagaacacggtgtgaatcgtggcgtcacgaaacgctcggttatgactttggtgtatgggagcaaagagtttggattccgcgatcaagtgctgagtgacaccattcaaccggcgatcgataacggcaaaggtgacatgtttctgaatccgaatcaggctgctggttacatggcgaaactgatctggaacgcagtgtccgggaccgtagtcgcagcagttgaggcgatgaactggctgaaaagtgcggcgaaattacttgctgctgaagtgaaggatcctaagacggatacagttctgcgtggccgctgcgcagtacattgggtgactcccgacggcttccctgtgtggcaggaatacaagaagcctattcagacgcgcttgaacctgatgttcctcggtcagttccgcttacagcctaccattaacaccaacaaagatagcgagattgatgcacacaaacaggagtctggtatcgctcctaactttgtacacagccaagacggtaaccaccttcgtatgactgtagtgtgggcacacgagaagtacggaatcgaatcttttgcactgattcacgactccttcggtaccattccggctgacgctgcgaacctgttcaaagcagtgcgcgaaactatggtttcgacatatgagtcttgtgatgtactggctgatttctacgaccagttcgctgaccagttgcacgagtctcaattggacaaaatgccagcacttccggctaaaggtaacttgaacctccgtgacatcttaaaatcggacttcgcgttcgcg

SEQ ID NO: 758 - protein, 890 aa, synthetic construct
  REGION 1..890: note = Variant of RNA polymerase
MHHHHHHMNTINIAKNDFSDIELAAIPFNTLADHYGERLAREQLALEHESYEMGEARFRKMFERQLKAGEVADNAAAKPLITTLLPKMIARINDWFEEVKAKRGKRPTAFQFLQEIKPEAVAYITIKTTLACLTSADNTTVQAVASAIGRAIEDEARFGRIRDLEAKHFKKIVEEQLNKRVGHVYKKAFMQVVEADMLSKGLLGGEAWSSWHKEDSIHVGVRCIEMLIESTGMVSLHRQNAGVVGQDSETIELAPEYAEAIATRAGALAGISPMFQPCVVPPKPWTGITGGGYWAAGRKPLQLVRTRSLAALRRYEEVSMPEVIKAVNIAQNTAWRINKKVLDVANTITQWQHCPVADVPAMDRGEMPARPLDIDTNEIALKAWKKEASAFYRKDKARVSRRLSMEFMLSQANKFANEKAIWFPQNMDWRGRVYAVPMFNPQGNDMTKGLLTFAQEKPIGEDGFYWLKIHGANTAGVDKVPFPQRIKFVEDNHTNIMECAKAPLENTWWAEQDSPFCFLAFCFEYAGVINHGLSYNCSLPLAFDGSCSGIQHFSAMLRDEIGGKAVNLLPSAEYQDIYRIVSDKVNERLKQDLINGTSTTVETVTDKKTGEITQRTKYGTKVMAQWWLEHGVNRGVTKRSVMTLVYGSKEFGFRDQVLSDTIQPAIDNGKGDMFLNPNQAAGYMAKLIWNAVSGTVVAAVEAMNWLKSAAKLLAAEVKDPKTDTVLRGRCAVHWVTPDGFPVWQEYKKPIQTRLNLMFLGQFRLQPTINTNKDSEIDAHKQESGIAPNFVHSQDGNHLRMTVVWAHEKYGIESFALIHDSFGTIPADAANLFKAVRETMVSTYESCDVLADFYDQFADQLHESQLDKMPALPAKGNLNLRDILKSDFAFA

SEQ ID NO: 759 - DNA, 2670 bp, synthetic construct
  misc_feature 1..2670: note = Variant of RNA polymerase
  source 1..2670: mol_type = other DNA
atgcaccatcaccatcaccatatgaacacgattaacattgctaagaacgacttctctgacatcgaactggctgctatcccgttcaacactctggctgaccattacggtgagcgtttagctcgcgaacagttggcccttgagcatgagtcttacgagatgggtgaagcacgcttccgcaagatgtttgagcgtcaacttaaagctggtgaggttgcggataacgctgccgccaagcctctcatcactaccctactccctaagatgattgcacgcatcaacgactggtttgaggaagtgaaagctaagcgcggcaagcgcccgacagccttccagttcctgcaagaaatcaagccggaagccgtagcgtacatcaccattaagaccactctggcttgcctaaccagtgcggacaatacaaccgttcaggctgtagcaagcgcaatcggtcgggccattgaggacgaggctcgcttcggtcgtatccgtgaccttgaagctaagcacttcaagaaaaacgttgaggaacaactcaacaagcgcgtagggcacgtctacaagaaagcatttatgcaagttgtcgaggctgacatgtcgtctaagggtctactcggtggcgaggcgtggtcttcgtggcataaggaagactctattcatgtaggagtacgctgcatcgagatgctcattgagtcaaccggaatggttagcttacaccgccaaaatgctggcgtagtaggtcaagactctgagactatcgaactcgcacctgaatacgctgaggctatcgcaacccgtgcaggtgcgctggctggcatctctccgatgttccaaccttgcgtagttcctcctaagccgtggactggcattactggtggtggctattgggctgcggggcgcaaacccctgcagttagtacgtactcgcagtctggcggcgcttcgccgctatgaagaagtgtcgatgccggaggtcatcaaagcagtcaacattgcgcagaatacagcatggcgtattaacaagaaagttctcgacgtagcgaatgcaatcacccaatggcagcactgtccagtcgcggatgtgcctgcgatggatcgtggcgaaatgccagctcgtccgttggacatcgataccaacgagattgcacttaaagcgtggaagaaagaagcttccgcgttctaccgcaaagacaaagcacgcgttagccgtcgtctgtcaatggagtttatgttatctcaggcgaacaagtttgcgaattataacgcaatctggtttccgcaaaacatggattggcgtgggcgcgtgtacgctgtcccgatgttcaatcctcagggcaacgatatgacgaaaggcctgctgacctttgcgcaggagaaacccattggtgaagacggcttctattggctcaagattcatggcgcaaatacagctggagtggataaagtaccgtttccacaacgcatcaaatttgttgaggataaccatacgaatattatggaatgcgcgaaagcaccgctggaaaacacttggtgggcggaacaggactcgccgttctgttttctggcgttctgctttgagtatgctggcgtcatcaatcacggtctgtcgtacaactgtagcttgcctcaggcatttgatggtagttgctccggcattcaacatttctcagcgatgttacgcgacgaaattggcggcaaagctgtgaatctcctcccatctgcggaataccaggatatttatcgtatcgtcagcgacaaagttaacgaggtactgaaacaagatctgattaacggtacctctaccaccgtggaaacggtgactgataagaagacaggcgaaattacccaacgcacgaaatacgggaccaaagttatggcacagtggtggttagaacacggtgtgaatcgtggcgtcacgaaacgctcggttatgactttggtgtatgggagcaaagagtttggattccgcgatcaagtgctgagtgacaccattcaaccggcgatcgataacggcaaaggtgacatgtttctgaatccgaatcaggctgctggttacatggcgaaactgatctggaacgcagtgtccgggaccgtagtcgcagcagttgaggcgatgaactggctgaaaagtgcggcgaaattacttgctgctgaagtgaaggatcctaagacggatacagttctgcgtggccgctgcgcagtacattgggtgactcccgacggcttccctgtgtggcaggaatacaagaagcctattcagacgcgcttgaacctgatgttcctcggtcagttccgcttacagcctaccattaacaccaacaaagatagcgagattgatgcacacaaacaggagtctggtatcgctcctaactttgtacacagccaagacggtaaccaccttcgtatgactgtagtgtgggcacacgagaagtacggaatcgaatcttttgcactgattcacgactccttcggtaccattccggctgacgctgcgaacctgttcaaagcagtgcgcgaaactatggtttcgacatatgagtcttgtgatgtactggctgatttctacgaccagttcgctgaccagttgcacgagtctcaattggacaaaatgccagcacttccggctaaaggtaacttgaacctccgtgacatcttaaaatcggacttcgcgttcgcg

SEQ ID NO: 760 - protein, 890 aa, synthetic construct
  REGION 1..890: note = Variant of RNA polymerase
MHHHHHHMNTINIAKNDFSDIELAAIPFNTLADHYGERLAREQLALEHESYEMGEARFRKMFERQLKAGEVADNAAAKPLITTLLPKMIARINDWFEEVKAKRGKRPTAFQFLQEIKPEAVAYITIKTTLACLTSADNTTVQAVASAIGRAIEDEARFGRIRDLEAKHFKKNVEEQLNKRVGHVYKKAFMQVVEADMSSKGLLGGEAWSSWHKEDSIHVGVRCIEMLIESTGMVSLHRQNAGVVGQDSETIELAPEYAEAIATRAGALAGISPMFQPCVVPPKPWTGITGGGYWAAGRKPLQLVRTRSLAALRRYEEVSMPEVIKAVNIAQNTAWRINKKVLDVANAITQWQHCPVADVPAMDRGEMPARPLDIDTNEIALKAWKKEASAFYRKDKARVSRRLSMEFMLSQANKFANYNAIWFPQNMDWRGRVYAVPMFNPQGNDMTKGLLTFAQEKPIGEDGFYWLKIHGANTAGVDKVPFPQRIKFVEDNHTNIMECAKAPLENTWWAEQDSPFCFLAFCFEYAGVINHGLSYNCSLPQAFDGSCSGIQHFSAMLRDEIGGKAVNLLPSAEYQDIYRIVSDKVNEVLKQDLINGTSTTVETVTDKKTGEITQRTKYGTKVMAQWWLEHGVNRGVTKRSVMTLVYGSKEFGFRDQVLSDTIQPAIDNGKGDMFLNPNQAAGYMAKLIWNAVSGTVVAAVEAMNWLKSAAKLLAAEVKDPKTDTVLRGRCAVHWVTPDGFPVWQEYKKPIQTRLNLMFLGQFRLQPTINTNKDSEIDAHKQESGIAPNFVHSQDGNHLRMTVVWAHEKYGIESFALIHDSFGTIPADAANLFKAVRETMVSTYESCDVLADFYDQFADQLHESQLDKMPALPAKGNLNLRDILKSDFAFA

SEQ ID NO: 761 - DNA, 2670 bp, synthetic construct
  misc_feature 1..2670: note = Variant of RNA polymerase
  source 1..2670: mol_type = other DNA
atgcaccatcaccatcaccatatgaacacgattaacattgctaagaacgacttctctgacatcgaactggctgctatcccgttcaacactctggctgaccattacggtgagcgtttagctcgcgaacagttggcccttgagcatgagtcttacgagatgggtgaagcacgcttccgcaagatgtttgagcgtcaacttaaagctggtgaggttgcggataacgctgccgccaagcctctcatcactaccctactccctaagatgattgcacgcatcaacgactggtttgaggaagtgaaagctaagcgcggcaagcgcccgacagccttccagttcctgcaagaaatcaagccggaagccgtagcgtacatcaccattaagaccactctggcttgcctaaccagtgcggacaatacaaccgttcaggctgtagcaagcgcaatcggtcgggccattgaggacgaggctcgcttcggtcgtatccgtgaccttgaagctaagcacttcaagggcaacgttgaggaacaactcaacaagcgcgtagggcacgtctacaaagtagcatttatgcaagttgtcgaggctgacatgctctctaagggtctactcggtggcgaggcgtggtcttcgtggcataaggaagactctattcatgtaggagtacgctgcatcgagatgctcattgagtcaaccggaatggttagcttacaccgccaaaatgctggcgtagtaggtcaagactctgagactatcgaactcgcacctgaatacgctgaggctatcgcaacccgtgcaggtgcgctggctggcatctctccgatgttccaaccttgcgtagttcctcctaagccgtggactggcattactggtggtggctattgggctgcggggcgcaaacccctgcagttagtacgtactcgcagtctggcggcgcttcgccgctatgaagaagtgtcgatgccggaggtcatcaaagcagtcaacattgcgcagaatacagcatggcgtattaacaagaaagttctcgacgtagcgaatgcaatcacccaatggcagcactgtccagtcgcggatgtgcctgcgatggatcgtggcgaaatgccagctcgtccgttggacatcgataccaacgagattgcacttaaagcgtggaagaaagaagcttccgcgttctaccgcaaagacaaagcacgcgttagccgtcgtctgtcaatggagtttatgttatctcaggcgaacaagtttgcgaatgagaaagcaatctggtttccgcaaaacatggattggcgtgggcgcgtgtacgctgtcccgatgttcaatcctcagggcaacgatatgacgaaaggcctgctgacctttgcgcaggagaaacccattggtgaagacggcttctattggctcaagattcatggcgcaaatacagctggagtggataaagtaccgtttccacaacgcatcaaatttgttgaggataaccatacgaatattatggaatgcgcgaaagcaccgctggaaaacacttggtgggcggaacaggactcgccgttctgttttctggcgttctgctttgagtatgctggcgtcatcaatcacggtctgtcgtacaactgtagcttgcctctggcatttgatggtagttgctccggcatccaacatttctcagcgatgttacgcgacgaaattggcgccaaagctgtgaatctcctcccatctgcggaataccaggatatttatcgtatcgtcagcgacaaagttaacgaggtactgaaacaagatctgattaacggtacctctaccaccgtggaaacggtgactgataagaagacaggcgaaattacccaacgcacgaaatacgggaccaaagttatggcacagtggtggttagaacacggtgtgaatcgtggcgtcacgaaacgctcggttatgactttggtgtatgggagcaaagagtttggattccgcgatcaagtgctgagtgacaccattcaaccggcgatcgataacggcaaaggtgacatgtttctgaatccgaatcaggctgctggttacatggcgaaactgatctggaacgcagtgtccgggaccgtagtcgcagcagttgaggcgatgaactggctgaaaagtgcggcgaaattacttgctgctgaagtgaaggatcctaagacggatacagttctgcgtggccgctgcgcagtacattgggtgactcccgacggcttccctgtgtggcaggaatacaagaagcctattcagacgcgcttgaacctgatgttcctcggtcagttccgcttacagcctaccattaacaccaacaaagatagcgagattgatgcacacaaacaggagtctggtatcgctcctaactttgtacacagccaagacggtaaccaccttcgtatgactgtagtgtgggcacacgagaagtacggaatcgaatcttttgcactgattcacgactccttcggtaccattccggctgacgctgcgaacctgttcaaagcagtgcgcgaaactatggtttcgacatatgagtcttgtgatgtactggctgatttctacgaccagttcgctgaccagttgcacgagtctcaattggacaaaatgccagcacttccggctaaaggtaacttgaacctccgtgacatcttaaaatcggacttcgcgttcgcg

SEQ ID NO: 762 - protein, 890 aa, synthetic construct
  REGION 1..890: note = Variant of RNA polymerase
MHHHHHHMNTINIAKNDFSDIELAAIPFNTLADHYGERLAREQLALEHESYEMGEARFRKMFERQLKAGEVADNAAAKPLITTLLPKMIARINDWFEEVKAKRGKRPTAFQFLQEIKPEAVAYITIKTTLACLTSADNTTVQAVASAIGRAIEDEARFGRIRDLEAKHFKGNVEEQLNKRVGHVYKVAFMQVVEADMLSKGLLGGEAWSSWHKEDSIHVGVRCIEMLIESTGMVSLHRQNAGVVGQDSETIELAPEYAEAIATRAGALAGISPMFQPCVVPPKPWTGITGGGYWAAGRKPLQLVRTRSLAALRRYEEVSMPEVIKAVNIAQNTAWRINKKVLDVANAITQWQHCPVADVPAMDRGEMPARPLDIDTNEIALKAWKKEASAFYRKDKARVSRRLSMEFMLSQANKFANEKAIWFPQNMDWRGRVYAVPMFNPQGNDMTKGLLTFAQEKPIGEDGFYWLKIHGANTAGVDKVPFPQRIKFVEDNHTNIMECAKAPLENTWWAEQDSPFCFLAFCFEYAGVINHGLSYNCSLPLAFDGSCSGIQHFSAMLRDEIGAKAVNLLPSAEYQDIYRIVSDKVNEVLKQDLINGTSTTVETVTDKKTGEITQRTKYGTKVMAQWWLEHGVNRGVTKRSVMTLVYGSKEFGFRDQVLSDTIQPAIDNGKGDMFLNPNQAAGYMAKLIWNAVSGTVVAAVEAMNWLKSAAKLLAAEVKDPKTDTVLRGRCAVHWVTPDGFPVWQEYKKPIQTRLNLMFLGQFRLQPTINTNKDSEIDAHKQESGIAPNFVHSQDGNHLRMTVVWAHEKYGIESFALIHDSFGTIPADAANLFKAVRETMVSTYESCDVLADFYDQFADQLHESQLDKMPALPAKGNLNLRDILKSDFAFA

SEQ ID NO: 763 - DNA, 2670 bp, synthetic construct
  misc_feature 1..2670: note = Variant of RNA polymerase
  source 1..2670: mol_type = other DNA
atgcaccatcaccatcaccatatgaacacgattaacattgctaagaacgacttctctgacatcgaactggctgctatcccgttcaacactctggctgaccattacggtgagcgtttagctcgcgaacagttggcccttgagcatgagtcttacgagatgggtgaagcacgcttccgcaagatgtttgagcgtcaacttaaagctggtgaggttgcggataacgctgccgccaagcctctcatcactaccctactccctaagatgattgcacgcatcaacgactggtttgaggaagtgaaagctaagcgcggcaagcgcccgacagccttccagttcctgcaagaaatcaagccggaagccgtagcgtacatcaccattaagaccactctggcttgcctaaccagtgcggacaatacaaccgttcaggctgtagcaagcgcaatcggtcgggccattgaggacgaggctcgcttcggtcgtatccgtgaccttgaagctaagcacttcaagggcaacgttgaggaacaactcaacaagcgcgtagggcacccgtacaagaaagcatttatgcaagttgtcgaggctgacatgctctctaagggtctactcggtggcgaggcgtggtcttcgtggcataaggaagactctattcatgtaggagtacgctgcatcgagatgctcattgagtcaaccggaatggttagcttacaccgccaaaatgctggcgtagtaggtcaagactctgagactatcgaactcgcacctgaatacgctgaggctatcgcaacccgtgcaggtgcgctggctggcatctctccgatgttccaaccttgcgtagttcctcctaagccgtggactggcattactggtggtggctattgggctgcggggcgcaaacccctgcagttagtacgtactcgcagtctggcggcgcttcgccgctatgaagaagtgtcgatgccggaggtcatcaaagcagtcaacattgcgcagaatacagcatggcgtattaacaagaaagttctcgacgtagcgaatgcaatcacccaatggcagcactgtccagtcgcggatgtgcctgcgatggatcgtggcgaaatgccagctcgtccgttggacatcgataccaacgagattgcacttaaagcgtggaagaaagaagcttccgcgttctaccgcaaagacaaagcacgcgttagccgtcgtctgtcaatggagtttatgttatctcaggcgaacaagtttgcgaattataaagcaatctggtttccgcaaaacatggattggcgtgggcgcgtgtacgctgtcccgatgttcaatcctcagggcaacgatatgacgaaaggcctgctgacctttgcgcaggagaaacccattggtgaagacggcttctattggctcaagattcatggcgcaaatacagctggagtggataaagtaccgtttccacaacgcatcaaatttgttgaggataaccatacgaatattatggaatgcgcgaaagcaccgctggaaaacacttggtgggcggaacaggactcgccgttctgttttctggcgttctgctttgagtatgctggcgtcatcaatcatggtctgtcgtacaactgtagcttgcctctggcatttgatggtagttgctccggcattcaacatttctcagcgatgttacgcgacgaaattggcggcaaagctgtgaatctcctcccatctgcggaataccaggatatttatcgtatcgtcagcgacaaagttaacgagcgtctgaaacaagatctgattaacggtacctctaccaccgtggaaacggtgactgataagaagacaggcgaaattacccaacgcacgaaatacgggaccaaagttatggcacagtggtggttagaacacggtgtgaatcgtggcgtcacgaaacgctcggttatgactttggtgtatgggagcaaagagtttggattccgcgatcaagtgctgagtgacaccattcaaccggcgatcgataacggcaaaggtgacatgtttctgaatccgaatcaggctgctggttacatggcgaaactgatctggaacgcagtgtccgggaccgtagtcgcagcagttgaggcgatgaactggctgaaaagtgcggcgaaattacttgctgctgaagtgaaggatcctaagacggatacagttctgcgtggccgctgcgcagtacattgggtgactcccgacggcttccctgtgtggcaggaatacaagaagcctattcagacgcgcttgaacctgatgttcctcggtcagttccgcttacagcctaccattaacaccaacaaagatagcgagattgatgcacacaaacaggagtctggtatcgctcctaactttgtacacagccaagacggtaaccaccttcgtatgactgtagtgtgggcacacgagaagtacggaatcgaatcttttgcactgattcacgactccttcggtaccattccggctgacgctgcgaacctgttcaaagcagtgcgcgaaactatggtttcgacatatgagtcttgtgatgtactggctgatttctacgaccagttcgctgaccagttgcacgagtctcaattggacaaaatgccagcacttccggctaaaggtaacttgaacctccgtgacatcttaaaatcggacttcgcgttcgcg

SEQ ID NO: 764 - protein, 890 aa, synthetic construct
  REGION 1..890: note = Variant of RNA polymerase
MHHHHHHMNTINIAKNDFSDIELAAIPFNTLADHYGERLAREQLALEHESYEMGEARFRKMFERQLKAGEVADNAAAKPLITTLLPKMIARINDWFEEVKAKRGKRPTAFQFLQEIKPEAVAYITIKTTLACLTSADNTTVQAVASAIGRAIEDEARFGRIRDLEAKHFKGNVEEQLNKRVGHPYKKAFMQVVEADMLSKGLLGGEAWSSWHKEDSIHVGVRCIEMLIESTGMVSLHRQNAGVVGQDSETIELAPEYAEAIATRAGALAGISPMFQPCVVPPKPWTGITGGGYWAAGRKPLQLVRTRSLAALRRYEEVSMPEVIKAVNIAQNTAWRINKKVLDVANAITQWQHCPVADVPAMDRGEMPARPLDIDTNEIALKAWKKEASAFYRKDKARVSRRLSMEFMLSQANKFANYKAIWFPQNMDWRGRVYAVPMFNPQGNDMTKGLLTFAQEKPIGEDGFYWLKIHGANTAGVDKVPFPQRIKFVEDNHTNIMECAKAPLENTWWAEQDSPFCFLAFCFEYAGVINHGLSYNCSLPLAFDGSCSGIQHFSAMLRDEIGGKAVNLLPSAEYQDIYRIVSDKVNERLKQDLINGTSTTVETVTDKKTGEITQRTKYGTKVMAQWWLEHGVNRGVTKRSVMTLVYGSKEFGFRDQVLSDTIQPAIDNGKGDMFLNPNQAAGYMAKLIWNAVSGTVVAAVEAMNWLKSAAKLLAAEVKDPKTDTVLRGRCAVHWVTPDGFPVWQEYKKPIQTRLNLMFLGQFRLQPTINTNKDSEIDAHKQESGIAPNFVHSQDGNHLRMTVVWAHEKYGIESFALIHDSFGTIPADAANLFKAVRETMVSTYESCDVLADFYDQFADQLHESQLDKMPALPAKGNLNLRDILKSDFAFA

SEQ ID NO: 765 - DNA, 2670 bp, synthetic construct
  misc_feature 1..2670: note = Variant of RNA polymerase
  source 1..2670: mol_type = other DNA
atgcaccatcaccatcaccatatgaacacgattaacattgctaagaacgacttctctgacatcgaactggctgctatcccgttcaacactctggctgaccattacggtgagcgtttagctcgcgaacagttggcccttgagcatgagtcttacgagatgggtgaagcacgcttccgcaagatgtttgagcgtcaacttaaagctggtgaggttgcggataacgctgccgccaagcctctcatcactaccctactccctaagatgattgcacgcatcaacgactggtttgaggaagtgaaagctaagcgcggcaagcgcccgacagccttccagttcctgcaagaaatcaagccggaagccgtagcgtacatcaccattaagaccactctggcttgcctaaccagtgcggacaatacaaccgttcaggctgtagcaagcgcaatcggtcgggccattgaggacgaggctcgcttcggtcgtatccgtgaccttgaagctaagcacttcaagaagaacgttgaggaacaactcaacaagcgcgtagggcacccgtacaagaaagcatttatgcaagttgtcgaggctgacatgctctctaagggtctactcggtggcgaggcgtggtcttcgtggcataaggaagactctattcatgtaggagtacgctgcatcgagatgctcattgagtcaaccggaatggttagcttacaccgccaaaatgctggcgtagtaggtcaagactctgagactatcgaactcgcacctgaatacgctgaggctatcgcaacccgtgcaggtgcgctggctggcatctctccgatgttccaaccttgcgtagttcctcctaagccgtggactggcattactggtggtggctattgggctgcggggcgcaaacccctgcagttagtacgtactcgcagtctggcggcgcttcgccgctatgaagaagtgtcgatgccggaggtcatcaaagcagtcaacattgcgcagaatacagcatggcgtattaacaagaaagttctcgacgtagcgaataccatcacccaatggcagcactgtccagtcgcggatgtgcctgcgatggatcgtggcgaaatgccagctcgtccgttggacatcgataccaacgagattgcacttaaagcgtggaagaaagaagcttccgcgttctaccgcaaagacaaagcacgcgttagccgtcgtctgtcaatggagtttatgttatctcaggcgaacaagtttgcgaattataaagcaatctggtttccgcaaaacatggattggcgtgggcgcgtgtacgctgtcccgatgttcaatcctcagggcaacgatatgacgaaaggcctgctgacctttgcgcaggagaaacccattggtgaagacggcttctattggctcaagattcatggcgcaaatacagctggagtggataaagtaccgtttccacaacgcatcaaatttgttgaggataaccatacgaatattatggaatgcgcgaaagcaccgctggaaaacacttggtgggcggaacaggactcgccgttctgttttctggcgttctgctttgagtatgctggcgtcatcaatcatggtctgtcgtacaactgtagcttgcctctggcatttgatggtagttgctccggcattcaacatttctcagcgatgttacgcgacgaaattggcggcaaagctgtgaatctcctcccatctgcggaataccaggatatttatcgtatcgtcagcgacaaagttaacgagcgtctgaaacaagatctgattaacggtacctctaccaccgtggaaacggtgactgataagaagacaggcgaaattacccaacgcacgaaatacgggaccaaagttatggcacagtggtggttagaacacggtgtgaatcgtggcgtcacgaaacgctcggttatgactttggtgtatgggagcaaagagtttggattccgcgatcaagtgctgagtgacaccattcaaccggcgatcgataacggcaaaggtgacatgtttctgaatccgaatcaggctgctggttacatggcgaaactgatctggaacgcagtgtccgggaccgtagtcgcagcagttgaggcgatgaactggctgaaaagtgcggcgaaattacttgctgctgaagtgaaggatcctaagacggatacagttctgcgtggccgctgcgcagtacattgggtgactcccgacggcttccctgtgtggcaggaatacaagaagcctattcagacgcgcttgaacctgatgttcctcggtcagttccgcttacagcctaccattaacaccaacaaagatagcgagattgatgcacacaaacaggagtctggtatcgctcctaactttgtacacagccaagacggtaaccaccttcgtatgactgtagtgtgggcacacgagaagtacggaatcgaatcttttgcactgattcacgactccttcggtaccattccggctgacgctgcgaacctgttcaaagcagtgcgcgaaactatggtttcgacatatgagtcttgtgatgtactggctgatttctacgaccagttcgctgaccagttgcacgagtctcaattggacaaaatgccagcacttccggctaaaggtaacttgaacctccgtgacatcttaaaatcggacttcgcgttcgcg

SEQ ID NO: 766 - protein, 890 aa, synthetic construct
  REGION 1..890: note = Variant of RNA polymerase
MHHHHHHMNTINIAKNDFSDIELAAIPFNTLADHYGERLAREQLALEHESYEMGEARFRKMFERQLKAGEVADNAAAKPLITTLLPKMIARINDWFEEVKAKRGKRPTAFQFLQEIKPEAVAYITIKTTLACLTSADNTTVQAVASAIGRAIEDEARFGRIRDLEAKHFKKNVEEQLNKRVGHPYKKAFMQVVEADMLSKGLLGGEAWSSWHKEDSIHVGVRCIEMLIESTGMVSLHRQNAGVVGQDSETIELAPEYAEAIATRAGALAGISPMFQPCVVPPKPWTGITGGGYWAAGRKPLQLVRTRSLAALRRYEEVSMPEVIKAVNIAQNTAWRINKKVLDVANTITQWQHCPVADVPAMDRGEMPARPLDIDTNEIALKAWKKEASAFYRKDKARVSRRLSMEFMLSQANKFANYKAIWFPQNMDWRGRVYAVPMFNPQGNDMTKGLLTFAQEKPIGEDGFYWLKIHGANTAGVDKVPFPQRIKFVEDNHTNIMECAKAPLENTWWAEQDSPFCFLAFCFEYAGVINHGLSYNCSLPLAFDGSCSGIQHFSAMLRDEIGGKAVNLLPSAEYQDIYRIVSDKVNERLKQDLINGTSTTVETVTDKKTGEITQRTKYGTKVMAQWWLEHGVNRGVTKRSVMTLVYGSKEFGFRDQVLSDTIQPAIDNGKGDMFLNPNQAAGYMAKLIWNAVSGTVVAAVEAMNWLKSAAKLLAAEVKDPKTDTVLRGRCAVHWVTPDGFPVWQEYKKPIQTRLNLMFLGQFRLQPTINTNKDSEIDAHKQESGIAPNFVHSQDGNHLRMTVVWAHEKYGIESFALIHDSFGTIPADAANLFKAVRETMVSTYESCDVLADFYDQFADQLHESQLDKMPALPAKGNLNLRDILKSDFAFA

SEQ ID NO: 767 - DNA, 2670 bp, synthetic construct
  misc_feature 1..2670: note = Variant of RNA polymerase
  source 1..2670: mol_type = other DNA
atgcaccatcaccatcaccatatgaacacgattaacattgctaagaacgacttctctgacatcgaactggctgctatcccgttcaacactctggctgaccattacggtgagcgtttagctcgcgaacagttggcccttgagcatgagtcttacgagatgggtgaagcacgcttccgcaagatgtttgagcgtcaacttaaagctggtgaggttgcggataacgctgccgccaagcctctcatcactaccctactccctaagatgattgcacgcatcaacgactggtttgaggaagtgaaagctaagcgcggcaagcgcccgacagccttccagttcctgcaagaaatcaagccggaagccgtagcgtacatcaccattaagaccactctggcttgcctaaccagtgcggacaatacaaccgttcaggctgtagcaagcgcaatcggtcgggccattgaggacgaggctcgcttcggtcgtatccgtgaccttgaagctaagcacttcaagaaaattgttgaggaacaactcaacaagcgcgtagggcacgtctacaagaaagcatttatgcaagttgtcgaggctgacatgctctctaagggtctactcggtggcgaggcgtggtcttcgtggcataaggaagactctattcatgtaggagtacgctgcatcgagatgctcattgagtcaaccggaatggttagcttacaccgccaaaatgctggcgtagtaggtcaagactctgagactatcgaactcgcacctgaatacgctgaggctatcgcaacccgtgcaggtgcgctggctggcatctctccgatgttccaaccttgcgtagttcctcctaagccgtggactggcattactggtggtggctattgggctgcggggcgcaaacccctgcagttagtacgtactcgcagtctggcggcgcttcgccgctatgaagaagtgtcgatgccggaggtcatcaaagcagtcaacattgcgcagaatacagcatggcgtattaacaagaaagttctcgacgtagcgaatgccatcacccaatggcagcactgtccagtcgcggatgtgcctgcgatggatcgtggcgaaatgccagctcgtccgttggacatcgataccaacgagattgcacttaaagcgtggaagaaagaagcttccgcgttctaccgcaaagacaaagcacgcgttagccgtcgtctgtcaatggagtttatgttatctcaggcgaacaagtttgcgaattataaagcaatctggtttccgcaaaacatggattggcgtgggcgcgtgtacgctgtcccgatgttcaatcctcagggcaacgatatgacgaaaggcctgctgacctttgcgcaggagaaacccattggtgaagacggcttctattggctcaagattcatggcgcaaatacagctggagtggataaagtaccgtttccacaacgcatcaaatttgttgaggataaccatacgaatattatggaatgcgcgaaagcaccgctggaaaacacttggtgggcggaacaggactcgccgttctgttttctggcgttctgctttgagtatgctggcgtcatcaatagtggtctgtcgtacaactgtagcttgcctctggcatttgatggtagttgctccggcattcaacatttctcagcgatgttacgcgacgaaattggcgccaaagctgtgaatctcctcccatctgcggaataccaggatatttatcgtatcgtcagcgacaaagttaacgaggtactgaaacaagatctgattaacggtacctctaccaccgtggaaacggtgactgataagaagacaggcgaaattacccaacgcacgaaatacgggaccaaagttatggcacagtggtggttagaacacggtgtgaatcgtggcgtcacgaaacgctcggttatgactttggtgtatgggagcaaagagtttggattccgcgatcaagtgctgagtgacaccattcaaccggcgatcgataacggcaaaggtgacatgtttctgaatccgaatcaggctgctggttacatggcgaaactgatctggaacgcagtgtccgggaccgtagtcgcagcagttgaggcgatgaactggctgaaaagtgcggcgaaattacttgctgctgaagtgaaggatcctaagacggatacagttctgcgtggccgctgcgcagtacattgggtgactcccgacggcttccctgtgtggcaggaatacaagaagcctattcagacgcgcttgaacctgatgttcctcggtcagttccgcttacagcctaccattaacaccaacaaagatagcgagattgatgcacacaaacaggagtctggtatcgctcctaactttgtacacagccaagacggtaaccaccttcgtatgactgtagtgtgggcacacgagaagtacggaatcgaatcttttgcactgattcacgactccttcggtaccattccggctgacgctgcgaacctgttcaaagcagtgcgcgaaactatggtttcgacatatgagtcttgtgatgtactggctgatttctacgaccagttcgctgaccagttgcacgagtctcaattggacaaaatgccagcacttccggctaaaggtaacttgaacctccgtgacatcttaaaatcggacttcgcgttcgcg

SEQ ID NO: 768 - protein, 890 aa, synthetic construct
  REGION 1..890: note = Variant of RNA polymerase
MHHHHHHMNTINIAKNDFSDIELAAIPFNTLADHYGERLAREQLALEHESYEMGEARFRKMFERQLKAGEVADNAAAKPLITTLLPKMIARINDWFEEVKAKRGKRPTAFQFLQEIKPEAVAYITIKTTLACLTSADNTTVQAVASAIGRAIEDEARFGRIRDLEAKHFKKIVEEQLNKRVGHVYKKAFMQVVEADMLSKGLLGGEAWSSWHKEDSIHVGVRCIEMLIESTGMVSLHRQNAGVVGQDSETIELAPEYAEAIATRAGALAGISPMFQPCVVPPKPWTGITGGGYWAAGRKPLQLVRTRSLAALRRYEEVSMPEVIKAVNIAQNTAWRINKKVLDVANAITQWQHCPVADVPAMDRGEMPARPLDIDTNEIALKAWKKEASAFYRKDKARVSRRLSMEFMLSQANKFANYKAIWFPQNMDWRGRVYAVPMFNPQGNDMTKGLLTFAQEKPIGEDGFYWLKIHGANTAGVDKVPFPQRIKFVEDNHTNIMECAKAPLENTWWAEQDSPFCFLAFCFEYAGVINSGLSYNCSLPLAFDGSCSGIQHFSAMLRDEIGAKAVNLLPSAEYQDIYRIVSDKVNEVLKQDLINGTSTTVETVTDKKTGEITQRTKYGTKVMAQWWLEHGVNRGVTKRSVMTLVYGSKEFGFRDQVLSDTIQPAIDNGKGDMFLNPNQAAGYMAKLIWNAVSGTVVAAVEAMNWLKSAAKLLAAEVKDPKTDTVLRGRCAVHWVTPDGFPVWQEYKKPIQTRLNLMFLGQFRLQPTINTNKDSEIDAHKQESGIAPNFVHSQDGNHLRMTVVWAHEKYGIESFALIHDSFGTIPADAANLFKAVRETMVSTYESCDVLADFYDQFADQLHESQLDKMPALPAKGNLNLRDILKSDFAFA

SEQ ID NO: 769 - DNA, 2670 bp, synthetic construct
  misc_feature 1..2670: note = Variant of RNA polymerase
  source 1..2670: mol_type = other DNA
atgcaccatcaccatcaccatatgaacacgattaacattgctaagaacgacttctctgacatcgaactggctgctatcccgttcaacactctggctgaccattacggtgagcgtttagctcgcgaacagttggcccttgagcatgagtcttacgagatgggtgaagcacgcttccgcaagatgtttgagcgtcaacttaaagctggtgaggttgcggataacgctgccgccaagcctctcatcactaccctactccctaagatgattgcacgcatcaacgactggtttgaggaagtgaaagctaagcgcggcaagcgcccgacagccttccagttcctgcaagaaatcaagccggaagccgtagcgtacatcaccattaagaccactctggcttgcctaaccagtgcggacaatacaaccgttcaggctgtagcaagcgcaatcggtcgggccattgaggacgaggctcgcttcggtcgtatccgtgaccttgaagctaagcacttcaagaagaacgttgaggaacaactcaacaagcgcgtagggcacccgtacaagaaagcatttatgcaagttgtcgaggaagacatgctctctaagggtctactcggtggcgaggcgtggtcttcgtggcataaggaagactctattcatgtaggagtacgctgcatcgagatgctcattgagtcaaccggaatggttagcttacaccgccaaaatgctggcgtagtaggtcaagactctgagactatcgaactcgcacctgaatacgctgaggctatcgcaacccgtgcaggtgcgctggctggcatctctccgatgttccaaccttgcgtagttcctcctaagccgtggactggcattactggtggtggctattgggctgcggggcgcaaacccctgcagttagtacgtactcgcagtctggcggcgcttcgccgctatgaagaagtgtcgatgccggaggtcatcaaagcagtcaacattgcgcagaatacagcatggcgtattaacaagaaagttctcgacgtagcgaatgccatcacccaatggcagcactgtccagtcgcggatgtgcctgcgatggatcgtggcgaaatgccagctcgtccgttggacatcgataccaacgagattgcacttaaagcgtggaagaaagaagcttccgcgttctaccgcaaagacaaagcacgcgttagccgtcgtctgtcaatggagtttatgttatctcaggcgaacaagtttgcgaattataaagcaatctggtttccgcaaaacatggattggcgtgggcgcgtgtacgctgtcccgatgttcaatcctcagggcaacgatatgacgaaaggcctgctgacctttgcgcaggagaaacccattggtgaagacggcttctattggctcaagattcatggcgcaaatacagctggagtggataaagtaccgtttccacaacgcatcaaatttgttgaggataaccatacgaatattatggaatgcgcgaaagcaccgctggaaaacacttggtgggcggaacaggactcgccgttctgttttctggcgttctgctttgagtatgctggcgtcatcaatcacggtctgtcgtacaactgtagcttgcctctggcatttgatggtagttgctccggcattcaacatttctcagcgatgttacgcgacgaaattggcggcaaagctgtgaatctcctcccatctgcggaataccaggatatttatcgtatcgtcagcgacaaagttaacgaggtactgaaacaagatctgattaacggtacctctaccaccgtggaaacggtgactgataagaagacaggcgaaattacccaacgcacgaaatacgggaccaaagttatggcacagtggtggttagaacacggtgtgaatcgtggcgtcacgaaacgctcggttatgactttggtgtatgggagcaaagagtttggattccgcgatcaagtgctgagtgacaccattcaaccggcgatcgataacggcaaaggtgacatgtttctgaatccgaatcaggctgctggttacatggcgaaactgatctggaacgcagtgtccgggaccgtagtcgcagcagttgaggcgatgaactggctgaaaagtgcggcgaaattacttgctgctgaagtgaaggatcctaagacggatacagttctgcgtggccgctgcgcagtacattgggtgactcccgacggcttccctgtgtggcaggaatacaagaagcctattcagacgcgcttgaacctgatgttcctcggtcagttccgcttacagcctaccattaacaccaacaaagatagcgagattgatgcacacaaacaggagtctggtatcgctcctaactttgtacacagccaagacggtaaccaccttcgtatgactgtagtgtgggcacacgagaagtacggaatcgaatcttttgcactgattcacgactccttcggtaccattccggctgacgctgcgaacctgttcaaagcagtgcgcgaaactatggtttcgacatatgagtcttgtgatgtactggctgatttctacgaccagttcgctgaccagttgcacgagtctcaattggacaaaatgccagcacttccggctaaaggtaacttgaacctccgtgacatcttaaaatcggacttcgcgttcgcg

SEQ ID NO: 770 - protein, 890 aa, synthetic construct
  REGION 1..890: note = Variant of RNA polymerase
MHHHHHHMNTINIAKNDFSDIELAAIPFNTLADHYGERLAREQLALEHESYEMGEARFRKMFERQLKAGEVADNAAAKPLITTLLPKMIARINDWFEEVKAKRGKRPTAFQFLQEIKPEAVAYITIKTTLACLTSADNTTVQAVASAIGRAIEDEARFGRIRDLEAKHFKKNVEEQLNKRVGHPYKKAFMQVVEEDMLSKGLLGGEAWSSWHKEDSIHVGVRCIEMLIESTGMVSLHRQNAGVVGQDSETIELAPEYAEAIATRAGALAGISPMFQPCVVPPKPWTGITGGGYWAAGRKPLQLVRTRSLAALRRYEEVSMPEVIKAVNIAQNTAWRINKKVLDVANAITQWQHCPVADVPAMDRGEMPARPLDIDTNEIALKAWKKEASAFYRKDKARVSRRLSMEFMLSQANKFANYKAIWFPQNMDWRGRVYAVPMFNPQGNDMTKGLLTFAQEKPIGEDGFYWLKIHGANTAGVDKVPFPQRIKFVEDNHTNIMECAKAPLENTWWAEQDSPFCFLAFCFEYAGVINHGLSYNCSLPLAFDGSCSGIQHFSAMLRDEIGGKAVNLLPSAEYQDIYRIVSDKVNEVLKQDLINGTSTTVETVTDKKTGEITQRTKYGTKVMAQWWLEHGVNRGVTKRSVMTLVYGSKEFGFRDQVLSDTIQPAIDNGKGDMFLNPNQAAGYMAKLIWNAVSGTVVAAVEAMNWLKSAAKLLAAEVKDPKTDTVLRGRCAVHWVTPDGFPVWQEYKKPIQTRLNLMFLGQFRLQPTINTNKDSEIDAHKQESGIAPNFVHSQDGNHLRMTVVWAHEKYGIESFALIHDSFGTIPADAANLFKAVRETMVSTYESCDVLADFYDQFADQLHESQLDKMPALPAKGNLNLRDILKSDFAFA

SEQ ID NO: 771 - DNA, 2670 bp, synthetic construct
  misc_feature 1..2670: note = Variant of RNA polymerase
  source 1..2670: mol_type = other DNA
atgcaccatcaccatcaccatatgaacacgattaacattgctaagaacgacttctctgacatcgaactggctgctatcccgttcaacactctggctgaccattacggtgagcgtttagctcgcgaacagttggcccttgagcatgagtcttacgagatgggtgaagcacgcttccgcaagatgtttgagcgtcaacttaaagctggtgaggttgcggataacgctgccgccaagcctctcatcactaccctactccctaagatgattgcacgcatcaacgactggtttgaggaagtgaaagctaagcgcggcaagcgcccgacagccttccagttcctgcaagaaatcaagccggaagccgtagcgtacatcaccattaagaccactctggcttgcctaaccagtgcggacaatacaaccgttcaggctgtagcaagcgcaatcggtcgggccattgaggacgaggctcgcttcggtcgtatccgtgaccttgaagctaagcacttcaagaagaacgttgaggaacaactcaacaagcgcgtagggcacgtctaccaaaaagcatttatgcaagttgtcgaggctgacatgctctctaagggtctactcggtggcgaggcgtggtcttcgtggcataaggaagactctattcatgtaggagtacgctgcatcgagatgctcattgagtcaaccggaatggttagcttacaccgccaaaatgctggcgtagtaggtcaagactctgagactatcgaactcgcacctgaatacgctgaggctatcgcaacccgtgcaggtgcgctggctggcatctctccgatgttccaaccttgcgtagttcctcctaagccgtggactggcattactggtggtggctattgggctgcggggcgcaaacccctgcagttagtacgtactcgcagtctggcggcgcttcgccgctatgaagaagtgtcgatgccggaggtcatcaaagcagtcaacattgcgcagaatacagcatggcgtattaacaagaaagttctcgacgtagcgaataccatcacccaatggcagcactgtccagtcgcggatgtgcctgcgatggatcgtggcgaaatgccagctcgtccgttggacatcgataccaacgagattgcacttaaagcgtggaagaaagaagcttccgcgttctaccgcaaagacaaagcacgcgttagccgtcgtctgtcaatggagtttatgttatctcaggcgaacaagtttgcgaattataaagcaatctggtttccgcaaaacatggattggcgtgggcgcgtgtacgctgtcccgatgttcaatcctcagggcaacgatatgacgaaaggcctgctgacctttgcgcaggagaaacccattggtgaagacggcttctattggctcaagattcatggcgcaaatacagctggagtggataaagtaccgtttccacaacgcatcaaatttgttgaggataaccatacgaatattatggaatgcgcgaaagcaccgctggaaaacacttggtgggcggaacaggactcgccgttctgttttctggcgttctgctttgagtatgctggcgtcatcaatcacggtctgtcgtacaactgtagcttgcctctggcatttgatggtagttgctccggcattcaacatttctcagcgatgttacgcgacgaaattggcggcaaagctgtgaatctcctcccatctgcggaataccaggatatttatcgtatcgtcagcgacaaagttaacgaggtgctgaaacaagatctgattaacggtacctctaccaccgtggaaacggtgactgataagaagacaggcgaaattacccaacgcacgaaatacgggaccaaagttatggcacagtggtggttagaacacggtgtgaatcgtggcgtcacgaaacgctcggttatgactttggtgtatgggagcaaagagtttggattccgcgatcaagtgctgagtgacaccattcaaccggcgatcgataacggcaaaggtgacatgtttctgaatccgaatcaggctgctggttacatggcgaaactgatctggaacgcagtgtccgggaccgtagtcgcagcagttgaggcgatgaactggctgaaaagtgcggcgaaattacttgctgctgaagtgaaggatcctaagacggatacagttctgcgtggccgctgcgcagtacattgggtgactcccgacggcttccctgtgtggcaggaatacaagaagcctattcagacgcgcttgaacctgatgttcctcggtcagttccgcttacagcctaccattaacaccaacaaagatagcgagattgatgcacacaaacaggagtctggtatcgctcctaactttgtacacagccaagacggtaaccaccttcgtatgactgtagtgtgggcacacgagaagtacggaatcgaatcttttgcactgattcacgactccttcggtaccattccggctgacgctgcgaacctgttcaaagcagtgcgcgaaactatggtttcgacatatgagtcttgtgatgtactggctgatttctacgaccagttcgctgaccagttgcacgagtctcaattggacaaaatgccagcacttccggctaaaggtaacttgaacctccgtgacatcttaaaatcggacttcgcgttcgcg

SEQ ID NO: 772 - protein, 890 aa, synthetic construct
  REGION 1..890: note = Variant of RNA polymerase
MHHHHHHMNTINIAKNDFSDIELAAIPFNTLADHYGERLAREQLALEHESYEMGEARFRKMFERQLKAGEVADNAAAKPLITTLLPKMIARINDWFEEVKAKRGKRPTAFQFLQEIKPEAVAYITIKTTLACLTSADNTTVQAVASAIGRAIEDEARFGRIRDLEAKHFKKNVEEQLNKRVGHVYQKAFMQVVEADMLSKGLLGGEAWSSWHKEDSIHVGVRCIEMLIESTGMVSLHRQNAGVVGQDSETIELAPEYAEAIATRAGALAGISPMFQPCVVPPKPWTGITGGGYWAAGRKPLQLVRTRSLAALRRYEEVSMPEVIKAVNIAQNTAWRINKKVLDVANTITQWQHCPVADVPAMDRGEMPARPLDIDTNEIALKAWKKEASAFYRKDKARVSRRLSMEFMLSQANKFANYKAIWFPQNMDWRGRVYAVPMFNPQGNDMTKGLLTFAQEKPIGEDGFYWLKIHGANTAGVDKVPFPQRIKFVEDNHTNIMECAKAPLENTWWAEQDSPFCFLAFCFEYAGVINHGLSYNCSLPLAFDGSCSGIQHFSAMLRDEIGGKAVNLLPSAEYQDIYRIVSDKVNEVLKQDLINGTSTTVETVTDKKTGEITQRTKYGTKVMAQWWLEHGVNRGVTKRSVMTLVYGSKEFGFRDQVLSDTIQPAIDNGKGDMFLNPNQAAGYMAKLIWNAVSGTVVAAVEAMNWLKSAAKLLAAEVKDPKTDTVLRGRCAVHWVTPDGFPVWQEYKKPIQTRLNLMFLGQFRLQPTINTNKDSEIDAHKQESGIAPNFVHSQDGNHLRMTVVWAHEKYGIESFALIHDSFGTIPADAANLFKAVRETMVSTYESCDVLADFYDQFADQLHESQLDKMPALPAKGNLNLRDILKSDFAFA

SEQ ID NO: 773 - DNA, 2670 bp, synthetic construct
  misc_feature 1..2670: note = Variant of RNA polymerase
  source 1..2670: mol_type = other DNA
atgcaccatcaccatcaccatatgaacacgattaacattgctaagaacgacttctctgacatcgaactggctgctatcccgttcaacactctggctgaccattacggtgagcgtttagctcgcgaacagttggcccttgagcatgagtcttacgagatgggtgaagcacgcttccgcaagatgtttgagcgtcaacttaaagctggtgaggttgcggataacgctgccgccaagcctctcatcactaccctactccctaagatgattgcacgcatcaacgactggtttgaggaagtgaaagctaagcgcggcaagcgcccgacagccttccagttcctgcaagaaatcaagccggaagccgtagcgtacatcaccattaagaccactctggcttgcctaaccagtgcggacaatacaaccgttcaggctgtagcaagcgcaatcggtcgggccattgaggacgaggctcgcttcggtcgtatccgtgaccttgaagctaagcacttcaagaaaaacgttgaggaacaactcaacaagcgcgtagggcacgtctacaagaaagcatttatgcaagttgtcgaggctgacatgctctctaagggtctactcggtggcgaggcgtggtcttcgtggcataaggaagactctattcatgtaggagtacgctgcatcgagatgctcattgagtcaaccggaatggttagcttacaccgccaaaatgctggcgtagtaggtcaagactctgagactatcgaactcgcacctgaatacgctgaggctatcgcaacccgtgcaggtgcgctggctggcatctctccgatgttccaaccttgcgtagttcctcctaagccgtggactggcattactggtggtggctattgggctgcggggcgcaaacccctgcagttagtacgtactcgcagtctggcggcgcttcgccgctatgaagaagtgtcgatgccggaggtcatcaaagcagtcaacattgcgcagaatacagcatggcgtattaacaagaaagttctcgacgtagcgaatgcaatcacccaatggcagcactgtccagtcgcggatgtgcctgcgatggatcgtggcgaaatgccagctcgtccgttggacatcgataccaacgagattgcacttaaagcgtggaagaaagaagcttccgcgttctaccgcaaagacaaagcacgcgttagccgtcgtctgtcaatggagtttatgttatctcaggcgaacaagtttgcgaattataaagcaatctggtttccgcaaaacatggattggcgtgggcgcgtgtacgctgtcccgatgttcaatcctcagggcaacgatatgacgaaaggcctgctgacctttgcgcaggagaaacccattggtgaagacggcttctattggctcaagattcatggcgcaaatacagctggagtggataaagtaccgtttccacaacgcatcaaatttgttgaggataaccatacgaatattatggaatgcgcgaaagcaccgctggaaaacacttggtgggcggaacaggactcgccgttctgttttctggcgttctgctttgagtatgctggcgtcatcaatagtggtctgtcgtacaactgtagcttgcctctggcatttgatggtagttgctccggcatccaacatttctcagcgatgttacgcgacgaaattggcggcaaagctgtgaatctcctcccatctgcggaataccaggatatttatcgtatcgtcagcgacaaagttaacgagcgtctgaaacaagatctgattaacggtacctctaccaccgtggaaacggtgactgataagaagacaggcgaaattacccaacgcacgaaatacgggaccaaagttatggcacagtggtggttagaacacggtgtgaatcgtggcgtcacgaaacgctcggttatgactttggtgtatgggagcaaagagtttggattccgcgatcaagtgctgagtgacaccattcaaccggcgatcgataacggcaaaggtgacatgtttctgaatccgaatcaggctgctggttacatggcgaaactgatctggaacgcagtgtccgggaccgtagtcgcagcagttgaggcgatgaactggctgaaaagtgcggcgaaattacttgctgctgaagtgaaggatcctaagacggatacagttctgcgtggccgctgcgcagtacattgggtgactcccgacggcttccctgtgtggcaggaatacaagaagcctattcagacgcgcttgaacctgatgttcctcggtcagttccgcttacagcctaccattaacaccaacaaagatagcgagattgatgcacacaaacaggagtctggtatcgctcctaactttgtacacagccaagacggtaaccaccttcgtatgactgtagtgtgggcacacgagaagtacggaatcgaatcttttgcactgattcacgactccttcggtaccattccggctgacgctgcgaacctgttcaaagcagtgcgcgaaactatggtttcgacatatgagtcttgtgatgtactggctgatttctacgaccagttcgctgaccagttgcacgagtctcaattggacaaaatgccagcacttccggctaaaggtaacttgaacctccgtgacatcttaaaatcggacttcgcgttcgcg

SEQ ID NO: 774 - protein, 890 aa, synthetic construct
  REGION 1..890: note = Variant of RNA polymerase
MHHHHHHMNTINIAKNDFSDIELAAIPFNTLADHYGERLAREQLALEHESYEMGEARFRKMFERQLKAGEVADNAAAKPLITTLLPKMIARINDWFEEVKAKRGKRPTAFQFLQEIKPEAVAYITIKTTLACLTSADNTTVQAVASAIGRAIEDEARFGRIRDLEAKHFKKNVEEQLNKRVGHVYKKAFMQVVEADMLSKGLLGGEAWSSWHKEDSIHVGVRCIEMLIESTGMVSLHRQNAGVVGQDSETIELAPEYAEAIATRAGALAGISPMFQPCVVPPKPWTGITGGGYWAAGRKPLQLVRTRSLAALRRYEEVSMPEVIKAVNIAQNTAWRINKKVLDVANAITQWQHCPVADVPAMDRGEMPARPLDIDTNEIALKAWKKEASAFYRKDKARVSRRLSMEFMLSQANKFANYKAIWFPQNMDWRGRVYAVPMFNPQGNDMTKGLLTFAQEKPIGEDGFYWLKIHGANTAGVDKVPFPQRIKFVEDNHTNIMECAKAPLENTWWAEQDSPFCFLAFCFEYAGVINSGLSYNCSLPLAFDGSCSGIQHFSAMLRDEIGGKAVNLLPSAEYQDIYRIVSDKVNERLKQDLINGTSTTVETVTDKKTGEITQRTKYGTKVMAQWWLEHGVNRGVTKRSVMTLVYGSKEFGFRDQVLSDTIQPAIDNGKGDMFLNPNQAAGYMAKLIWNAVSGTVVAAVEAMNWLKSAAKLLAAEVKDPKTDTVLRGRCAVHWVTPDGFPVWQEYKKPIQTRLNLMFLGQFRLQPTINTNKDSEIDAHKQESGIAPNFVHSQDGNHLRMTVVWAHEKYGIESFALIHDSFGTIPADAANLFKAVRETMVSTYESCDVLADFYDQFADQLHESQLDKMPALPAKGNLNLRDILKSDFAFA

SEQ ID NO: 775 - DNA, 2670 bp, synthetic construct
  misc_feature 1..2670: note = Variant of RNA polymerase
  source 1..2670: mol_type = other DNA
atgcaccatcaccatcaccatatgaacacgattaacattgctaagaacgacttctctgacatcgaactggctgctatcccgttcaacactctggctgaccattacggtgagcgtttagctcgcgaacagttggcccttgagcatgagtcttacgagatgggtgaagcacgcttccgcaagatgtttgagcgtcaacttaaagctggtgaggttgcggataacgctgccgccaagcctctcatcactaccctactccctaagatgattgcacgcatcaacgactggtttgaggaagtgaaagctaagcgcggcaagcgcccgacagccttccagttcctgcaagaaatcaagccggaagccgtagcgtacatcaccattaagaccactctggcttgcctaaccagtgcggacaatacaaccgttcaggctgtagcaagcgcaatcggtcgggccattgaggacgaggctcgcttcggtcgtatccgtgaccttgaagctaagcacttcaagaaaaatgttgaggaacaactcaacaagcgcgtagggcacgtctacaagaaagcatttatgcaagttgtcgaggctgacatgctctctaagggtctactcggtggcgaggcgtggtcttcgtggcataaggaagactctattcatgtaggagtacgctgcatcgagatgctcattgagtcaaccggaatggttagcttacaccgccaaaatgctggcgtagtaggtcaagactctgagactatcgaactcgcacctgaatacgctgaggctatcgcaacccgtgcaggtgcgctggctggcatctctccgatgttccaaccttgcgtagttcctcctaagccgtggactggcattactggtggtggctattgggctgcggggcgcaaacccctgcagttagtacgtactcgcagtctggcggcgcttcgccgctatgaagaagtgtcgatgccggaggtcatcaaagcagtcaacattgcgcagaatacagcatggcgtattaacaagaaagttctcgacgtagcgaatgcaatcacccaatggcagcactgtccagtcgcggatgtgcctgcgatggatcgtggcgaaatgccagctcgtccgttggacatcgataccaacgagattgcacttaaagcgtggaagaaagaagcttccgcgttctaccgcaaagacaaagcacgcgttagccgtcgtctgtcaatggagtttatgttatctcaggcgaacaagtttgcgaatgagaaagcaatctggtttccgcaaaacatggattggcgtgggcgcgtgtacgctgtcccgatgttcaatcctcagggcaacgatatgacgaaaggcctgctgacctttgcgcaggagaaacccattggtgaagacggcttctattggctcaagattcatggcgcaaatacagctggagtggataaagtaccgtttccacaacgcatcaaatttgttgaggataaccatacgaatattatggaatgcgcgaaagcaccgctggaaaacacttggtgggcggaacaggactcgccgttctgttttctggcgttctgctttgagtatgctggcgtcatcaatagtggtctgtcgtacaactgtagcttgcctctggcatttgatggtagttgctccggcctgcaacatttctcagcgatgttacgcgacgaaattggcggcaaagctgtgaatctcctcccatctgcggaataccaggatatttatcgtatcgtcagcgacaaagttaacgaggtactgaaacaagatctgattaacggtacctctaccaccgtggaaacggtgactgataagaagacaggcgaaattacccaacgcacgaaatacgggaccaaagttatggcacagtggtggttagaacacggtgtgaatcgtggcgtcacgaaacgctcggttatgactttggtgtatgggagcaaagagtttggattccgcgatcaagtgctgagtgacaccattcaaccggcgatcgataacggcaaaggtgacatgtttctgaatccgaatcaggctgctggttacatggcgaaactgatctggaacgcagtgtccgggaccgtagtcgcagcagttgaggcgatgaactggctgaaaagtgcggcgaaattacttgctgctgaagtgaaggatcctaagacggatacagttctgcgtggccgctgcgcagtacattgggtgactcccgacggcttccctgtgtggcaggaatacaagaagcctattcagacgcgcttgaacctgatgttcctcggtcagttccgcttacagcctaccattaacaccaacaaagatagcgagattgatgcacacaaacaggagtctggtatcgctcctaactttgtacacagccaagacggtaaccaccttcgtatgactgtagtgtgggcacacgagaagtacggaatcgaatcttttgcactgattcacgactccttcggtaccattccggctgacgctgcgaacctgttcaaagcagtgcgcgaaactatggtttcgacatatgagtcttgtgatgtactggctgatttctacgaccagttcgctgaccagttgcacgagtctcaattggacaaaatgccagcacttccggctaaaggtaacttgaacctccgtgacatcttaaaatcggacttcgcgttcgcg

SEQ ID NO: 776 - protein, 890 aa, synthetic construct
  REGION 1..890: note = Variant of RNA polymerase
MHHHHHHMNTINIAKNDFSDIELAAIPFNTLADHYGERLAREQLALEHESYEMGEARFRKMFERQLKAGEVADNAAAKPLITTLLPKMIARINDWFEEVKAKRGKRPTAFQFLQEIKPEAVAYITIKTTLACLTSADNTTVQAVASAIGRAIEDEARFGRIRDLEAKHFKKNVEEQLNKRVGHVYKKAFMQVVEADMLSKGLLGGEAWSSWHKEDSIHVGVRCIEMLIESTGMVSLHRQNAGVVGQDSETIELAPEYAEAIATRAGALAGISPMFQPCVVPPKPWTGITGGGYWAAGRKPLQLVRTRSLAALRRYEEVSMPEVIKAVNIAQNTAWRINKKVLDVANAITQWQHCPVADVPAMDRGEMPARPLDIDTNEIALKAWKKEASAFYRKDKARVSRRLSMEFMLSQANKFANEKAIWFPQNMDWRGRVYAVPMFNPQGNDMTKGLLTFAQEKPIGEDGFYWLKIHGANTAGVDKVPFPQRIKFVEDNHTNIMECAKAPLENTWWAEQDSPFCFLAFCFEYAGVINSGLSYNCSLPLAFDGSCSGLQHFSAMLRDEIGGKAVNLLPSAEYQDIYRIVSDKVNEVLKQDLINGTSTTVETVTDKKTGEITQRTKYGTKVMAQWWLEHGVNRGVTKRSVMTLVYGSKEFGFRDQVLSDTIQPAIDNGKGDMFLNPNQAAGYMAKLIWNAVSGTVVAAVEAMNWLKSAAKLLAAEVKDPKTDTVLRGRCAVHWVTPDGFPVWQEYKKPIQTRLNLMFLGQFRLQPTINTNKDSEIDAHKQESGIAPNFVHSQDGNHLRMTVVWAHEKYGIESFALIHDSFGTIPADAANLFKAVRETMVSTYESCDVLADFYDQFADQLHESQLDKMPALPAKGNLNLRDILKSDFAFA

SEQ ID NO: 777 - DNA, 2670 bp, synthetic construct
  misc_feature 1..2670: note = Variant of RNA polymerase
  source 1..2670: mol_type = other DNA
atgcaccatcaccatcaccatatgaacacgattaacattgctaagaacgacttctctgacatcgaactggctgctatcccgttcaacactctggctgaccattacggtgagcgtttagctcgcgaacagttggcccttgagcatgagtcttacgagatgggtgaagcacgcttccgcaagatgtttgagcgtcaacttaaagctggtgaggttgcggataacgctgccgccaagcctctcatcactaccctactccctaagatgattgcacgcatcaacgactggtttgaggaagtgaaagctaagcgcggcaagcgcccgacagccttccagttcctgcaagaaatcaagccggaagccgtagcgtacatcaccattaagaccactctggcttgcctaaccagtgcggacaatacaaccgttcaggctgtagcaagcgcaatcggtcgggccattgaggacgaggctcgcttcggtcgtatccgtgaccttgaagctaagcacttcaagaaaaacgttgaggaacaactcaacaagcgcgtagggcacgtctacaagaaagcatttatgcaagttgtcgaggctgacatgctctctaagggtctactcggtggcgaggcgtggtcttcgtggcataaggaagactctattcatgtaggagtacgctgcatcgagatgctcattgagtcaaccggaatggttagcttacaccgccaaaatgctggcgtagtaggtcaagactctgagactatcgaactcgcacctgaatacgctgaggctatcgcaacccgtgcaggtgcgctggctggcatctctccgatgttccaaccttgcgtagttcctcctaagccgtggactggcattactggtggtggctattgggctgcggggcgcaaacccctgcagttagtacgtactcgcagtctggcggcgcttcgccgctatgaagaagtgtcgatgccggaggtcatcaaagcagtcaacattgcgcagaatacagcatggcgtattaacaagaaagttctcgacgtagcgaatgcaatcacccaatggcagcactgtccagtcgcggatgtgcctgcgatggatcgtggcgaaatgccagctcgtccgttggacatcgataccaacgagattgcacttaaagcgtggaagaaagaagcttccgcgttctaccgcaaagacaaagcacgcgttagccgtcgtctgtcaatggagtttatgttatctcaggcgaacaagtttgcgaattataaagcaatctggtttccgcaaaacatggattggcgtgggcgcgtgtacgctgtcccgatgttcaatcctcagggcaacgatatgacgaaaggcctgctgacctttgcgcaggagaaacccattggtgaagacggcttctattggctcaagattcatggcgcaaatacagctggagtggataaagtaccgtttccacaacgcatcaaatttgttgaggataaccatacgaatattatggaatgcgcgaaagcaccgctggaaaacacttggtgggcggaacaggactcgccgttctgttttctggcgttctgctttgagtatgctggcgtcatcaatcacggtctgtcgtacaactgtagcttgcctctggcatttgatggtagttgctccggcattcaacatttctcagcgatgttacgcgacgaaattggcggcaaagctgtgaatctcctcccatctgcggaataccaggatatttatcgtatcgtcagcgacaaagttaacgaggtactgaaacaagatctgattaacggtacctctaccaccgtggaaacggtgactgataagaagacaggcgaaattacccaacgcacgaaatacgggaccaaaactatggcacagtggtggttagaacacggtgtgaatcgtggcgtcacgaaacgctcggttatgactttggtgtatgggagcaaagagtttggattccgcgatcaagtgctgagtgacaccattcaaccggcgatcgataacggcaaaggtgacatgtttctgaatccgaatcaggctgctggttacatggcgaaactgatctggaacgcagtgtccgggaccgtagtcgcagcagttgaggcgatgaactggctgaaaagtgcggcgaaattacttgctgctgaagtgaaggatcctaagacggatacagttctgcgtggccgctgcgcagtacattgggtgactcccgacggcttccctgtgtggcaggaatacaagaagcctattcagacgcgcttgaacctgatgttcctcggtcagttccgcttacagcctaccattaacaccaacaaagatagcgagattgatgcacacaaacaggagtctggtatcgctcctaactttgtacacagccaagacggtaaccaccttcgtatgactgtagtgtgggcacacgagaagtacggaatcgaatcttttgcactgattcacgactccttcggtaccattccggctgacgctgcgaacctgttcaaagcagtgcgcgaaactatggtttcgacatatgagtcttgtgatgtactggctgatttctacgaccagttcgctgaccagttgcacgagtctcaattggacaaaatgccagcacttccggctaaaggtaacttgaacctccgtgacatcttaaaatcggacttcgcgttcgcg

SEQ ID NO: 778 - protein, 890 aa, synthetic construct
  REGION 1..890: note = Variant of RNA polymerase
MHHHHHHMNTINIAKNDFSDIELAAIPFNTLADHYGERLAREQLALEHESYEMGEARFRKMFERQLKAGEVADNAAAKPLITTLLPKMIARINDWFEEVKAKRGKRPTAFQFLQEIKPEAVAYITIKTTLACLTSADNTTVQAVASAIGRAIEDEARFGRIRDLEAKHFKKNVEEQLNKRVGHVYKKAFMQVVEADMLSKGLLGGEAWSSWHKEDSIHVGVRCIEMLIESTGMVSLHRQNAGVVGQDSETIELAPEYAEAIATRAGALAGISPMFQPCVVPPKPWTGITGGGYWAAGRKPLQLVRTRSLAALRRYEEVSMPEVIKAVNIAQNTAWRINKKVLDVANAITQWQHCPVADVPAMDRGEMPARPLDIDTNEIALKAWKKEASAFYRKDKARVSRRLSMEFMLSQANKFANYKAIWFPQNMDWRGRVYAVPMFNPQGNDMTKGLLTFAQEKPIGEDGFYWLKIHGANTAGVDKVPFPQRIKFVEDNHTNIMECAKAPLENTWWAEQDSPFCFLAFCFEYAGVINHGLSYNCSLPLAFDGSCSGIQHFSAMLRDEIGGKAVNLLPSAEYQDIYRIVSDKVNEVLKQDLINGTSTTVETVTDKKTGEITQRTKYGTKTMAQWWLEHGVNRGVTKRSVMTLVYGSKEFGFRDQVLSDTIQPAIDNGKGDMFLNPNQAAGYMAKLIWNAVSGTVVAAVEAMNWLKSAAKLLAAEVKDPKTDTVLRGRCAVHWVTPDGFPVWQEYKKPIQTRLNLMFLGQFRLQPTINTNKDSEIDAHKQESGIAPNFVHSQDGNHLRMTVVWAHEKYGIESFALIHDSFGTIPADAANLFKAVRETMVSTYESCDVLADFYDQFADQLHESQLDKMPALPAKGNLNLRDILKSDFAFA

SEQ ID NO: 779 - DNA, 2670 bp, synthetic construct
  misc_feature 1..2670: note = Variant of RNA polymerase
  source 1..2670: mol_type = other DNA
atgcaccatcaccatcaccatatgaacacgattaacattgctaagaacgacttctctgacatcgaactggctgctatcccgttcaacactctggctgaccattacggtgagcgtttagctcgcgaacagttggcccttgagcatgagtcttacgagatgggtgaagcacgcttccgcaagatgtttgagcgtcaacttaaagctggtgaggttgcggataacgctgccgccaagcctctcatcactaccctactccctaagatgattgcacgcatcaacgactggtttgaggaagtgaaagctaagcgcggcaagcgcccgacagccttccagttcctgcaagaaatcaagccggaagccgtagcgtacatcaccattaagaccactctggcttgcctaaccagtgcggacaatacaaccgttcaggctgtagcaagcgcaatcggtcgggccattgaggacgaggctcgcttcggtcgtatccgtgaccttgaagctaagcacgtcaagaaaaacgttgaggaacaactcaacaagcgcgtagggcacgtctacaagaaagcatttatgcaagttgtcgaggctgacatgctctctaagggtctactcggtggcgaggcgtggtcttcgtggcataaggaagactctattcatgtaggagtacgctgcatcgagatgctcattgagtcaaccggaatggttagcttacaccgccaaaatgctggcgtagtaggtcaagactctgagactatcgaactcgcacctgaatacgctgaggctatcgcaacccgtgcaggtgcgctggctggcatctctccgatgttccaaccttgcgtagttcctcctaagccgtggactggcattactggtggtggctattgggctgcggggcgcaaacccctgcagttagtacgtactcgcagtctggcggcgcttcgccgctatgaagaagtgtcgatgccggaggtcatcaaagcagtcaacattgcgcagaatacagcatggcgtattaacaagaaagttctcgacgtagcgaatgcaatcacccaatggcagcactgtccagtcgcggatgtgcctgcgatggatcgtggcgaaatgccagctcgtccgttggacatcgataccaacgagattgcacttaaagcgtggaagaaagaagcttccgcgttctaccgcaaagacaaagcacgcgttagccgtcgtctgtcaatggagtttatgttatctcaggcgaacaagtttgcgaattataacgcaatctggtttccgcaaaacatggattggcgtgggcgcgtgtacgctgtcccgatgttcaatcctcagggcaacgatatgacgaaaggcctgctgacctttgcgcaggagaaacccattggtgaagacggcttctattggctcaagattcatggcgcaaatacagctggagtggataaagtaccgtttccacaacgcatcaaatttgttgaggataaccatacgaatattatggaatgcgcgaaagcaccgctggaaaacacttggtgggcggaacaggactcgccgttctgttttctggcgttctgctttgagtatgctggcgtcatcaatcacggtctgtcgtacaactgtagcttgcctcaggcatttgatggtagttgctccggcattcaacatttctcagcgatgttacgcgacgaaattggcggcaaagctgtgaatctcctcccatctgcggaataccaggatatttatcgtatcgtcagcgacaaagttaacgaggtgctgaaacaagatctgattaacggtacctctaccaccgtggaaacggtgactgataagaagacaggcgaaattacccaacgcacgaaatacgggaccaaagttatggcacagtggtggttagaacacggtgtgaatcgtggcgtcacgaaacgctcggttatgactttggtgtatgggagcaaagagtttggattccgcgatcaagtgctgagtgacaccattcaaccggcgatcgataacggcaaaggtgacatgtttctgaatccgaatcaggctgctggttacatggcgaaactgatctggaacgcagtgtccgggaccgtagtcgcagcagttgaggcgatgaactggctgaaaagtgcggcgaaattacttgctgctgaagtgaaggatccaaagacggacacagttctgcgtggccgctgcgcagtacattgggtgactcccgacggcttccctgtgtggcaggaatacaagaagcctattcagacgcgcttgaacctgatgttcctcggtcagttccgcttacagcctaccattaacaccaacaaagatagcgagattgatgcacacaaacaggagtctggtatcgctcctaactttgtacacagccaagacggtaaccaccttcgtatgactgtagtgtgggcacacgagaagtacggaatcgaatcttttgcactgattcacgactccttcggtaccattccggctgacgctgcgaacctgttcaaagcagtgcgcgaaactatggtttcgacatatgagtcttgtgatgtactggctgatttctacgaccagttcgctgaccagttgcacgagtctcaattggacaaaatgccagcacttccggctaaaggtaacttgaacctccgtgacatcttaaaatcggacttcgcgttcgcg

SEQ ID NO: 780 - protein, 890 aa, synthetic construct
  REGION 1..890: note = Variant of RNA polymerase
MHHHHHHMNTINIAKNDFSDIELAAIPFNTLADHYGERLAREQLALEHESYEMGEARFRKMFERQLKAGEVADNAAAKPLITTLLPKMIARINDWFEEVKAKRGKRPTAFQFLQEIKPEAVAYITIKTTLACLTSADNTTVQAVASAIGRAIEDEARFGRIRDLEAKHVKKNVEEQLNKRVGHVYKKAFMQVVEADMLSKGLLGGEAWSSWHKEDSIHVGVRCIEMLIESTGMVSLHRQNAGVVGQDSETIELAPEYAEAIATRAGALAGISPMFQPCVVPPKPWTGITGGGYWAAGRKPLQLVRTRSLAALRRYEEVSMPEVIKAVNIAQNTAWRINKKVLDVANAITQWQHCPVADVPAMDRGEMPARPLDIDTNEIALKAWKKEASAFYRKDKARVSRRLSMEFMLSQANKFANYNAIWFPQNMDWRGRVYAVPMFNPQGNDMTKGLLTFAQEKPIGEDGFYWLKIHGANTAGVDKVPFPQRIKFVEDNHTNIMECAKAPLENTWWAEQDSPFCFLAFCFEYAGVINHGLSYNCSLPQAFDGSCSGIQHFSAMLRDEIGGKAVNLLPSAEYQDIYRIVSDKVNEVLKQDLINGTSTTVETVTDKKTGEITQRTKYGTKVMAQWWLEHGVNRGVTKRSVMTLVYGSKEFGFRDQVLSDTIQPAIDNGKGDMFLNPNQAAGYMAKLIWNAVSGTVVAAVEAMNWLKSAAKLLAAEVKDPKTDTVLRGRCAVHWVTPDGFPVWQEYKKPIQTRLNLMFLGQFRLQPTINTNKDSEIDAHKQESGIAPNFVHSQDGNHLRMTVVWAHEKYGIESFALIHDSFGTIPADAANLFKAVRETMVSTYESCDVLADFYDQFADQLHESQLDKMPALPAKGNLNLRDILKSDFAFA

SEQ ID NO: 781 - DNA, 2670 bp, synthetic construct
  misc_feature 1..2670: note = Variant of RNA polymerase
  source 1..2670: mol_type = other DNA
atgcaccatcaccatcaccatatgaacacgattaacattgctaagaacgacttctctgacatcgaactggctgctatcccgttcaacactctggctgaccattacggtgagcgtttagctcgcgaacagttggcccttgagcatgagtcttacgagatgggtgaagcacgcttccgcaagatgtttgagcgtcaacttaaagctggtgaggttgcggataacgctgccgccaagcctctcatcactaccctactccctaagatgattgcacgcatcaacgactggtttgaggaagtgaaagctaagcgcggcaagcgcccgacagccttccagttcctgcaagaaatcaagccggaagccgtagcgtacatcaccattaagaccactctggcttgcctaaccagtgcggacaatacaaccgttcaggctgtagcaagcgcaatcggtcgggccattgaggacgaggctcgcttcggtcgtatccgtgaccttgaagctaagcacttcaagaagaacgttgaggaacaactcaacaagcgcgtagggcacccgtacaagaaagcatttatgcaagttgtcgaggctgacgtgctctctaagggtctactcggtggcgaggcgtggtcttcgtggcataaggaagactctattcatgtaggagtacgctgcatcgagatgctcattgagtcaaccggaatggttagcttacaccgccaaaatgctggcgtagtaggtcaagactctgagactatcgaactcgcacctgaatacgctgaggctatcgcaacccgtgcaggtgcgctggctggcatctctccgatgttccaaccttgcgtagttcctcctaagccgtggactggcattactggtggtggctattgggctgcggggcgcaaacccctgcagttagtacgtactcgcagtctggcggcgcttcgccgctatgaagaagtgtcgatgccggaggtcatcaaagcagtcaacattgcgcagaatacagcatggcgtattaacaagaaagttctcgacgtagcgaatgccatcacccaatggcagcactgtccagtcgcggatgtgcctgcgatggatcgtggcgaaatgccagctcgtccgttggacatcgataccaacgagattgcacttaaagcgtggaagaaagaagcttccgcgttctaccgcaaagacaaagcacgcgttagccgtcgtctgtcaatggagtttatgttatctcaggcgaacaagtttgcgaatgagaaagcaatctggtttccgcaaaacatggattggcgtgggcgcgtgtacgctgtcccgatgttcaatcctcagggcaacgatatgacgaaaggcctgctgacctttgcgcaggagaaacccattggtgaagacggcttctattggctcaagattcatggcgcaaatacagctggagtggataaagtaccgtttccacaacgcatcaaatttgttgaggataaccatacgaatattatggaatgcgcgaaagcaccgctggaaaacacttggtgggcggaacaggactcgccgttctgttttctggcgttctgctttgagtatgctggcgtcatcaatagtggtctgtcgtacaactgtagcttgcctctggcatttgatggtagttgctccggcattcaacatttctcagcgatgttacgcgacgaaattggcggcaaagctgtgaatctcctcccatctgcggaataccaggatatttatcgtatcgtcagcgacaaagttaacgaggtactgaaacaagatctgattaacggtacctctaccaccgtggaaacggtgactgataagaagacaggcgaaattacccaacgcacgaaatacgggaccaaagttatggcacagtggtggttagaacacggtgtgaatcgtggcgtcacgaaacgctcggttatgactttggtgtatgggagcaaagagtttggattccgcgatcaagtgctgagtgacaccattcaaccggcgatcgataacggcaaaggtgacatgtttctgaatccgaatcaggctgctggttacatggcgaaactgatctggaacgcagtgtccgggaccgtagtcgcagcagttgaggcgatgaactggctgaaaagtgcggcgaaattacttgctgctgaagtgaaggatcctaagacggatacagttctgcgtggccgctgcgcagtacattgggtgactcccgacggcttccctgtgtggcaggaatacaagaagcctattcagacgcgcttgaacctgatgttcctcggtcagttccgcttacagcctaccattaacaccaacaaagatagcgagattgatgcacacaaacaggagtctggtatcgctcctaactttgtacacagccaagacggtaaccaccttcgtatgactgtagtgtgggcacacgagaagtacggaatcgaatcttttgcactgattcacgactccttcggtaccattccggctgacgctgcgaacctgttcaaagcagtgcgcgaaactatggtttcgacatatgagtcttgtgatgtactggctgatttctacgaccagttcgctgaccagttgcacgagtctcaattggacaaaatgccagcacttccggctaaaggtaacttgaacctccgtgacatcttaaaatcggacttcgcgttcgcg

SEQ ID NO: 782 - protein, 890 aa, synthetic construct
  REGION 1..890: note = Variant of RNA polymerase
MHHHHHHMNTINIAKNDFSDIELAAIPFNTLADHYGERLAREQLALEHESYEMGEARFRKMFERQLKAGEVADNAAAKPLITTLLPKMIARINDWFEEVKAKRGKRPTAFQFLQEIKPEAVAYITIKTTLACLTSADNTTVQAVASAIGRAIEDEARFGRIRDLEAKHFKKNVEEQLNKRVGHPYKKAFMQVVEADVLSKGLLGGEAWSSWHKEDSIHVGVRCIEMLIESTGMVSLHRQNAGVVGQDSETIELAPEYAEAIATRAGALAGISPMFQPCVVPPKPWTGITGGGYWAAGRKPLQLVRTRSLAALRRYEEVSMPEVIKAVNIAQNTAWRINKKVLDVANAITQWQHCPVADVPAMDRGEMPARPLDIDTNEIALKAWKKEASAFYRKDKARVSRRLSMEFMLSQANKFANEKAIWFPQNMDWRGRVYAVPMFNPQGNDMTKGLLTFAQEKPIGEDGFYWLKIHGANTAGVDKVPFPQRIKFVEDNHTNIMECAKAPLENTWWAEQDSPFCFLAFCFEYAGVINSGLSYNCSLPLAFDGSCSGIQHFSAMLRDEIGGKAVNLLPSAEYQDIYRIVSDKVNEVLKQDLINGTSTTVETVTDKKTGEITQRTKYGTKVMAQWWLEHGVNRGVTKRSVMTLVYGSKEFGFRDQVLSDTIQPAIDNGKGDMFLNPNQAAGYMAKLIWNAVSGTVVAAVEAMNWLKSAAKLLAAEVKDPKTDTVLRGRCAVHWVTPDGFPVWQEYKKPIQTRLNLMFLGQFRLQPTINTNKDSEIDAHKQESGIAPNFVHSQDGNHLRMTVVWAHEKYGIESFALIHDSFGTIPADAANLFKAVRETMVSTYESCDVLADFYDQFADQLHESQLDKMPALPAKGNLNLRDILKSDFAFA

SEQ ID NO: 783 - DNA, 2670 bp, synthetic construct
  misc_feature 1..2670: note = Variant of RNA polymerase
  source 1..2670: mol_type = other DNA
atgcaccatcaccatcaccatatgaacacgattaacattgctaagaacgacttctctgacatcgaactggctgctatcccgttcaacactctggctgaccattacggtgagcgtttagctcgcgaacagttggcccttgagcatgagtcttacgagatgggtgaagcacgcttccgcaagatgtttgagcgtcaacttaaagctggtgaggttgcggataacgctgccgccaagcctctcatcactaccctactccctaagatgattgcacgcatcaacgactggtttgaggaagtgaaagctaagcgcggcaagcgcccgacagccttccagttcctgcaagaaatcaagccggaagccgtagcgtacatcaccattaagaccactctggcttgcctaaccagtgcggacaatacaaccgttcaggctgtagcaagcgcaatcggtcgggccattgaggacgaggctcgcttcggtcgtatccgtgaccttgaagctaagcacgtcaagaaaaacgttgaggaacaactcaacaagcgcgtagggcacgtctacaagaaagcatttatgcaagttgtcgaggctgacatgctctctaagggtctactcggtggcgaggcgtggtcttcgtggcataaggaagactctattcatgtaggagtacgctgcatcgagatgctcattgagtcaaccggaatggttagcttacaccgccaaaatgctggcgtagtaggtcaagactctgagactatcgaactcgcacctgaatacgctgaggctatcgcaacccgtgcaggtgcgctggctggcatctctccgatgttccaaccttgcgtagttcctcctaagccgtggactggcattactggtggtggctattgggctgcggggcgcaaacccctgcagttagtacgtactcgcagtctggcggcgcttcgccgctatgaagaagtgtcgatgccggaggtcatcaaagcagtcaacattgcgcagaatacagcatggcgtattaacaagaaagttctcgacgtagcgaatgcaatcacccaatggcagcactgtccagtcgcggatgtgcctgcgatggatcgtggcgaaatgccagctcgtccgttggacatcgataccaacgagattgcacttaaagcgtggaagaaagaagcttccgcgttctaccgcaaagacaaagcacgcgttagccgtcgtctgtcaatggagtttatgttatctcaggcgaacaagtttgcgaattataaagcaatctggtttccgcaaaacatggattggcgtgggcgcgtgtacgctgtcccgatgttcaatcctcagggcaacgatatgacgaaaggcctgctgacctttgcgcaggagaaacccattggtgaagacggcttctattggctcaagattcatggcgcaaatacagctggagtggataaagtaccgtttccacaacgcatcaaatttgttgaggataaccatacgaatattatggaatgcgcgaaagcaccgctggaaaacacttggtgggcggaacaggactcgccgttctgttttctggcgttctgctttgagtatgctggcgtcatcaatcacggtctgtcgtacaactgtagcttgcctcaggcatttgatggtagttgctccggcattcaacatttctcagcgatgttacgcgacgaaattggcggcaaagctgtgaatctcctcccatctgcggaataccaggatatttatcgtatcgtcagcgacaaagttaacgaggtactgaaacaagatctgattaacggtacctctaccaccgtggaaacggtgactgataagaagacaggcgaaattacccaacgcacgaaatacgggaccaaagttatggcacagtggtggttagaacacggtgtgaatcgtggcgtcacgaaacgctcggttatgactttggtgtatgggagcaaagagtttggattccgcgatcaagtgctgagtgacaccattcaaccggcgatcgataacggcaaaggtgacatgtttctgaatccgaatcaggctgctggttacatggcgaaactgatctggaacgcagtgtccgggaccgtagtcgcagcagttgaggcgatgaactggctgaaaagtgcggcgaaattacttgctgctgaagtgaaggatcctaagacggatacagttctgcgtggccgctgcgcagtacattgggtgactcccgacggcttccctgtgtggcaggaatacaagaagcctattcagacgcgcttgaacctgatgttcctcggtcagttccgcttacagcctaccattaacaccaacaaagatagcgagattgatgcacacaaacaggagtctggtatcgctcctaactttgtacacagccaagacggtaaccaccttcgtatgactgtagtgtgggcacacgagaagtacggaatcgaatcttttgcactgattcacgactccttcggtaccattccggctgacgctgcgaacctgttcaaagcagtgcgcgaaactatggtttcgacatatgagtcttgtgatgtactggctgatttctacgaccagttcgctgaccagttgcacgagtctcaattggacaaaatgccagcacttccggctaaaggtaacttgaacctccgtgacatcttaaaatcggacttcgcgttcgcg

SEQ ID NO: 784 - protein, 890 aa, synthetic construct
  REGION 1..890: note = Variant of RNA polymerase
MHHHHHHMNTINIAKNDFSDIELAAIPFNTLADHYGERLAREQLALEHESYEMGEARFRKMFERQLKAGEVADNAAAKPLITTLLPKMIARINDWFEEVKAKRGKRPTAFQFLQEIKPEAVAYITIKTTLACLTSADNTTVQAVASAIGRAIEDEARFGRIRDLEAKHVKKNVEEQLNKRVGHVYKKAFMQVVEADMLSKGLLGGEAWSSWHKEDSIHVGVRCIEMLIESTGMVSLHRQNAGVVGQDSETIELAPEYAEAIATRAGALAGISPMFQPCVVPPKPWTGITGGGYWAAGRKPLQLVRTRSLAALRRYEEVSMPEVIKAVNIAQNTAWRINKKVLDVANAITQWQHCPVADVPAMDRGEMPARPLDIDTNEIALKAWKKEASAFYRKDKARVSRRLSMEFMLSQANKFANYKAIWFPQNMDWRGRVYAVPMFNPQGNDMTKGLLTFAQEKPIGEDGFYWLKIHGANTAGVDKVPFPQRIKFVEDNHTNIMECAKAPLENTWWAEQDSPFCFLAFCFEYAGVINHGLSYNCSLPQAFDGSCSGIQHFSAMLRDEIGGKAVNLLPSAEYQDIYRIVSDKVNEVLKQDLINGTSTTVETVTDKKTGEITQRTKYGTKVMAQWWLEHGVNRGVTKRSVMTLVYGSKEFGFRDQVLSDTIQPAIDNGKGDMFLNPNQAAGYMAKLIWNAVSGTVVAAVEAMNWLKSAAKLLAAEVKDPKTDTVLRGRCAVHWVTPDGFPVWQEYKKPIQTRLNLMFLGQFRLQPTINTNKDSEIDAHKQESGIAPNFVHSQDGNHLRMTVVWAHEKYGIESFALIHDSFGTIPADAANLFKAVRETMVSTYESCDVLADFYDQFADQLHESQLDKMPALPAKGNLNLRDILKSDFAFA

SEQ ID NO: 785 - DNA, 2670 bp, synthetic construct
  misc_feature 1..2670: note = Variant of RNA polymerase
  source 1..2670: mol_type = other DNA
atgcaccatcaccatcaccatatgaacacgattaacattgctaagaacgacttctctgacatcgaactggctgctatcccgttcaacactctggctgaccattacggtgagcgtttagctcgcgaacagttggcccttgagcatgagtcttacgagatgggtgaagcacgcttccgcaagatgtttgagcgtcaacttaaagctggtgaggttgcggataacgctgccgccaagcctctcatcactaccctactccctaagatgattgcacgcatcaacgactggtttgaggaagtgaaagctaagcgcggcaagcgcccgacagccttccagttcctgcaagaaatcaagccggaagccgtagcgtacatcaccattaagaccactctggcttgcctaaccagtgcggacaatacaaccgttcaggctgtagcaagcgcaatcggtcgggccattgaggacgaggctcgcttcggtcgtatccgtgaccttgaagctaagcacgtcaagaaaaacgttgaggaacaactcaacaagcgcgtagggcacgtctacaagaaagcatttatgcaagttgtcgaggctgacgtgtcgtctaagggtctactcggtggcgaggcgtggtcttcgtggcataaggaagactctattcatgtaggagtacgctgcatcgagatgctcattgagtcaaccggaatggttagcttacaccgccaaaatgctggcgtagtaggtcaagactctgagactatcgaactcgcacctgaatacgctgaggctatcgcaacccgtgcaggtgcgctggctggcatctctccgatgttccaaccttgcgtagttcctcctaagccgtggactggcattactggtggtggctattgggctgcggggcgcaaacccctgcagttagtacgtactcgcagtctggcggcgcttcgccgctatgaagaagtgtcgatgccggaggtcatcaaagcagtcaacattgcgcagaatacagcatggcgtattaacaagaaagttctcgacgtagcgaatgcaatcacccaatggcagcactgtccagtcgcggatgtgcctgcgatggatcgtggcgaaatgccagctcgtccgttggacatcgataccaacgagattgcacttaaagcgtggaagaaagaagcttccgcgttctaccgcaaagacaaagcacgcgttagccgtcgtctgtcaatggagtttatgttatctcaggcgaacaagtttgcgaattataaagcaatctggtttccgcaaaacatggattggcgtgggcgcgtgtacgctgtcccgatgttcaatcctcagggcaacgatatgacgaaaggcctgctgacctttgcgcaggagaaacccattggtgaagacggcttctattggctcaagattcatggcgcaaatacagctggagtggataaagtaccgtttccacaacgcatcaaatttgttgaggataaccatacgaatattatggaatgcgcgaaagcaccgctggaaaacacttggtgggcggaacaggactcgccgttctgttttctggcgttctgctttgagtatgctggcgtcatcaatcacggtctgtcgtacaactgtagcttgcctctggcatttgatggtagttgctccggcattcaacatttctcagcgatgttacgcgacgaaattggcggcaaagctgtgaatctcctcccatctgcggaataccaggatatttatcgtatcgtcagcgacaaagttaacgaggtgctgaaacaagatctgattaacggtacctctaccaccgtggaaacggtgactgataagaagacaggcgaaattacccaacgcacgaaatacgggaccaaagttatggcacagtggtggttagaacacggtgtgaatcgtggcgtcacgaaacgctcggttatgactttggtgtatgggagcaaagagtttggattccgcgatcaagtgctgagtgacaccattcaaccggcgatcgataacggcaaaggtgacatgtttctgaatccgaatcaggctgctggttacatggcgaaactgatctggaacgcagtgtccgggaccgtagtcgcagcagttgaggcgatgaactggctgaaaagtgcggcgaaattacttgctgctgaagtgaaggatcctaagacggatacagttctgcgtggccgctgcgcagtacattgggtgactcccgacggcttccctgtgtggcaggaatacaagaagcctattcagacgcgcttgaacctgatgttcctcggtcagttccgcttacagcctaccattaacaccaacaaagatagcgagattgatgcacacaaacaggagtctggtatcgctcctaactttgtacacagccaagacggtaaccaccttcgtatgactgtagtgtgggcacacgagaagtacggaatcgaatcttttgcactgattcacgactccttcggtaccattccggctgacgctgcgaacctgttcaaagcagtgcgcgaaactatggtttcgacatatgagtcttgtgatgtactggctgatttctacgaccagttcgctgaccagttgcacgagtctcaattggacaaaatgccagcacttccggctaaaggtaacttgaacctccgtgacatcttaaaatcggacttcgcgttcgcg

SEQ ID NO: 786 - protein, 890 aa, synthetic construct
  REGION 1..890: note = Variant of RNA polymerase
MHHHHHHMNTINIAKNDFSDIELAAIPFNTLADHYGERLAREQLALEHESYEMGEARFRKMFERQLKAGEVADNAAAKPLITTLLPKMIARINDWFEEVKAKRGKRPTAFQFLQEIKPEAVAYITIKTTLACLTSADNTTVQAVASAIGRAIEDEARFGRIRDLEAKHVKKNVEEQLNKRVGHVYKKAFMQVVEADVSSKGLLGGEAWSSWHKEDSIHVGVRCIEMLIESTGMVSLHRQNAGVVGQDSETIELAPEYAEAIATRAGALAGISPMFQPCVVPPKPWTGITGGGYWAAGRKPLQLVRTRSLAALRRYEEVSMPEVIKAVNIAQNTAWRINKKVLDVANAITQWQHCPVADVPAMDRGEMPARPLDIDTNEIALKAWKKEASAFYRKDKARVSRRLSMEFMLSQANKFANYKAIWFPQNMDWRGRVYAVPMFNPQGNDMTKGLLTFAQEKPIGEDGFYWLKIHGANTAGVDKVPFPQRIKFVEDNHTNIMECAKAPLENTWWAEQDSPFCFLAFCFEYAGVINHGLSYNCSLPLAFDGSCSGIQHFSAMLRDEIGGKAVNLLPSAEYQDIYRIVSDKVNEVLKQDLINGTSTTVETVTDKKTGEITQRTKYGTKVMAQWWLEHGVNRGVTKRSVMTLVYGSKEFGFRDQVLSDTIQPAIDNGKGDMFLNPNQAAGYMAKLIWNAVSGTVVAAVEAMNWLKSAAKLLAAEVKDPKTDTVLRGRCAVHWVTPDGFPVWQEYKKPIQTRLNLMFLGQFRLQPTINTNKDSEIDAHKQESGIAPNFVHSQDGNHLRMTVVWAHEKYGIESFALIHDSFGTIPADAANLFKAVRETMVSTYESCDVLADFYDQFADQLHESQLDKMPALPAKGNLNLRDILKSDFAFA

SEQ ID NO: 787 - DNA, 2670 bp, synthetic construct
  misc_feature 1..2670: note = Variant of RNA polymerase
  source 1..2670: mol_type = other DNA
atgcaccatcaccatcaccatatgaacacgattaacattgctaagaacgacttctctgacatcgaactggctgctatcccgttcaacactctggctgaccattacggtgagcgtttagctcgcgaacagttggcccttgagcatgagtcttacgagatgggtgaagcacgcttccgcaagatgtttgagcgtcaacttaaagctggtgaggttgcggataacgctgccgccaagcctctcatcactaccctactccctaagatgattgcacgcatcaacgactggtttgaggaagtgaaagctaagcgcggcaagcgcccgacagccttccagttcctgcaagaaatcaagccggaagccgtagcgtacatcaccattaagaccactctggcttgcctaaccagtgcggacaatacaaccgttcaggctgtagcaagcgcaatcggtcgggccattgaggacgaggctcgcttcggtcgtatccgtgaccttgaagctaagcacgtcaagaaaaacgttgaggaacaactcaacaagcgcgtagggcacgtctacaagaaagcatttatgcaagttgtcgaggctgacatgctctctaagggtctactcggtggcgaggcgtggtcttcgtggcataaggaagactctattcatgtaggagtacgctgcatcgagatgctcattgagtcaaccggaatggttagcttacaccgccaaaatgctggcgtagtaggtcaagactctgagactatcgaactcgcacctgaatacgctgaggctatcgcaacccgtgcaggtgcgctggctggcatctctccgatgttccaaccttgcgtagttcctcctaagccgtggactggcattactggtggtggctattgggctgcggggcgcaaacccctgcagttagtacgtactcgcagtctggcggcgcttcgccgctatgaagaagtgtcgatgccggaggtcatcaaagcagtcaacattgcgcagaatacagcatggcgtattaacaagaaagttctcgacgtagcgaatgcaatcacccaatggcagcactgtccagtcgcggatgtgcctgcgatggatcgtggcgaaatgccagctcgtccgttggacatcgataccaacgagattgcacttaaagcgtggaagaaagaagcttccgcgttctaccgcaaagacaaagcacgcgttagccgtcgtctgtcaatggagtttatgttatctcaggcgaacaagtttgcgaattatatggcaatctggtttccgcaaaacatggattggcgtgggcgcgtgtacgctgtcccgatgttcaatcctcagggcaacgatatgacgaaaggcctgctgacctttgcgcaggagaaacccattggtgaagacggcttctattggctcaagattcatggcgcaaatacagctggagtggataaagtaccgtttccacaacgcatcaaatttgttgaggataaccatacgaatattatggaatgcgcgaaagcaccgctggaaaacacttggtgggcggaacaggactcgccgttctgttttctggcgttctgctttgagtatgctggcgtcatcaatcacggtctgtcgtacaactgtagcttgcctctggcatttgatggtagttgctccggcattcaacatttctcagcgatgttacgcgacgaaattggcggcaaagctgtgaatctcctcccatctgcggaataccaggatatttatcgtatcgtcagcgacaaagttaacgaggtactgaaacaagatctgattaacggtacctctaccaccgtggaaacggtgactgataagaagacaggcgaaattacccaacgcacgaaatacgggaccaaagttatggcacagtggtggttagaacacggtgtgaatcgtggcgtcacgaaacgctcggttatgactttggtgtatgggagcaaagagtttggattccgcgatcaagtgctgagtgacaccattcaaccggcgatcgataacggcaaaggtgacatgtttctgaatccgaatcaggctgctggttacatggcgaaactgatctggaacgcagtgtccgggaccgtagtcgcagcagttgaggcgatgaactggctgaaaagtgcggcgaaattacttgctgctgaagtgaaggatcctaagacggatacagttctgcgtggccgctgcgcagtacattgggtgactcccgacggcttccctgtgtggcaggaatacaagaagcctattcagacgcgcttgaacctgatgttcctcggtcagttccgcttacagcctaccattaacaccaacaaagatagcgagattgatgcacacaaacaggagtctggtatcgctcctaactttgtacacagccaagacggtaaccaccttcgtatgactgtagtgtgggcacacgagaagtacggaatcgaatcttttgcactgattcacgactccttcggtaccattccggctgacgctgcgaacctgttcaaagcagtgcgcgaaactatggtttcgacatatgagtcttgtgatgtactggctgatttctacgaccagttcgctgaccagttgcacgagtctcaattggacaaaatgccagcacttccggctaaaggtaacttgaacctccgtgacatcttaaaatcggacttcgcgttcgcg

SEQ ID NO: 788 - protein, 890 aa, synthetic construct
  REGION 1..890: note = Variant of RNA polymerase
MHHHHHHMNTINIAKNDFSDIELAAIPFNTLADHYGERLAREQLALEHESYEMGEARFRKMFERQLKAGEVADNAAAKPLITTLLPKMIARINDWFEEVKAKRGKRPTAFQFLQEIKPEAVAYITIKTTLACLTSADNTTVQAVASAIGRAIEDEARFGRIRDLEAKHVKKNVEEQLNKRVGHVYKKAFMQVVEADMLSKGLLGGEAWSSWHKEDSIHVGVRCIEMLIESTGMVSLHRQNAGVVGQDSETIELAPEYAEAIATRAGALAGISPMFQPCVVPPKPWTGITGGGYWAAGRKPLQLVRTRSLAALRRYEEVSMPEVIKAVNIAQNTAWRINKKVLDVANAITQWQHCPVADVPAMDRGEMPARPLDIDTNEIALKAWKKEASAFYRKDKARVSRRLSMEFMLSQANKFANYMAIWFPQNMDWRGRVYAVPMFNPQGNDMTKGLLTFAQEKPIGEDGFYWLKIHGANTAGVDKVPFPQRIKFVEDNHTNIMECAKAPLENTWWAEQDSPFCFLAFCFEYAGVINHGLSYNCSLPLAFDGSCSGIQHFSAMLRDEIGGKAVNLLPSAEYQDIYRIVSDKVNEVLKQDLINGTSTTVETVTDKKTGEITQRTKYGTKVMAQWWLEHGVNRGVTKRSVMTLVYGSKEFGFRDQVLSDTIQPAIDNGKGDMFLNPNQAAGYMAKLIWNAVSGTVVAAVEAMNWLKSAAKLLAAEVKDPKTDTVLRGRCAVHWVTPDGFPVWQEYKKPIQTRLNLMFLGQFRLQPTINTNKDSEIDAHKQESGIAPNFVHSQDGNHLRMTVVWAHEKYGIESFALIHDSFGTIPADAANLFKAVRETMVSTYESCDVLADFYDQFADQLHESQLDKMPALPAKGNLNLRDILKSDFAFA

SEQ ID NO: 789 - DNA, 2670 bp, synthetic construct
  misc_feature 1..2670: note = Variant of RNA polymerase
  source 1..2670: mol_type = other DNA
atgcaccatcaccatcaccatatgaacacgattaacattgctaagaacgacttctctgacatcgaactggctgctatcccgttcaacactctggctgaccattacggtgagcgtttagctcgcgaacagttggcccttgagcatgagtcttacgagatgggtgaagcacgcttccgcaagatgtttgagcgtcaacttaaagctggtgaggttgcggataacgctgccgccaagcctctcatcactaccctactccctaagatgattgcacgcatcaacgactggtttgaggaagtgaaagctaagcgcggcaagcgcccgacagccttccagttcctgcaagaaatcaagccggaagccgtagcgtacatcaccattaagaccactctggcttgcctaaccagtgcggacaatacaaccgttcaggctgtagcaagcgcaatcggtcgggccattgaggacgaggctcgcttcggtcgtatccgtgaccttgaagctaagcacttcaagaagaacgttgaggaacaactcaacaagcgcgtagggcacccgtacaagaaagcatttatgcaagttgtcgaggctgacatgctctctaagggtctactcggtggcgaggcgtggtcttcgtggcataaggaagactctattcatgtaggagtacgctgcatcgagatgctcattgagtcaaccggaatggttagcttacaccgccaaaatgctggcgtagtaggtcaagactctgagactatcgaactcgcacctgaatacgctgaggctatcgcaacccgtgcaggtgcgctggctggcatctctccgatgttccaaccttgcgtagttcctcctaagccgtggactggcattactggtggtggctattgggctgcggggcgcaaacccctgcagttagtacgtactcgcagtctggcggcgcttcgccgctatgaagaagtgtcgatgccggaggtcatcaaagcagtcaacattgcgcagaatacagcatggcgtattaacaagaaagttctcgacgtagcgaatgcaatcacccaatggcagcactgtccagtcgcggatgtgcctgcgatggatcgtggcgaaatgccagctcgtccgttggacatcgataccaacgagattgcacttaaagcgtggaagaaagaagcttccgcgttctaccgcaaagacaaagcacgcgttagccgtcgtctgtcaatggagtttatgttatctcaggcgaacaagtttgcgaatgagaaagcaatctggtttccgcaaaacatggattggcgtgggcgcgtgtacgctgtcccgatgttcaatcctcagggcaacgatatgacgaaaggcctgctgacctttgcgcaggagaaacccattggtgaagacggcttctattggctcaagattcatggcgcaaatacagctggagtggataaagtaccgtttccacaacgcatcaaatttgttgaggataaccatacgaatattatggaatgcgcgaaagcaccgctggaaaacacttggtgggcggaacaggactcgccgttctgttttctggcgttctgctttgagtatgctggcgtcatcaatcatggtctgtcgtacaactgtagcttgcctctggcatttgatggtagttgctccggcattcaacatttctcagcgatgttacgcgacgaaattggcggcaaagctgtgaatctcctcccatctgcggaataccaggatatttatcgtatcgtcagcgacaaagttaacgaggtactgaaacaagatctgattaacggtacctctaccaccgtggaaacggtgactgataagaagacaggcgaaattacccaacgcacgaaatacgggaccaaagttatggcacagtggtggttagaacacggtgtgaatcgtggcgtcacgaaacgctcggttatgactttggtgtatgggagcaaagagtttggattccgcgatcaagtgctgagtgacaccattcaaccggcgatcgataacggcaaaggtgacatgtttctgaatccgaatcaggctgctggttacatggcgaaactgatctggaacgcagtgtccgggaccgtagtcgcagcagttgaggcgatgaactggctgaaaagtgcggcgaaattacttgctgctgaagtgaaggatcctaagacggatacagttctgcgtggccgctgcgcagtacattgggtgactcccgacggcttccctgtgtggcaggaatacaagaagcctattcagacgcgcttgaacctgatgttcctcggtcagttccgcttacagcctaccattaacaccaacaaagatagcgagattgatgcacacaaacaggagtctggtatcgctcctaactttgtacacagccaagacggtaaccaccttcgtatgactgtagtgtgggcacacgagaagtacggaatcgaatcttttgcactgattcacgactccttcggtaccattccggctgacgctgcgaacctgttcaaagcagtgcgcgaaactatggtttcgacatatgagtcttgtgatgtactggctgatttctacgaccagttcgctgaccagttgcacgagtctcaattggacaaaatgccagcacttccggctaaaggtaacttgaacctccgtgacatcttaaaatcggacttcgcgttcgcg

SEQ ID NO: 790 - protein, 890 aa, synthetic construct
  REGION 1..890: note = Variant of RNA polymerase
MHHHHHHMNTINIAKNDFSDIELAAIPFNTLADHYGERLAREQLALEHESYEMGEARFRKMFERQLKAGEVADNAAAKPLITTLLPKMIARINDWFEEVKAKRGKRPTAFQFLQEIKPEAVAYITIKTTLACLTSADNTTVQAVASAIGRAIEDEARFGRIRDLEAKHFKKNVEEQLNKRVGHPYKKAFMQVVEADMLSKGLLGGEAWSSWHKEDSIHVGVRCIEMLIESTGMVSLHRQNAGVVGQDSETIELAPEYAEAIATRAGALAGISPMFQPCVVPPKPWTGITGGGYWAAGRKPLQLVRTRSLAALRRYEEVSMPEVIKAVNIAQNTAWRINKKVLDVANAITQWQHCPVADVPAMDRGEMPARPLDIDTNEIALKAWKKEASAFYRKDKARVSRRLSMEFMLSQANKFANEKAIWFPQNMDWRGRVYAVPMFNPQGNDMTKGLLTFAQEKPIGEDGFYWLKIHGANTAGVDKVPFPQRIKFVEDNHTNIMECAKAPLENTWWAEQDSPFCFLAFCFEYAGVINHGLSYNCSLPLAFDGSCSGIQHFSAMLRDEIGGKAVNLLPSAEYQDIYRIVSDKVNEVLKQDLINGTSTTVETVTDKKTGEITQRTKYGTKVMAQWWLEHGVNRGVTKRSVMTLVYGSKEFGFRDQVLSDTIQPAIDNGKGDMFLNPNQAAGYMAKLIWNAVSGTVVAAVEAMNWLKSAAKLLAAEVKDPKTDTVLRGRCAVHWVTPDGFPVWQEYKKPIQTRLNLMFLGQFRLQPTINTNKDSEIDAHKQESGIAPNFVHSQDGNHLRMTVVWAHEKYGIESFALIHDSFGTIPADAANLFKAVRETMVSTYESCDVLADFYDQFADQLHESQLDKMPALPAKGNLNLRDILKSDFAFA

SEQ ID NO: 791 - DNA, 2670 bp, synthetic construct
  misc_feature 1..2670: note = Variant of RNA polymerase
  source 1..2670: mol_type = other DNA
atgcaccatcaccatcaccatatgaacacgattaacattgctaagaacgacttctctgacatcgaactggctgctatcccgttcaacactctggctgaccattacggtgagcgtttagctcgcgaacagttggcccttgagcatgagtcttacgagatgggtgaagcacgcttccgcaagatgtttgagcgtcaacttaaagctggtgaggttgcggataacgctgccgccaagcctctcatcactaccctactccctaagatgattgcacgcatcaacgactggtttgaggaagtgaaagctaagcgcggcaagcgcccgacagccttccagttcctgcaagaaatcaagccggaagccgtagcgtacatcaccattaagaccactctggcttgcctaaccagtgcggacaatacaaccgttcaggctgtagcaagcgcaatcggtcgggccattgaggacgaggctcgcttcggtcgtatccgtgaccttgaagctaagcacttcaagggcaacgttgaggaacaactcaacaagcgcgtagggcacgtctacaaagtagcatttatgcaagttgtcgaggctgacatgctctctaagggtctactcggtggcgaggcgtggtcttcgtggcataaggaagactctattcatgtaggagtacgctgcatcgagatgctcattgagtcaaccggaatggttagcttacaccgccaaaatgctggcgtagtaggtcaagactctgagactatcgaactcgcacctgaatacgctgaggctatcgcaacccgtgcaggtgcgctggctggcatctctccgatgttccaaccttgcgtagttcctcctaagccgtggactggcattactggtggtggctattgggctgcggggcgcaaacccctgcagttagtacgtactcgcagtctggcggcgcttcgccgctatgaagaagtgtcgatgccggaggtcatcaaagcagtcaacattgcgcagaatacagcatggcgtattaacaagaaagttctcgacgtagcgaatgcaatcacccaatggcagcactgtccagtcgcggatgtgcctgcgatggatcgtggcgaaatgccagctcgtccgttggacatcgataccaacgagattgcacttaaagcgtggaagaaagaagcttccgcgttctaccgcaaagacaaagcacgcgttagccgtcgtctgtcaatggagtttatgttatctcaggcgaacaagtttgcgaattataaagcaatctggtttccgcaaaacatggattggcgtgggcgcgtgtacgctgtcccgatgttcaatcctcagggcaacgatatgacgaaaggcctgctgacctttgcgcaggagaaacccattggtgaagacggcttctattggctcaagattcatggcgcaaatacagctggagtggataaagtaccgtttccacaacgcatcaaatttgttgaggataaccatacgaatattatggaatgcgcgaaagcaccgctggaaaacacttggtgggcggaacaggactcgccgttctgttttctggcgttctgctttgagtatgctggcgtcatcaatagtggtctgtcgtacaactgtagcttgcctctggcatttgatggtagttgctccggcattcaacatttctcagcgatgttacgcgacgaaattggcggcaaagctgtgaatctcctcccatctgcggaataccaggatatttatcgtatcgtcagcgacaaagttaacgaggtactgaaacaagatctgattaacggtacctctaccaccgtggaaacggtgactgataagaagacaggcgaaattacccaacgcacgaaatacgggaccaaagttatggcacagtggtggttagaacacggtgtgaatcgtggcgtcacgaaacgctcggttatgactttggtgtatgggagcaaagagtttggattccgcgatcaagtgctgagtgacaccattcaaccggcgatcgataacggcaaaggtgacatgtttctgaatccgaatcaggctgctggttacatggcgaaactgatctggaacgcagtgtccgggaccgtagtcgcagcagttgaggcgatgaactggctgaaaagtgcggcgaaattacttgctgctgaagtgaaggatcctaagacggatacagttctgcgtggccgctgcgcagtacattgggtgactcccgacggcttccctgtgtggcaggaatacaagaagcctattcagacgcgcttgaacctgatgttcctcggtcagttccgcttacagcctaccattaacaccaacaaagatagcgagattgatgcacacaaacaggagtctggtatcgctcctaactttgtacacagccaagacggtaaccaccttcgtatgactgtagtgtgggcacacgagaagtacggaatcgaatcttttgcactgattcacgactccttcggtaccattccggctgacgctgcgaacctgttcaaagcagtgcgcgaaactatggtttcgacatatgagtcttgtgatgtactggctgatttctacgaccagttcgctgaccagttgcacgagtctcaattggacaaaatgccagcacttccggctaaaggtaacttgaacctccgtgacatcttaaaatcggacttcgcgttcgcg

SEQ ID NO: 792 - protein, 890 aa, synthetic construct
  REGION 1..890: note = Variant of RNA polymerase
MHHHHHHMNTINIAKNDFSDIELAAIPFNTLADHYGERLAREQLALEHESYEMGEARFRKMFERQLKAGEVADNAAAKPLITTLLPKMIARINDWFEEVKAKRGKRPTAFQFLQEIKPEAVAYITIKTTLACLTSADNTTVQAVASAIGRAIEDEARFGRIRDLEAKHFKGNVEEQLNKRVGHVYKVAFMQVVEADMLSKGLLGGEAWSSWHKEDSIHVGVRCIEMLIESTGMVSLHRQNAGVVGQDSETIELAPEYAEAIATRAGALAGISPMFQPCVVPPKPWTGITGGGYWAAGRKPLQLVRTRSLAALRRYEEVSMPEVIKAVNIAQNTAWRINKKVLDVANAITQWQHCPVADVPAMDRGEMPARPLDIDTNEIALKAWKKEASAFYRKDKARVSRRLSMEFMLSQANKFANYKAIWFPQNMDWRGRVYAVPMFNPQGNDMTKGLLTFAQEKPIGEDGFYWLKIHGANTAGVDKVPFPQRIKFVEDNHTNIMECAKAPLENTWWAEQDSPFCFLAFCFEYAGVINSGLSYNCSLPLAFDGSCSGIQHFSAMLRDEIGGKAVNLLPSAEYQDIYRIVSDKVNEVLKQDLINGTSTTVETVTDKKTGEITQRTKYGTKVMAQWWLEHGVNRGVTKRSVMTLVYGSKEFGFRDQVLSDTIQPAIDNGKGDMFLNPNQAAGYMAKLIWNAVSGTVVAAVEAMNWLKSAAKLLAAEVKDPKTDTVLRGRCAVHWVTPDGFPVWQEYKKPIQTRLNLMFLGQFRLQPTINTNKDSEIDAHKQESGIAPNFVHSQDGNHLRMTVVWAHEKYGIESFALIHDSFGTIPADAANLFKAVRETMVSTYESCDVLADFYDQFADQLHESQLDKMPALPAKGNLNLRDILKSDFAFA

SEQ ID NO: 793 - DNA, 2670 bp, synthetic construct
  misc_feature 1..2670: note = Variant of RNA polymerase
  source 1..2670: mol_type = other DNA
atgcaccatcaccatcaccatatgaacacgattaacattgctaagaacgacttctctgacatcgaactggctgctatcccgttcaacactctggctgaccattacggtgagcgtttagctcgcgaacagttggcccttgagcatgagtcttacgagatgggtgaagcacgcttccgcaagatgtttgagcgtcaacttaaagctggtgaggttgcggataacgctgccgccaagcctctcatcactaccctactccctaagatgattgcacgcatcaacgactggtttgaggaagtgaaagctaagcgcggcaagcgcccgacagccttccagttcctgcaagaaatcaagccggaagccgtagcgtacatcaccattaagaccactctggcttgcctaaccagtgcggacaatacaaccgttcaggctgtagcaagcgcaatcggtcgggccattgaggacgaggctcgcttcggtcgtatccgtgaccttgaagctaagcacttcaagggcaacgttgaggaacaactcaacaagcgcgtagggcacccgtacaagaaagcatttatgcaagttgtcgaggctgacatgctctctaagggtctactcggtggcgaggcgtggtcttcgtggcataaggaagactctattcatgtaggagtacgctgcatcgagatgctcattgagtcaaccggaatggttagcttacaccgccaaaatgctggcgtagtaggtcaagactctgagactatcgaactcgcacctgaatacgctgaggctatcgcaacccgtgcaggtgcgctggctggcatctctccgatgttccaaccttgcgtagttcctcctaagccgtggactggcattactggtggtggctattgggctgcggggcgcaaacccctgcagttagtacgtactcgcagtctggcggcgcttcgccgctatgaagaagtgtcgatgccggaggtcatcaaagcagtcaacattgcgcagaatacagcatggcgtattaacaagaaagttctcgacgtagcgaataccatcacccaatggcagcactgtccagtcgcggatgtgcctgcgatggatcgtggcgaaatgccagctcgtccgttggacatcgataccaacgagattgcacttaaagcgtggaagaaagaagcttccgcgttctaccgcaaagacaaagcacgcgttagccgtcgtctgtcaatggagtttatgttatctcaggcgaacaagtttgcgaattataaagcaatctggtttccgcaaaacatggattggcgtgggcgcgtgtacgctgtcccgatgttcaatcctcagggcaacgatatgacgaaaggcctgctgacctttgcgcaggagaaacccattggtgaagacggcttctattggctcaagattcatggcgcaaatacagctggagtggataaagtaccgtttccacaacgcatcaaatttgttgaggataaccatacgaatattatggaatgcgcgaaagcaccgctggaaaacacttggtgggcggaacaggactcgccgttctgttttctggcgttctgctttgagtatgctggcgtcatcaatagtggtctgtcgtacaactgtagcttgcctctggcatttgatggtagttgctccggcatccaacatttctcagcgatgttacgcgacgaaattggcggcaaagctgtgaatctcctcccatctgcggaataccaggatatttatcgtatcgtcagcgacaaagttaacgaggtactgaaacaagatctgattaacggtacctctaccaccgtggaaacggtgactgataagaagacaggcgaaattacccaacgcacgaaatacgggaccaaagttatggcacagtggtggttagaacacggtgtgaatcgtggcgtcacgaaacgctcggttatgactttggtgtatgggagcaaagagtttggattccgcgatcaagtgctgagtgacaccattcaaccggcgatcgataacggcaaaggtgacatgtttctgaatccgaatcaggctgctggttacatggcgaaactgatctggaacgcagtgtccgggaccgtagtcgcagcagttgaggcgatgaactggctgaaaagtgcggcgaaattacttgctgctgaagtgaaggatcctaagacggatacagttctgcgtggccgctgcgcagtacattgggtgactcccgacggcttccctgtgtggcaggaatacaagaagcctattcagacgcgcttgaacctgatgttcctcggtcagttccgcttacagcctaccattaacaccaacaaagatagcgagattgatgcacacaaacaggagtctggtatcgctcctaactttgtacacagccaagacggtaaccaccttcgtatgactgtagtgtgggcacacgagaagtacggaatcgaatcttttgcactgattcacgactccttcggtaccattccggctgacgctgcgaacctgttcaaagcagtgcgcgaaactatggtttcgacatatgagtcttgtgatgtactggctgatttctacgaccagttcgctgaccagttgcacgagtctcaattggacaaaatgccagcacttccggctaaaggtaacttgaacctccgtgacatcttaaaatcggacttcgcgttcgcg

SEQ ID NO: 794 - protein, 890 aa, synthetic construct
  REGION 1..890: note = Variant of RNA polymerase
MHHHHHHMNTINIAKNDFSDIELAAIPFNTLADHYGERLAREQLALEHESYEMGEARFRKMFERQLKAGEVADNAAAKPLITTLLPKMIARINDWFEEVKAKRGKRPTAFQFLQEIKPEAVAYITIKTTLACLTSADNTTVQAVASAIGRAIEDEARFGRIRDLEAKHFKGNVEEQLNKRVGHPYKKAFMQVVEADMLSKGLLGGEAWSSWHKEDSIHVGVRCIEMLIESTGMVSLHRQNAGVVGQDSETIELAPEYAEAIATRAGALAGISPMFQPCVVPPKPWTGITGGGYWAAGRKPLQLVRTRSLAALRRYEEVSMPEVIKAVNIAQNTAWRINKKVLDVANTITQWQHCPVADVPAMDRGEMPARPLDIDTNEIALKAWKKEASAFYRKDKARVSRRLSMEFMLSQANKFANYKAIWFPQNMDWRGRVYAVPMFNPQGNDMTKGLLTFAQEKPIGEDGFYWLKIHGANTAGVDKVPFPQRIKFVEDNHTNIMECAKAPLENTWWAEQDSPFCFLAFCFEYAGVINSGLSYNCSLPLAFDGSCSGIQHFSAMLRDEIGGKAVNLLPSAEYQDIYRIVSDKVNEVLKQDLINGTSTTVETVTDKKTGEITQRTKYGTKVMAQWWLEHGVNRGVTKRSVMTLVYGSKEFGFRDQVLSDTIQPAIDNGKGDMFLNPNQAAGYMAKLIWNAVSGTVVAAVEAMNWLKSAAKLLAAEVKDPKTDTVLRGRCAVHWVTPDGFPVWQEYKKPIQTRLNLMFLGQFRLQPTINTNKDSEIDAHKQESGIAPNFVHSQDGNHLRMTVVWAHEKYGIESFALIHDSFGTIPADAANLFKAVRETMVSTYESCDVLADFYDQFADQLHESQLDKMPALPAKGNLNLRDILKSDFAFA

SEQ ID NO: 795 - DNA, 2670 bp, synthetic construct
  misc_feature 1..2670: note = Variant of RNA polymerase
  source 1..2670: mol_type = other DNA
atgcaccatcaccatcaccatatgaacacgattaacattgctaagaacgacttctctgacatcgaactggctgctatcccgttcaacactctggctgaccattacggtgagcgtttagctcgcgaacagttggcccttgagcatgagtcttacgagatgggtgaagcacgcttccgcaagatgtttgagcgtcaacttaaagctggtgaggttgcggataacgctgccgccaagcctctcatcactaccctactccctaagatgattgcacgcatcaacgactggtttgaggaagtgaaagctaagcgcggcaagcgcccgacagccttccagttcctgcaagaaatcaagccggaagccgtagcgtacatcaccattaagaccactctggcttgcctaaccagtgcggacaatacaaccgttcaggctgtagcaagcgcaatcggtcgggccattgaggacgaggctcgcttcggtcgtatccgtgaccttgaagctaagcacttcaagaagaacgttgaggaacaactcaacaagcgcgtagggcacgtctacaaaaaagcatttatgcaagttgtcgaggctgacatgctctctaagggtctactcggtggcgaggcgtggtcttcgtggcataaggaagactctattcatgtaggagtacgctgcatcgagatgctcattgagtcaaccggaatggttagcttacaccgccaaaatgctggcgtagtaggtcaagactctgagactatcgaactcgcacctgaatacgctgaggctatcgcaacccgtgcaggtgcgctggctggcatctctccgatgttccaaccttgcgtagttcctcctaagccgtggactggcattactggtggtggctattgggctgcggggcgcaaacccctgcagttagtacgtactcgcagtctggcggcgcttcgccgctatgaagaagtgtcgatgccggaggtcatcaaagcagtcaacattgcgcagaatacagcatggcgtattaacaagaaagttctcgacgtagcgaatgccatcacccaatggcagcactgtccagtcgcggatgtgcctgcgatggatcgtggcgaaatgccagctcgtccgttggacatcgataccaacgagattgcacttaaagcgtggaagaaagaagcttccgcgttctaccgcaaagacaaagcacgcgttagccgtcgtctgtcaatggagtttatgttatctcaggcgaacaagtttgcgaattataaagcaatctggtttccgcaaaacatggattggcgtgggcgcgtgtacgctgtcccgatgttcaatcctcagggcaacgatatgacgaaaggcctgctgacctttgcgcaggagaaacccattggtgaagacggcttctattggctcaagattcatggcgcaaatacagctggagtggataaagtaccgtttccacaacgcatcaaatttgttgaggataaccatacgaatattatggaatgcgcgaaagcaccgctggaaaacacttggtgggcggaacaggactcgccgttctgttttctggcgttctgctttgagtatgctggcgtcatcaatcatggtctgtcgtacaactgtagcttgcctctggcatttgatggtagttgctccggcattcaacatttctcagcgatgttacgcgacgaaattggcggcaaagctgtgaatctcctcccatctgcggaataccaggatatttatcgtatcgtcagcgacaaagttaacgagcgtctgaaacaagatctgattaacggtacctctaccaccgtggaaacggtgactgataagaagacaggcgaaattacccaacgcacgaaatacgggaccaaagttatggcacagtggtggttagaacacggtgtgaatcgtggcgtcacgaaacgctcggttatgactttggtgtatgggagcaaagagtttggattccgcgatcaagtgctgagtgacaccattcaaccggcgatcgataacggcaaaggtgacatgtttctgaatccgaatcaggctgctggttacatggcgaaactgatctggaacgcagtgtccgggaccgtagtcgcagcagttgaggcgatgaactggctgaaaagtgcggcgaaattacttgctgctgaagtgaaggatcctaagacggatacagttctgcgtggccgctgcgcagtacattgggtgactcccgacggcttccctgtgtggcaggaatacaagaagcctattcagacgcgcttgaacctgatgttcctcggtcagttccgcttacagcctaccattaacaccaacaaagatagcgagattgatgcacacaaacaggagtctggtatcgctcctaactttgtacacagccaagacggtaaccaccttcgtatgactgtagtgtgggcacacgagaagtacggaatcgaatcttttgcactgattcacgactccttcggtaccattccggctgacgctgcgaacctgttcaaagcagtgcgcgaaactatggtttcgacatatgagtcttgtgatgtactggctgatttctacgaccagttcgctgaccagttgcacgagtctcaattggacaaaatgccagcacttccggctaaaggtaacttgaacctccgtgacatcttaaaatcggacttcgcgttcgcg

SEQ ID NO: 796 - protein, 890 aa, synthetic construct
  REGION 1..890: note = Variant of RNA polymerase
MHHHHHHMNTINIAKNDFSDIELAAIPFNTLADHYGERLAREQLALEHESYEMGEARFRKMFERQLKAGEVADNAAAKPLITTLLPKMIARINDWFEEVKAKRGKRPTAFQFLQEIKPEAVAYITIKTTLACLTSADNTTVQAVASAIGRAIEDEARFGRIRDLEAKHFKKNVEEQLNKRVGHVYKKAFMQVVEADMLSKGLLGGEAWSSWHKEDSIHVGVRCIEMLIESTGMVSLHRQNAGVVGQDSETIELAPEYAEAIATRAGALAGISPMFQPCVVPPKPWTGITGGGYWAAGRKPLQLVRTRSLAALRRYEEVSMPEVIKAVNIAQNTAWRINKKVLDVANAITQWQHCPVADVPAMDRGEMPARPLDIDTNEIALKAWKKEASAFYRKDKARVSRRLSMEFMLSQANKFANYKAIWFPQNMDWRGRVYAVPMFNPQGNDMTKGLLTFAQEKPIGEDGFYWLKIHGANTAGVDKVPFPQRIKFVEDNHTNIMECAKAPLENTWWAEQDSPFCFLAFCFEYAGVINHGLSYNCSLPLAFDGSCSGIQHFSAMLRDEIGGKAVNLLPSAEYQDIYRIVSDKVNERLKQDLINGTSTTVETVTDKKTGEITQRTKYGTKVMAQWWLEHGVNRGVTKRSVMTLVYGSKEFGFRDQVLSDTIQPAIDNGKGDMFLNPNQAAGYMAKLIWNAVSGTVVAAVEAMNWLKSAAKLLAAEVKDPKTDTVLRGRCAVHWVTPDGFPVWQEYKKPIQTRLNLMFLGQFRLQPTINTNKDSEIDAHKQESGIAPNFVHSQDGNHLRMTVVWAHEKYGIESFALIHDSFGTIPADAANLFKAVRETMVSTYESCDVLADFYDQFADQLHESQLDKMPALPAKGNLNLRDILKSDFAFA

SEQ ID NO: 797 - DNA, 2670 bp, synthetic construct
  misc_feature 1..2670: note = Variant of RNA polymerase
  source 1..2670: mol_type = other DNA
atgcaccatcaccatcaccatatgaacacgattaacattgctaagaacgacttctctgacatcgaactggctgctatcccgttcaacactctggctgaccattacggtgagcgtttagctcgcgaacagttggcccttgagcatgagtcttacgagatgggtgaagcacgcttccgcaagatgtttgagcgtcaacttaaagctggtgaggttgcggataacgctgccgccaagcctctcatcactaccctactccctaagatgattgcacgcatcaacgactggtttgaggaagtgaaagctaagcgcggcaagcgcccgacagccttccagttcctgcaagaaatcaagccggaagccgtagcgtacatcaccattaagaccactctggcttgcctaaccagtgcggacaatacaaccgttcaggctgtagcaagcgcaatcggtcgggccattgaggacgaggctcgcttcggtcgtatccgtgaccttgaagctaagcacttcaagaagaacgttgaggaacaactcaacaagcgcgtagggcacccgtacaagaaagcatttatgcaagttgtcgaggctgacatgctctctaagggtctactcggtggcgaggcgtggtcttcgtggcataaggaagactctattcatgtaggagtacgctgcatcgagatgctcattgagtcaaccggaatggttagcttacaccgccaaaatgctggcgtagtaggtcaagactctgagactatcgaactcgcacctgaatacgctgaggctatcgcaacccgtgcaggtgcgctggctggcatctctccgatgttccaaccttgcgtagttcctcctaagccgtggactggcattactggtggtggctattgggctgcggggcgcaaacccctgcagttagtacgtactcgcagtctggcggcgcttcgccgctatgaagaagtgtcgatgccggaggtcatcaaagcagtcaacattgcgcagaatacagcatggcgtattaacaagaaagttctcgacgtagcgaatgccatcacccaatggcagcactgtccagtcgcggatgtgcctgcgatggatcgtggcgaaatgccagctcgtccgttggacatcgataccaacgagattgcacttaaagcgtggaagaaagaagcttccgcgttctaccgcaaagacaaagcacgcgttagccgtcgtctgtcaatggagtttatgttatctcaggcgaacaagtttgcgaattataaagcaatctggtttccgcaaaacatggattggcgtgggcgcgtgtacgctgtcccgatgttcaatcctcagggcaacgatatgacgaaaggcctgctgacctttgcgcaggagaaacccattggtgaagacggcttctattggctcaagattcatggcgcaaatacagctggagtggataaagtaccgtttccacaacgcatcaaatttgttgaggataaccatacgaatattatggaatgcgcgaaagcaccgctggaaaacacttggtgggcggaacaggactcgccgttctgttttctggcgttctgctttgagtatgctggcgtcatcaatcatggtctgtcgtacaactgtagcttgcctctggcatttgatggtagttgctccggcattcaacatttctcagcgatgttacgcgacgaaattggcggcaaagctgtgaatctcctcccatctgcggaataccaggatatttatcgtatcgtcagcgacaaagttaacgaggtactgaaacaagatctgattaacggtacctctaccaccgtggaaacggtgactgataagaagacaggcgaaattacccaacgcacgaaatacgggaccaaagttatggcacagtggtggttagaacacggtgtgaatcgtggcgtcacgaaacgctcggttatgactttggtgtatgggagcaaagagtttggattccgcgatcaagtgctgagtgacaccattcaaccggcgatcgataacggcaaaggtgacatgtttctgaatccgaatcaggctgctggttacatggcgaaactgatctggaacgcagtgtccgggaccgtagtcgcagcagttgaggcgatgaactggctgaaaagtgcggcgaaattacttgctgctgaagtgaaggatcctaagacggatacagttctgcgtggccgctgcgcagtacattgggtgactcccgacggcttccctgtgtggcaggaatacaagaagcctattcagacgcgcttgaacctgatgttcctcggtcagttccgcttacagcctaccattaacaccaacaaagatagcgagattgatgcacacaaacaggagtctggtatcgctcctaactttgtacacagccaagacggtaaccaccttcgtatgactgtagtgtgggcacacgagaagtacggaatcgaatcttttgcactgattcacgactccttcggtaccattccggctgacgctgcgaacctgttcaaagcagtgcgcgaaactatggtttcgacatatgagtcttgtgatgtactggctgatttctacgaccagttcgctgaccagttgcacgagtctcaattggacaaaatgccagcacttccggctaaaggtaacttgaacctccgtgacatcttaaaatcggacttcgcgttcgcg

SEQ ID NO: 798 - protein, 890 aa, synthetic construct
  REGION 1..890: note = Variant of RNA polymerase
MHHHHHHMNTINIAKNDFSDIELAAIPFNTLADHYGERLAREQLALEHESYEMGEARFRKMFERQLKAGEVADNAAAKPLITTLLPKMIARINDWFEEVKAKRGKRPTAFQFLQEIKPEAVAYITIKTTLACLTSADNTTVQAVASAIGRAIEDEARFGRIRDLEAKHFKKNVEEQLNKRVGHPYKKAFMQVVEADMLSKGLLGGEAWSSWHKEDSIHVGVRCIEMLIESTGMVSLHRQNAGVVGQDSETIELAPEYAEAIATRAGALAGISPMFQPCVVPPKPWTGITGGGYWAAGRKPLQLVRTRSLAALRRYEEVSMPEVIKAVNIAQNTAWRINKKVLDVANAITQWQHCPVADVPAMDRGEMPARPLDIDTNEIALKAWKKEASAFYRKDKARVSRRLSMEFMLSQANKFANYKAIWFPQNMDWRGRVYAVPMFNPQGNDMTKGLLTFAQEKPIGEDGFYWLKIHGANTAGVDKVPFPQRIKFVEDNHTNIMECAKAPLENTWWAEQDSPFCFLAFCFEYAGVINHGLSYNCSLPLAFDGSCSGIQHFSAMLRDEIGGKAVNLLPSAEYQDIYRIVSDKVNEVLKQDLINGTSTTVETVTDKKTGEITQRTKYGTKVMAQWWLEHGVNRGVTKRSVMTLVYGSKEFGFRDQVLSDTIQPAIDNGKGDMFLNPNQAAGYMAKLIWNAVSGTVVAAVEAMNWLKSAAKLLAAEVKDPKTDTVLRGRCAVHWVTPDGFPVWQEYKKPIQTRLNLMFLGQFRLQPTINTNKDSEIDAHKQESGIAPNFVHSQDGNHLRMTVVWAHEKYGIESFALIHDSFGTIPADAANLFKAVRETMVSTYESCDVLADFYDQFADQLHESQLDKMPALPAKGNLNLRDILKSDFAFA

SEQ ID NO: 799 - DNA, 2670 bp, synthetic construct
  misc_feature 1..2670: note = Variant of RNA polymerase
  source 1..2670: mol_type = other DNA
atgcaccatcaccatcaccatatgaacacgattaacattgctaagaacgacttctctgacatcgaactggctgctatcccgttcaacactctggctgaccattacggtgagcgtttagctcgcgaacagttggcccttgagcatgagtcttacgagatgggtgaagcacgcttccgcaagatgtttgagcgtcaacttaaagctggtgaggttgcggataacgctgccgccaagcctctcatcactaccctactccctaagatgattgcacgcatcaacgactggtttgaggaagtgaaagctaagcgcggcaagcgcccgacagccttccagttcctgcaagaaatcaagccggaagccgtagcgtacatcaccattaagaccactctggcttgcctaaccagtgcggacaatacaaccgttcaggctgtagcaagcgcaatcggtcgggccattgaggacgaggctcgcttcggtcgtatccgtgaccttgaagctaagcacttcaagaagaacgttgaggaacaactcaacaagcgcgtagggcacgtgtacaagaaagcatttatgcaagttgtcgaggctgacgtgctctctaagggtctactcggtggcgaggcgtggtcttcgtggcataaggaagactctattcatgtaggagtacgctgcatcgagatgctcattgagtcaaccggaatggttagcttacaccgccaaaatgctggcgtagtaggtcaagactctgagactatcgaactcgcacctgaatacgctgaggctatcgcaacccgtgcaggtgcgctggctggcatctctccgatgttccaaccttgcgtagttcctcctaagccgtggactggcattactggtggtggctattgggctgcggggcgcaaacccctgcagttagtacgtactcgcagtctggcggcgcttcgccgctatgaagaagtgtcgatgccggaggtcatcaaagcagtcaacattgcgcagaatacagcatggcgtattaacaagaaagttctcgacgtagcgaataccatcacccaatggcagcactgtccagtcgcggatgtgcctgcgatggatcgtggcgaaatgccagctcgtccgttggacatcgataccaacgagattgcacttaaagcgtggaagaaagaagcttccgcgttctaccgcaaagacaaagcacgcgttagccgtcgtctgtcaatggagtttatgttatctcaggcgaacaagtttgcgaattataaagcaatctggtttccgcaaaacatggattggcgtgggcgcgtgtacgctgtcccgatgttcaatcctcagggcaacgatatgacgaaaggcctgctgacctttgcgcaggagaaacccattggtgaagacggcttctattggctcaagattcatggcgcaaatacagctggagtggataaagtaccgtttccacaacgcatcaaatttgttgaggataaccatacgaatattatggaatgcgcgaaagcaccgctggaaaacacttggtgggcggaacaggactcgccgttctgttttctggcgttctgctttgagtatgctggcgtcatcaatagtggtctgtcgtacaactgtagcttgcctctggcatttgatggtagttgctccggcattcaacatttctcagcgatgttacgcgacgaaattggcggcaaagctgtgaatctcctcccatctgcggaataccaggatatttatcgtatcgtcagcgacaaagttaacgaggtactgaaacaagatctgattaacggtacctctaccaccgtggaaacggtgactgataagaagacaggcgaaattacccaacgcacgaaatacgggaccaaagttatggcacagtggtggttagaacacggtgtgaatcgtggcgtcacgaaacgctcggttatgactttggtgtatgggagcaaagagtttggattccgcgatcaagtgctgagtgacaccattcaaccggcgatcgataacggcaaaggtgacatgtttctgaatccgaatcaggctgctggttacatggcgaaactgatctggaacgcagtgtccgggaccgtagtcgcagcagttgaggcgatgaactggctgaaaagtgcggcgaaattacttgctgctgaagtgaaggatcctaagacggatacagttctgcgtggccgctgcgcagtacattgggtgactcccgacggcttccctgtgtggcaggaatacaagaagcctattcagacgcgcttgaacctgatgttcctcggtcagttccgcttacagcctaccattaacaccaacaaagatagcgagattgatgcacacaaacaggagtctggtatcgctcctaactttgtacacagccaagacggtaaccaccttcgtatgactgtagtgtgggcacacgagaagtacggaatcgaatcttttgcactgattcacgactccttcggtaccattccggctgacgctgcgaacctgttcaaagcagtgcgcgaaactatggtttcgacatatgagtcttgtgatgtactggctgatttctacgaccagttcgctgaccagttgcacgagtctcaattggacaaaatgccagcacttccggctaaaggtaacttgaacctccgtgacatcttaaaatcggacttcgcgttcgcg

SEQ ID NO: 800 - protein, 890 aa, synthetic construct
  REGION 1..890: note = Variant of RNA polymerase
MHHHHHHMNTINIAKNDFSDIELAAIPFNTLADHYGERLAREQLALEHESYEMGEARFRKMFERQLKAGEVADNAAAKPLITTLLPKMIARINDWFEEVKAKRGKRPTAFQFLQEIKPEAVAYITIKTTLACLTSADNTTVQAVASAIGRAIEDEARFGRIRDLEAKHFKKNVEEQLNKRVGHVYKKAFMQVVEADVLSKGLLGGEAWSSWHKEDSIHVGVRCIEMLIESTGMVSLHRQNAGVVGQDSETIELAPEYAEAIATRAGALAGISPMFQPCVVPPKPWTGITGGGYWAAGRKPLQLVRTRSLAALRRYEEVSMPEVIKAVNIAQNTAWRINKKVLDVANTITQWQHCPVADVPAMDRGEMPARPLDIDTNEIALKAWKKEASAFYRKDKARVSRRLSMEFMLSQANKFANYKAIWFPQNMDWRGRVYAVPMFNPQGNDMTKGLLTFAQEKPIGEDGFYWLKIHGANTAGVDKVPFPQRIKFVEDNHTNIMECAKAPLENTWWAEQDSPFCFLAFCFEYAGVINSGLSYNCSLPLAFDGSCSGIQHFSAMLRDEIGGKAVNLLPSAEYQDIYRIVSDKVNEVLKQDLINGTSTTVETVTDKKTGEITQRTKYGTKVMAQWWLEHGVNRGVTKRSVMTLVYGSKEFGFRDQVLSDTIQPAIDNGKGDMFLNPNQAAGYMAKLIWNAVSGTVVAAVEAMNWLKSAAKLLAAEVKDPKTDTVLRGRCAVHWVTPDGFPVWQEYKKPIQTRLNLMFLGQFRLQPTINTNKDSEIDAHKQESGIAPNFVHSQDGNHLRMTVVWAHEKYGIESFALIHDSFGTIPADAANLFKAVRETMVSTYESCDVLADFYDQFADQLHESQLDKMPALPAKGNLNLRDILKSDFAFA

SEQ ID NO: 801 - DNA, 2670 bp, synthetic construct
  misc_feature 1..2670: note = Variant of RNA polymerase
  source 1..2670: mol_type = other DNA
atgcaccatcaccatcaccatatgaacacgattaacattgctaagaacgacttctctgacatcgaactggctgctatcccgttcaacactctggctgaccattacggtgagcgtttagctcgcgaacagttggcccttgagcatgagtcttacgagatgggtgaagcacgcttccgcaagatgtttgagcgtcaacttaaagctggtgaggttgcggataacgctgccgccaagcctctcatcactaccctactccctaagatgattgcacgcatcaacgactggtttgaggaagtgaaagctaagcgcggcaagcgcccgacagccttccagttcctgcaagaaatcaagccggaagccgtagcgtacatcaccattaagaccactctggcttgcctaaccagtgcggacaatacaaccgttcaggctgtagcaagcgcaatcggtcgggccattgaggacgaggctcgcttcggtcgtatccgtgaccttgaagctaagcacttcaagaaaaacgttgaggaacaactcaacaagcgcgtagggcacgtctacaagaaagcatttatgcaagttgtcgaggctgacatgctctctaagggtctactcggtggcgaggcgtggtcttcgtggcataaggaagactctattcatgtaggagtacgctgcatcgagatgctcattgagtcaaccggaatggttagcttacaccgccaaaatgctggcgtagtaggtcaagactctgagactatcgaactcgcacctgaatacgctgaggctatcgcaacccgtgcaggtgcgctggctggcatctctccgatgttccaaccttgcgtagttcctcctaagccgtggactggcattactggtggtggctattgggctgcggggcgcaaacccctgcagttagtacgtactcgcagtctggcggcgcttcgccgctatgaagaagtgtcgatgccggaggtcatcaaagcagtcaacattgcgcagaatacagcatggcgtattaacaagaaagttctcgacgtagcgaatgcaatcacccaatggcagcactgtccagtcgcggatgtgcctgcgatggatcgtggcgaaatgccagctcgtccgttggacatcgataccaacgagattgcacttaaagcgtggaagaaagaagcttccgcgttctaccgcaaagacaaagcacgcgttagccgtcgtctgtcaatggagtttatgttatctcaggcgaacaagtttgcgaattataacgcaatctggtttccgcaaaacatggattggcgtgggcgcgtgtacgctgtcccgatgttcaatcctcagggcaacgatatgacgaaaggcctgctgacctttgcgcaggagaaacccattggtgaagacggcttctattggctcaagattcatggcgcaaatacagctggagtggataaagtaccgtttccacaacgcatcaaatttgttgaggataaccatacgaatattatggaatgcgcgaaagcaccgctggaaaacacttggtgggcggaacaggactcgccgttctgttttctggcgttctgctttgagtatgctggcgtcatcaatcacggtctgtcgtacaactgtagcttgcctctggcatttgatggtagttgctccggcattcaacatttctcagcgatgttacgcgacgaaattggcggcaaagctgtgaatctcctcccatctgcggaataccaggatatttatcgtatcgtcagcgacaaagttaacgaggtactgaaacaagatctgattaacggtacctctaccaccgtggaaacggtgactgataagaagacaggcgaaattacccaacgcacgaaatacgggaccaaagttatggcacagtggtggttagaacacggtgtgaatcgtggcgtcacgaaacgctcggttatgactttggtgtatgggagcaaagagtttggattccgcgatcaagtgctgagtgacaccattcaaccggcgatcgataacggcaaaggtgacatgtttctgaatccgaatcaggctgctggttacatggcgaaactgatctggaacgcagtgtccgggaccgtagtcgcagcagttgaggcgatgaactggctgaaaagtgcggcgaaattacttgctgctgaagtgaaggatcctaagacggatacagttctgcgtggccgctgcgcagtacattgggtgactcccgacggcttccctgtgtggcaggaatacaagaagcctattcagacgcgcttgaacctgatgttcctcggtcagttccgcttacagcctaccattaacaccaacaaagatagcgagattgatgcacacaaacaggagtctggtatcgctcctaactttgtacacagccaagacggtaaccaccttcgtatgactgtagtgtgggcacacgagaagtacggaatcgaatcttttgcactgattcacgactccttcggtaccattccggctgacgctgcgaacctgttcaaagcagtgcgcgaaactatggtttcgacatatgagtcttgtgatgtactggctgatttctacgaccagttcgctgaccagttgcacgagtctcaattggacaaaatgccagcacttccggctaaaggtaacttgaacctccgtgacatcttaaaatcggacttcgcgttcgcg

SEQ ID NO: 802 - protein, 890 aa, synthetic construct
  REGION 1..890: note = Variant of RNA polymerase
MHHHHHHMNTINIAKNDFSDIELAAIPFNTLADHYGERLAREQLALEHESYEMGEARFRKMFERQLKAGEVADNAAAKPLITTLLPKMIARINDWFEEVKAKRGKRPTAFQFLQEIKPEAVAYITIKTTLACLTSADNTTVQAVASAIGRAIEDEARFGRIRDLEAKHFKKNVEEQLNKRVGHVYKKAFMQVVEADMLSKGLLGGEAWSSWHKEDSIHVGVRCIEMLIESTGMVSLHRQNAGVVGQDSETIELAPEYAEAIATRAGALAGISPMFQPCVVPPKPWTGITGGGYWAAGRKPLQLVRTRSLAALRRYEEVSMPEVIKAVNIAQNTAWRINKKVLDVANAITQWQHCPVADVPAMDRGEMPARPLDIDTNEIALKAWKKEASAFYRKDKARVSRRLSMEFMLSQANKFANYNAIWFPQNMDWRGRVYAVPMFNPQGNDMTKGLLTFAQEKPIGEDGFYWLKIHGANTAGVDKVPFPQRIKFVEDNHTNIMECAKAPLENTWWAEQDSPFCFLAFCFEYAGVINHGLSYNCSLPLAFDGSCSGIQHFSAMLRDEIGGKAVNLLPSAEYQDIYRIVSDKVNEVLKQDLINGTSTTVETVTDKKTGEITQRTKYGTKVMAQWWLEHGVNRGVTKRSVMTLVYGSKEFGFRDQVLSDTIQPAIDNGKGDMFLNPNQAAGYMAKLIWNAVSGTVVAAVEAMNWLKSAAKLLAAEVKDPKTDTVLRGRCAVHWVTPDGFPVWQEYKKPIQTRLNLMFLGQFRLQPTINTNKDSEIDAHKQESGIAPNFVHSQDGNHLRMTVVWAHEKYGIESFALIHDSFGTIPADAANLFKAVRETMVSTYESCDVLADFYDQFADQLHESQLDKMPALPAKGNLNLRDILKSDFAFA

SEQ ID NO: 803 - DNA, 2670 bp, synthetic construct
  misc_feature 1..2670: note = Variant of RNA polymerase
  source 1..2670: mol_type = other DNA
atgcaccatcaccatcaccatatgaacacgattaacattgctaagaacgacttctctgacatcgaactggctgctatcccgttcaacactctggctgaccattacggtgagcgtttagctcgcgaacagttggcccttgagcatgagtcttacgagatgggtgaagcacgcttccgcaagatgtttgagcgtcaacttaaagctggtgaggttgcggataacgctgccgccaagcctctcatcactaccctactccctaagatgattgcacgcatcaacgactggtttgaggaagtgaaagctaagcgcggcaagcgcccgacagccttccagttcctgcaagaaatcaagccggaagccgtagcgtacatcaccattaagaccactctggcttgcctaaccagtgcggacaatacaaccgttcaggctgtagcaagcgcaatcggtcgggccattgaggacgaggctcgcttcggtcgtatccgtgaccttgaagctaagcacttcaagaaaaatgttgaggaacaactcaacaagcgcgtagggcacgtgtacaagaaagcatttatgcaagttgtcgaggctgacgtgctctctaagggtctactcggtggcgaggcgtggtcttcgtggcataaggaagactctattcatgtaggagtacgctgcatcgagatgctcattgagtcaaccggaatggttagcttacaccgccaaaatgctggcgtagtaggtcaagactctgagactatcgaactcgcacctgaatacgctgaggctatcgcaacccgtgcaggtgcgctggctggcatctctccgatgttccaaccttgcgtagttcctcctaagccgtggactggcattactggtggtggctattgggctgcggggcgcaaacccctgcagttagtacgtactcgcagtctggcggcgcttcgccgctatgaagaagtgtcgatgccggaggtcatcaaagcagtcaacattgcgcagaatacagcatggcgtattaacaagaaagttctcgacgtagcgaatgccatcacccaatggcagcactgtccagtcgcggatgtgcctgcgatggatcgtggcgaaatgccagctcgtccgttggacatcgataccaacgagattgcacttaaagcgtggaagaaagaagcttccgcgttctaccgcaaagacaaagcacgcgttagccgtcgtctgtcaatggagtttatgttatctcaggcgaacaagtttgcgaattataaagcaatctggtttccgcaaaacatggattggcgtgggcgcgtgtacgctgtcccgatgttcaatcctcagggcaacgatatgacgaaaggcctgctgacctttgcgcaggagaaacccattggtgaagacggcttctattggctcaagattcatggcgcaaatacagctggagtggataaagtaccgtttccacaacgcatcaaatttgttgaggataaccatacgaatattatggaatgcgcgaaagcaccgctggaaaacacttggtgggcggaacaggactcgccgttctgttttctggcgttctgctttgagtatgctggcgtcatcaatcatggtctgtcgtacaactgtagcttgcctctggcatttgatggtagttgctccggcattcaacatttctcagcgatgttacgcgacgaaattggcggcaaagctgtgaatctcctcccatctgcggaataccaggatatttatcgtatcgtcagcgacaaagttaacgaggtgctgaaacaagatctgattaacggtacctctaccaccgtggaaacggtgactgataagaagacaggcgaaattacccaacgcacgaaatacgggaccaaagttatggcacagtggtggttagaacacggtgtgaatcgtggcgtcacgaaacgctcggttatgactttggtgtatgggagcaaagagtttggattccgcgatcaagtgctgagtgacaccattcaaccggcgatcgataacggcaaaggtgacatgtttctgaatccgaatcaggctgctggttacatggcgaaactgatctggaacgcagtgtccgggaccgtagtcgcagcagttgaggcgatgaactggctgaaaagtgcggcgaaattacttgctgctgaagtgaaggatcctaagacggatacagttctgcgtggccgctgcgcagtacattgggtgactcccgacggcttccctgtgtggcaggaatacaagaagcctattcagacgcgcttgaacctgatgttcctcggtcagttccgcttacagcctaccattaacaccaacaaagatagcgagattgatgcacacaaacaggagtctggtatcgctcctaactttgtacacagccaagacggtaaccaccttcgtatgactgtagtgtgggcacacgagaagtacggaatcgaatcttttgcactgattcacgactccttcggtaccattccggctgacgctgcgaacctgttcaaagcagtgcgcgaaactatggtttcgacatatgagtcttgtgatgtactggctgatttctacgaccagttcgctgaccagttgcacgagtctcaattggacaaaatgccagcacttccggctaaaggtaacttgaacctccgtgacatcttaaaatcggacttcgcgttcgcg

SEQ ID NO: 804 - protein, 890 aa, synthetic construct
  REGION 1..890: note = Variant of RNA polymerase
MHHHHHHMNTINIAKNDFSDIELAAIPFNTLADHYGERLAREQLALEHESYEMGEARFRKMFERQLKAGEVADNAAAKPLITTLLPKMIARINDWFEEVKAKRGKRPTAFQFLQEIKPEAVAYITIKTTLACLTSADNTTVQAVASAIGRAIEDEARFGRIRDLEAKHFKKNVEEQLNKRVGHVYKKAFMQVVEADVLSKGLLGGEAWSSWHKEDSIHVGVRCIEMLIESTGMVSLHRQNAGVVGQDSETIELAPEYAEAIATRAGALAGISPMFQPCVVPPKPWTGITGGGYWAAGRKPLQLVRTRSLAALRRYEEVSMPEVIKAVNIAQNTAWRINKKVLDVANAITQWQHCPVADVPAMDRGEMPARPLDIDTNEIALKAWKKEASAFYRKDKARVSRRLSMEFMLSQANKFANYKAIWFPQNMDWRGRVYAVPMFNPQGNDMTKGLLTFAQEKPIGEDGFYWLKIHGANTAGVDKVPFPQRIKFVEDNHTNIMECAKAPLENTWWAEQDSPFCFLAFCFEYAGVINHGLSYNCSLPLAFDGSCSGIQHFSAMLRDEIGGKAVNLLPSAEYQDIYRIVSDKVNEVLKQDLINGTSTTVETVTDKKTGEITQRTKYGTKVMAQWWLEHGVNRGVTKRSVMTLVYGSKEFGFRDQVLSDTIQPAIDNGKGDMFLNPNQAAGYMAKLIWNAVSGTVVAAVEAMNWLKSAAKLLAAEVKDPKTDTVLRGRCAVHWVTPDGFPVWQEYKKPIQTRLNLMFLGQFRLQPTINTNKDSEIDAHKQESGIAPNFVHSQDGNHLRMTVVWAHEKYGIESFALIHDSFGTIPADAANLFKAVRETMVSTYESCDVLADFYDQFADQLHESQLDKMPALPAKGNLNLRDILKSDFAFA

SEQ ID NO: 805 - DNA, 2670 bp, synthetic construct
  misc_feature 1..2670: note = Variant of RNA polymerase
  source 1..2670: mol_type = other DNA
atgcaccatcaccatcaccatatgaacacgattaacattgctaagaacgacttctctgacatcgaactggctgctatcccgttcaacactctggctgaccattacggtgagcgtttagctcgcgaacagttggcccttgagcatgagtcttacgagatgggtgaagcacgcttccgcaagatgtttgagcgtcaacttaaagctggtgaggttgcggataacgctgccgccaagcctctcatcactaccctactccctaagatgattgcacgcatcaacgactggtttgaggaagtgaaagctaagcgcggcaagcgcccgacagccttccagttcctgcaagaaatcaagccggaagccgtagcgtacatcaccattaagaccactctggcttgcctaaccagtgcggacaatacaaccgttcaggctgtagcaagcgcaatcggtcgggccattgaggacgaggctcgcttcggtcgtatccgtgaccttgaagctaagcacttcaagaagaacgttgaggaacaactcaacaagcgcgtagggcacgtctacaagaaagcatttatgcaagttgtcgagcacgacatgctctctaagggtctactcggtggcgaggcgtggtcttcgtggcataaggaagactctattcatgtaggagtacgctgcatcgagatgctcattgagtcaaccggaatggttagcttacaccgccaaaatgctggcgtagtaggtcaagactctgagactatcgaactcgcacctgaatacgctgaggctatcgcaacccgtgcaggtgcgctggctggcatctctccgatgttccaaccttgcgtagttcctcctaagccgtggactggcattactggtggtggctattgggctgcggggcgcaaacccctgcagttagtacgtactcgcagtctggcggcgcttcgccgctatgaagaagtgtcgatgccggaggtcatcaaagcagtcaacattgcgcagaatacagcatggcgtattaacaagaaagttctcgacgtagcgaatgccatcacccaatggcagcactgtccagtcgcggatgtgcctgcgatggatcgtggcgaaatgccagctcgtccgttggacatcgataccaacgagattgcacttaaagcgtggaagaaagaagcttccgcgttctaccgcaaagacaaagcacgcgttagccgtcgtctgtcaatggagtttatgttatctcaggcgaacaagtttgcgaatgagaaagcaatctggtttccgcaaaacatggattggcgtgggcgcgtgtacgctgtcccgatgttcaatcctcagggcaacgatatgacgaaaggcctgctgacctttgcgcaggagaaacccattggtgaagacggcttctattggctcaagattcatggcgcaaatacagctggagtggataaagtaccgtttccacaacgcatcaaatttgttgaggataaccatacgaatattatggaatgcgcgaaagcaccgctggaaaacacttggtgggcggaacaggactcgccgttctgttttctggcgttctgctttgagtatgctggcgtcatcaatcacggtctgtcgtacaactgtagcttgcctctggcatttgatggtagttgctccggcattcaacatttctcagcgatgttacgcgacgaaattggcggcaaagctgtgaatctcctcccatctgcggaataccaggatatttatcgtatcgtcagcgacaaagttaacgaggtactgaaacaagatctgattaacggtacctctaccaccgtggaaacggtgactgataagaagacaggcgaaattacccaacgcacgaaatacgggaccaaagttatggcacagtggtggttagaacacggtgtgaatcgtggcgtcacgaaacgctcggttatgactttggtgtatgggagcaaagagtttggattccgcgatcaagtgctgagtgacaccattcaaccggcgatcgataacggcaaaggtgacatgtttctgaatccgaatcaggctgctggttacatggcgaaactgatctggaacgcagtgtccgggaccgtagtcgcagcagttgaggcgatgaactggctgaaaagtgcggcgaaattacttgctgctgaagtgaaggatcctaagacggatacagttctgcgtggccgctgcgcagtacattgggtgactcccgacggcttccctgtgtggcaggaatacaagaagcctattcagacgcgcttgaacctgatgttcctcggtcagttccgcttacagcctaccattaacaccaacaaagatagcgagattgatgcacacaaacaggagtctggtatcgctcctaactttgtacacagccaagacggtaaccaccttcgtatgactgtagtgtgggcacacgagaagtacggaatcgaatcttttgcactgattcacgactccttcggtaccattccggctgacgctgcgaacctgttcaaagcagtgcgcgaaactatggtttcgacatatgagtcttgtgatgtactggctgatttctacgaccagttcgctgaccagttgcacgagtctcaattggacaaaatgccagcacttccggctaaaggtaacttgaacctccgtgacatcttaaaatcggacttcgcgttcgcg

SEQ ID NO: 806 - protein, 890 aa, synthetic construct
  REGION 1..890: note = Variant of RNA polymerase
MHHHHHHMNTINIAKNDFSDIELAAIPFNTLADHYGERLAREQLALEHESYEMGEARFRKMFERQLKAGEVADNAAAKPLITTLLPKMIARINDWFEEVKAKRGKRPTAFQFLQEIKPEAVAYITIKTTLACLTSADNTTVQAVASAIGRAIEDEARFGRIRDLEAKHFKKNVEEQLNKRVGHVYKKAFMQVVEHDMLSKGLLGGEAWSSWHKEDSIHVGVRCIEMLIESTGMVSLHRQNAGVVGQDSETIELAPEYAEAIATRAGALAGISPMFQPCVVPPKPWTGITGGGYWAAGRKPLQLVRTRSLAALRRYEEVSMPEVIKAVNIAQNTAWRINKKVLDVANAITQWQHCPVADVPAMDRGEMPARPLDIDTNEIALKAWKKEASAFYRKDKARVSRRLSMEFMLSQANKFANEKAIWFPQNMDWRGRVYAVPMFNPQGNDMTKGLLTFAQEKPIGEDGFYWLKIHGANTAGVDKVPFPQRIKFVEDNHTNIMECAKAPLENTWWAEQDSPFCFLAFCFEYAGVINHGLSYNCSLPLAFDGSCSGIQHFSAMLRDEIGGKAVNLLPSAEYQDIYRIVSDKVNEVLKQDLINGTSTTVETVTDKKTGEITQRTKYGTKVMAQWWLEHGVNRGVTKRSVMTLVYGSKEFGFRDQVLSDTIQPAIDNGKGDMFLNPNQAAGYMAKLIWNAVSGTVVAAVEAMNWLKSAAKLLAAEVKDPKTDTVLRGRCAVHWVTPDGFPVWQEYKKPIQTRLNLMFLGQFRLQPTINTNKDSEIDAHKQESGIAPNFVHSQDGNHLRMTVVWAHEKYGIESFALIHDSFGTIPADAANLFKAVRETMVSTYESCDVLADFYDQFADQLHESQLDKMPALPAKGNLNLRDILKSDFAFA

SEQ ID NO: 807 - DNA, 2670 bp, synthetic construct
  misc_feature 1..2670: note = Variant of RNA polymerase
  source 1..2670: mol_type = other DNA
atgcaccatcaccatcaccatatgaacacgattaacattgctaagaacgacttctctgacatcgaactggctgctatcccgttcaacactctggctgaccattacggtgagcgtttagctcgcgaacagttggcccttgagcatgagtcttacgagatgggtgaagcacgcttccgcaagatgtttgagcgtcaacttaaagctggtgaggttgcggataacgctgccgccaagcctctcatcactaccctactccctaagatgattgcacgcatcaacgactggtttgaggaagtgaaagctaagcgcggcaagcgcccgacagccttccagttcctgcaagaaatcaagccggaagccgtagcgtacatcaccattaagaccactctggcttgcctaaccagtgcggacaatacaaccgttcaggctgtagcaagcgcaatcggtcgggccattgaggacgaggctcgcttcggtcgtatccgtgaccttgaagctaagcacttcaagggcaacgttgaggaacaactcaacaagcgcgtagggcacgtctacaagaaagcatttatgcaagttgtcgaggctgacatgctctctaagggtctactcggtggcgaggcgtggtcttcgtggcataaggaagactctattcatgtaggagtacgctgcatcgagatgctcattgagtcaaccggaatggttagcttacaccgccaaaatgctggcgtagtaggtcaagactctgagactatcgaactcgcacctgaatacgctgaggctatcgcaacccgtgcaggtgcgctggctggcatctctccgatgttccaaccttgcgtagttcctcctaagccgtggactggcattactggtggtggctattgggctgcggggcgcaaacccctgcagttagtacgtactcgcagtctggcggcgcttcgccgctatgaagaagtgtcgatgccggaggtcatcaaagcagtcaacattgcgcagaatacagcatggcgtattaacaagaaagttctcgacgtagcgaataccatcacccaatggcagcactgtccagtcgcggatgtgcctgcgatggatcgtggcgaaatgccagctcgtccgttggacatcgataccaacgagattgcacttaaagcgtggaagaaagaagcttccgcgttctaccgcaaagacaaagcacgcgttagccgtcgtctgtcaatggagtttatgttatctcaggcgaacaagtttgcgaattataaagcaatctggtttccgcaaaacatggattggcgtgggcgcgtgtacgctgtcccgatgttcaatcctcagggcaacgatatgacgaaaggcctgctgacctttgcgcaggagaaacccattggtgaagacggcttctattggctcaagattcatggcgcaaatacagctggagtggataaagtaccgtttccacaacgcatcaaatttgttgaggataaccatacgaatattatggaatgcgcgaaagcaccgctggaaaacacttggtgggcggaacaggactcgccgttctgttttctggcgttctgctttgagtatgctggcgtcatcaatagtggtctgtcgtacaactgtagcttgcctctggcatttgatggtagttgctccggcattcaacatttctcagcgatgttacgcgacgaaattggcggcaaagctgtgaatctcctcccatctgcggaataccaggatatttatcgtatcgtcagcgacaaagttaacgaggtactgaaacaagatctgattaacggtacctctaccaccgtggaaacggtgactgataagaagacaggcgaaattacccaacgcacgaaatacgggaccaaagttatggcacagtggtggttagaacacggtgtgaatcgtggcgtcacgaaacgctcggttatgactttggtgtatgggagcaaagagtttggattccgcgatcaagtgctgagtgacaccattcaaccggcgatcgataacggcaaaggtgacatgtttctgaatccgaatcaggctgctggttacatggcgaaactgatctggaacgcagtgtccgggaccgtagtcgcagcagttgaggcgatgaactggctgaaaagtgcggcgaaattacttgctgctgaagtgaaggatcctaagacggatacagttctgcgtggccgctgcgcagtacattgggtgactcccgacggcttccctgtgtggcaggaatacaagaagcctattcagacgcgcttgaacctgatgttcctcggtcagttccgcttacagcctaccattaacaccaacaaagatagcgagattgatgcacacaaacaggagtctggtatcgctcctaactttgtacacagccaagacggtaaccaccttcgtatgactgtagtgtgggcacacgagaagtacggaatcgaatcttttgcactgattcacgactccttcggtaccattccggctgacgctgcgaacctgttcaaagcagtgcgcgaaactatggtttcgacatatgagtcttgtgatgtactggctgatttctacgaccagttcgctgaccagttgcacgagtctcaattggacaaaatgccagcacttccggctaaaggtaacttgaacctccgtgacatcttaaaatcggacttcgcgttcgcg

SEQ ID NO: 808 - protein, 890 aa, synthetic construct
  REGION 1..890: note = Variant of RNA polymerase
MHHHHHHMNTINIAKNDFSDIELAAIPFNTLADHYGERLAREQLALEHESYEMGEARFRKMFERQLKAGEVADNAAAKPLITTLLPKMIARINDWFEEVKAKRGKRPTAFQFLQEIKPEAVAYITIKTTLACLTSADNTTVQAVASAIGRAIEDEARFGRIRDLEAKHFKGNVEEQLNKRVGHVYKKAFMQVVEADMLSKGLLGGEAWSSWHKEDSIHVGVRCIEMLIESTGMVSLHRQNAGVVGQDSETIELAPEYAEAIATRAGALAGISPMFQPCVVPPKPWTGITGGGYWAAGRKPLQLVRTRSLAALRRYEEVSMPEVIKAVNIAQNTAWRINKKVLDVANTITQWQHCPVADVPAMDRGEMPARPLDIDTNEIALKAWKKEASAFYRKDKARVSRRLSMEFMLSQANKFANYKAIWFPQNMDWRGRVYAVPMFNPQGNDMTKGLLTFAQEKPIGEDGFYWLKIHGANTAGVDKVPFPQRIKFVEDNHTNIMECAKAPLENTWWAEQDSPFCFLAFCFEYAGVINSGLSYNCSLPLAFDGSCSGIQHFSAMLRDEIGGKAVNLLPSAEYQDIYRIVSDKVNEVLKQDLINGTSTTVETVTDKKTGEITQRTKYGTKVMAQWWLEHGVNRGVTKRSVMTLVYGSKEFGFRDQVLSDTIQPAIDNGKGDMFLNPNQAAGYMAKLIWNAVSGTVVAAVEAMNWLKSAAKLLAAEVKDPKTDTVLRGRCAVHWVTPDGFPVWQEYKKPIQTRLNLMFLGQFRLQPTINTNKDSEIDAHKQESGIAPNFVHSQDGNHLRMTVVWAHEKYGIESFALIHDSFGTIPADAANLFKAVRETMVSTYESCDVLADFYDQFADQLHESQLDKMPALPAKGNLNLRDILKSDFAFA

SEQ ID NO: 809 - DNA, 2670 bp, synthetic construct
  misc_feature 1..2670: note = Variant of RNA polymerase
  source 1..2670: mol_type = other DNA
atgcaccatcaccatcaccatatgaacacgattaacattgctaagaacgacttctctgacatcgaactggctgctatcccgttcaacactctggctgaccattacggtgagcgtttagctcgcgaacagttggcccttgagcatgagtcttacgagatgggtgaagcacgcttccgcaagatgtttgagcgtcaacttaaagctggtgaggttgcggataacgctgccgccaagcctctcatcactaccctactccctaagatgattgcacgcatcaacgactggtttgaggaagtgaaagctaagcgcggcaagcgcccgacagccttccagttcctgcaagaaatcaagccggaagccgtagcgtacatcaccattaagaccactctggcttgcctaaccagtgcggacaatacaaccgttcaggctgtagcaagcgcaatcggtcgggccattgaggacgaggctcgcttcggtcgtatccgtgaccttgaagctaagcacttcaagggcaacgttgaggaacaactcaacaagcgcgtagggcacgtctaccaaaaagcatttatgcaagttgtcgaggctgacatgctctctaagggtctactcggtggcgaggcgtggtcttcgtggcataaggaagactctattcatgtaggagtacgctgcatcgagatgctcattgagtcaaccggaatggttagcttacaccgccaaaatgctggcgtagtaggtcaagactctgagactatcgaactcgcacctgaatacgctgaggctatcgcaacccgtgcaggtgcgctggctggcatctctccgatgttccaaccttgcgtagttcctcctaagccgtggactggcattactggtggtggctattgggctgcggggcgcaaacccctgcagttagtacgtactcgcagtctggcggcgcttcgccgctatgaagaagtgtcgatgccggaggtcatcaaagcagtcaacattgcgcagaatacagcatggcgtattaacaagaaagttctcgacgtagcgaataccatcacccaatggcagcactgtccagtcgcggatgtgcctgcgatggatcgtggcgaaatgccagctcgtccgttggacatcgataccaacgagattgcacttaaagcgtggaagaaagaagcttccgcgttctaccgcaaagacaaagcacgcgttagccgtcgtctgtcaatggagtttatgttatctcaggcgaacaagtttgcgaatgagaaagcaatctggtttccgcaaaacatggattggcgtgggcgcgtgtacgctgtcccgatgttcaatcctcagggcaacgatatgacgaaaggcctgctgacctttgcgcaggagaaacccattggtgaagacggcttctattggctcaagattcatggcgcaaatacagctggagtggataaagtaccgtttccacaacgcatcaaatttgttgaggataaccatacgaatattatggaatgcgcgaaagcaccgctggaaaacacttggtgggcggaacaggactcgccgttctgttttctggcgttctgctttgagtatgctggcgtcatcaatcatggtctgtcgtacaactgtagcttgcctctggcatttgatggtagttgctccggcatccaacatttctcagcgatgttacgcgacgaaattggcgccaaagctgtgaatctcctcccatctgcggaataccaggatatttatcgtatcgtcagcgacaaagttaacgaggtactgaaacaagatctgattaacggtacctctaccaccgtggaaacggtgactgataagaagacaggcgaaattacccaacgcacgaaatacgggaccaaagttatggcacagtggtggttagaacacggtgtgaatcgtggcgtcacgaaacgctcggttatgactttggtgtatgggagcaaagagtttggattccgcgatcaagtgctgagtgacaccattcaaccggcgatcgataacggcaaaggtgacatgtttctgaatccgaatcaggctgctggttacatggcgaaactgatctggaacgcagtgtccgggaccgtagtcgcagcagttgaggcgatgaactggctgaaaagtgcggcgaaattacttgctgctgaagtgaaggatcctaagacggatacagttctgcgtggccgctgcgcagtacattgggtgactcccgacggcttccctgtgtggcaggaatacaagaagcctattcagacgcgcttgaacctgatgttcctcggtcagttccgcttacagcctaccattaacaccaacaaagatagcgagattgatgcacacaaacaggagtctggtatcgctcctaactttgtacacagccaagacggtaaccaccttcgtatgactgtagtgtgggcacacgagaagtacggaatcgaatcttttgcactgattcacgactccttcggtaccattccggctgacgctgcgaacctgttcaaagcagtgcgcgaaactatggtttcgacatatgagtcttgtgatgtactggctgatttctacgaccagttcgctgaccagttgcacgagtctcaattggacaaaatgccagcacttccggctaaaggtaacttgaacctccgtgacatcttaaaatcggacttcgcgttcgcg

SEQ ID NO: 810 - protein, 890 aa, synthetic construct
  REGION 1..890: note = Variant of RNA polymerase
MHHHHHHMNTINIAKNDFSDIELAAIPFNTLADHYGERLAREQLALEHESYEMGEARFRKMFERQLKAGEVADNAAAKPLITTLLPKMIARINDWFEEVKAKRGKRPTAFQFLQEIKPEAVAYITIKTTLACLTSADNTTVQAVASAIGRAIEDEARFGRIRDLEAKHFKGNVEEQLNKRVGHVYQKAFMQVVEADMLSKGLLGGEAWSSWHKEDSIHVGVRCIEMLIESTGMVSLHRQNAGVVGQDSETIELAPEYAEAIATRAGALAGISPMFQPCVVPPKPWTGITGGGYWAAGRKPLQLVRTRSLAALRRYEEVSMPEVIKAVNIAQNTAWRINKKVLDVANTITQWQHCPVADVPAMDRGEMPARPLDIDTNEIALKAWKKEASAFYRKDKARVSRRLSMEFMLSQANKFANEKAIWFPQNMDWRGRVYAVPMFNPQGNDMTKGLLTFAQEKPIGEDGFYWLKIHGANTAGVDKVPFPQRIKFVEDNHTNIMECAKAPLENTWWAEQDSPFCFLAFCFEYAGVINHGLSYNCSLPLAFDGSCSGIQHFSAMLRDEIGAKAVNLLPSAEYQDIYRIVSDKVNEVLKQDLINGTSTTVETVTDKKTGEITQRTKYGTKVMAQWWLEHGVNRGVTKRSVMTLVYGSKEFGFRDQVLSDTIQPAIDNGKGDMFLNPNQAAGYMAKLIWNAVSGTVVAAVEAMNWLKSAAKLLAAEVKDPKTDTVLRGRCAVHWVTPDGFPVWQEYKKPIQTRLNLMFLGQFRLQPTINTNKDSEIDAHKQESGIAPNFVHSQDGNHLRMTVVWAHEKYGIESFALIHDSFGTIPADAANLFKAVRETMVSTYESCDVLADFYDQFADQLHESQLDKMPALPAKGNLNLRDILKSDFAFA

SEQ ID NO: 811 - DNA, 2670 bp, synthetic construct
  misc_feature 1..2670: note = Variant of RNA polymerase
  source 1..2670: mol_type = other DNA
atgcaccatcaccatcaccatatgaacacgattaacattgctaagaacgacttctctgacatcgaactggctgctatcccgttcaacactctggctgaccattacggtgagcgtttagctcgcgaacagttggcccttgagcatgagtcttacgagatgggtgaagcacgcttccgcaagatgtttgagcgtcaacttaaagctggtgaggttgcggataacgctgccgccaagcctctcatcactaccctactccctaagatgattgcacgcatcaacgactggtttgaggaagtgaaagctaagcgcggcaagcgcccgacagccttccagttcctgcaagaaatcaagccggaagccgtagcgtacatcaccattaagaccactctggcttgcctaaccagtgcggacaatacaaccgttcaggctgtagcaagcgcaatcggtcgggccattgaggacgaggctcgcttcggtcgtatccgtgaccttgaagctaagcacttcaagaagaacgttgaggaacaactcaacaagcgcgtagggcacccgtacaagaaagcatttatgcaagttgtcgaggctgacatgctctctaagggtctactcggtggcgaggcgtggtcttcgtggcataaggaagactctattcatgtaggagtacgctgcatcgagatgctcattgagtcaaccggaatggttagcttacaccgccaaaatgctggcgtagtaggtcaagactctgagactatcgaactcgcacctgaatacgctgaggctatcgcaacccgtgcaggtgcgctggctggcatctctccgatgttccaaccttgcgtagttcctcctaagccgtggactggcattactggtggtggctattgggctgcggggcgcaaacccctgcagttagtacgtactcgcagtctggcggcgcttcgccgctatgaagaagtgtcgatgccggaggtcatcaaagcagtcaacattgcgcagaatacagcatggcgtattaacaagaaagttctcgacgtagcgaataccatcacccaatggcagcactgtccagtcgcggatgtgcctgcgatggatcgtggcgaaatgccagctcgtccgttggacatcgataccaacgagattgcacttaaagcgtggaagaaagaagcttccgcgttctaccgcaaagacaaagcacgcgttagccgtcgtctgtcaatggagtttatgttatctcaggcgaacaagtttgcgaatgagaaagcaatctggtttccgcaaaacatggattggcgtgggcgcgtgtacgctgtcccgatgttcaatcctcagggcaacgatatgacgaaaggcctgctgacctttgcgcaggagaaacccattggtgaagacggcttctattggctcaagattcatggcgcaaatacagctggagtggataaagtaccgtttccacaacgcatcaaatttgttgaggataaccatacgaatattatggaatgcgcgaaagcaccgctggaaaacacttggtgggcggaacaggactcgccgttctgttttctggcgttctgctttgagtatgctggcgtcatcaatcatggtctgtcgtacaactgtagcttgcctctggcatttgatggtagttgctccggcattcaacatttctcagcgatgttacgcgacgaaattggcggcaaagctgtgaatctcctcccatctgcggaataccaggatatttatcgtatcgtcagcgacaaagttaacgaggtactgaaacaagatctgattaacggtacctctaccaccgtggaaacggtgactgataagaagacaggcgaaattacccaacgcacgaaatacgggaccaaagttatggcacagtggtggttagaacacggtgtgaatcgtggcgtcacgaaacgctcggttatgactttggtgtatgggagcaaagagtttggattccgcgatcaagtgctgagtgacaccattcaaccggcgatcgataacggcaaaggtgacatgtttctgaatccgaatcaggctgctggttacatggcgaaactgatctggaacgcagtgtccgggaccgtagtcgcagcagttgaggcgatgaactggctgaaaagtgcggcgaaattacttgctgctgaagtgaaggatcctaagacggatacagttctgcgtggccgctgcgcagtacattgggtgactcccgacggcttccctgtgtggcaggaatacaagaagcctattcagacgcgcttgaacctgatgttcctcggtcagttccgcttacagcctaccattaacaccaacaaagatagcgagattgatgcacacaaacaggagtctggtatcgctcctaactttgtacacagccaagacggtaaccaccttcgtatgactgtagtgtgggcacacgagaagtacggaatcgaatcttttgcactgattcacgactccttcggtaccattccggctgacgctgcgaacctgttcaaagcagtgcgcgaaactatggtttcgacatatgagtcttgtgatgtactggctgatttctacgaccagttcgctgaccagttgcacgagtctcaattggacaaaatgccagcacttccggctaaaggtaacttgaacctccgtgacatcttaaaatcggacttcgcgttcgcg

SEQ ID NO: 812 - protein, 890 aa, synthetic construct
  REGION 1..890: note = Variant of RNA polymerase
MHHHHHHMNTINIAKNDFSDIELAAIPFNTLADHYGERLAREQLALEHESYEMGEARFRKMFERQLKAGEVADNAAAKPLITTLLPKMIARINDWFEEVKAKRGKRPTAFQFLQEIKPEAVAYITIKTTLACLTSADNTTVQAVASAIGRAIEDEARFGRIRDLEAKHFKKNVEEQLNKRVGHPYKKAFMQVVEADMLSKGLLGGEAWSSWHKEDSIHVGVRCIEMLIESTGMVSLHRQNAGVVGQDSETIELAPEYAEAIATRAGALAGISPMFQPCVVPPKPWTGITGGGYWAAGRKPLQLVRTRSLAALRRYEEVSMPEVIKAVNIAQNTAWRINKKVLDVANTITQWQHCPVADVPAMDRGEMPARPLDIDTNEIALKAWKKEASAFYRKDKARVSRRLSMEFMLSQANKFANEKAIWFPQNMDWRGRVYAVPMFNPQGNDMTKGLLTFAQEKPIGEDGFYWLKIHGANTAGVDKVPFPQRIKFVEDNHTNIMECAKAPLENTWWAEQDSPFCFLAFCFEYAGVINHGLSYNCSLPLAFDGSCSGIQHFSAMLRDEIGGKAVNLLPSAEYQDIYRIVSDKVNEVLKQDLINGTSTTVETVTDKKTGEITQRTKYGTKVMAQWWLEHGVNRGVTKRSVMTLVYGSKEFGFRDQVLSDTIQPAIDNGKGDMFLNPNQAAGYMAKLIWNAVSGTVVAAVEAMNWLKSAAKLLAAEVKDPKTDTVLRGRCAVHWVTPDGFPVWQEYKKPIQTRLNLMFLGQFRLQPTINTNKDSEIDAHKQESGIAPNFVHSQDGNHLRMTVVWAHEKYGIESFALIHDSFGTIPADAANLFKAVRETMVSTYESCDVLADFYDQFADQLHESQLDKMPALPAKGNLNLRDILKSDFAFA

SEQ ID NO: 813 - DNA, 2670 bp, synthetic construct
  misc_feature 1..2670: note = Variant of RNA polymerase
  source 1..2670: mol_type = other DNA
atgcaccatcaccatcaccatatgaacacgattaacattgctaagaacgacttctctgacatcgaactggctgctatcccgttcaacactctggctgaccattacggtgagcgtttagctcgcgaacagttggcccttgagcatgagtcttacgagatgggtgaagcacgcttccgcaagatgtttgagcgtcaacttaaagctggtgaggttgcggataacgctgccgccaagcctctcatcactaccctactccctaagatgattgcacgcatcaacgactggtttgaggaagtgaaagctaagcgcggcaagcgcccgacagccttccagttcctgcaagaaatcaagccggaagccgtagcgtacatcaccattaagaccactctggcttgcctaaccagtgcggacaatacaaccgttcaggctgtagcaagcgcaatcggtcgggccattgaggacgaggctcgcttcggtcgtatccgtgaccttgaagctaagcacttcaagggcaacgttgaggaacaactcaacaagcgcgtagggcacgtctaccaaaaagcatttatgcaagttgtcgaggctgacatgctctctaagggtctactcggtggcgaggcgtggtcttcgtggcataaggaagactctattcatgtaggagtacgctgcatcgagatgctcattgagtcaaccggaatggttagcttacaccgccaaaatgctggcgtagtaggtcaagactctgagactatcgaactcgcacctgaatacgctgaggctatcgcaacccgtgcaggtgcgctggctggcatctctccgatgttccaaccttgcgtagttcctcctaagccgtggactggcattactggtggtggctattgggctgcggggcgcaaacccctgcagttagtacgtactcgcagtctggcggcgcttcgccgctatgaagaagtgtcgatgccggaggtcatcaaagcagtcaacattgcgcagaatacagcatggcgtattaacaagaaagttctcgacgtagcgaataccatcacccaatggcagcactgtccagtcgcggatgtgcctgcgatggatcgtggcgaaatgccagctcgtccgttggacatcgataccaacgagattgcacttaaagcgtggaagaaagaagcttccgcgttctaccgcaaagacaaagcacgcgttagccgtcgtctgtcaatggagtttatgttatctcaggcgaacaagtttgcgaatgagaaagcaatctggtttccgcaaaacatggattggcgtgggcgcgtgtacgctgtcccgatgttcaatcctcagggcaacgatatgacgaaaggcctgctgacctttgcgcaggagaaacccattggtgaagacggcttctattggctcaagattcatggcgcaaatacagctggagtggataaagtaccgtttccacaacgcatcaaatttgttgaggataaccatacgaatattatggaatgcgcgaaagcaccgctggaaaacacttggtgggcggaacaggactcgccgttctgttttctggcgttctgctttgagtatgctggcgtcatcaatcacggtctgtcgtacaactgtagcttgcctctggcatttgatggtagttgctccggcattcaacatttctcagcgatgttacgcgacgaaattggcggcaaagctgtgaatctcctcccatctgcggaataccaggatatttatcgtatcgtcagcgacaaagttaacgaggtgctgaaacaagatctgattaacggtacctctaccaccgtggaaacggtgactgataagaagacaggcgaaattacccaacgcacgaaatacgggaccaaagttatggcacagtggtggttagaacacggtgtgaatcgtggcgtcacgaaacgctcggttatgactttggtgtatgggagcaaagagtttggattccgcgatcaagtgctgagtgacaccattcaaccggcgatcgataacggcaaaggtgacatgtttctgaatccgaatcaggctgctggttacatggcgaaactgatctggaacgcagtgtccgggaccgtagtcgcagcagttgaggcgatgaactggctgaaaagtgcggcgaaattacttgctgctgaagtgaaggatcctaagacggatacagttctgcgtggccgctgcgcagtacattgggtgactcccgacggcttccctgtgtggcaggaatacaagaagcctattcagacgcgcttgaacctgatgttcctcggtcagttccgcttacagcctaccattaacaccaacaaagatagcgagattgatgcacacaaacaggagtctggtatcgctcctaactttgtacacagccaagacggtaaccaccttcgtatgactgtagtgtgggcacacgagaagtacggaatcgaatcttttgcactgattcacgactccttcggtaccattccggctgacgctgcgaacctgttcaaagcagtgcgcgaaactatggtttcgacatatgagtcttgtgatgtactggctgatttctacgaccagttcgctgaccagttgcacgagtctcaattggacaaaatgccagcacttccggctaaaggtaacttgaacctccgtgacatcttaaaatcggacttcgcgttcgcg

SEQ ID NO: 814 - protein, 890 aa, synthetic construct
  REGION 1..890: note = Variant of RNA polymerase
MHHHHHHMNTINIAKNDFSDIELAAIPFNTLADHYGERLAREQLALEHESYEMGEARFRKMFERQLKAGEVADNAAAKPLITTLLPKMIARINDWFEEVKAKRGKRPTAFQFLQEIKPEAVAYITIKTTLACLTSADNTTVQAVASAIGRAIEDEARFGRIRDLEAKHFKGNVEEQLNKRVGHVYQKAFMQVVEADMLSKGLLGGEAWSSWHKEDSIHVGVRCIEMLIESTGMVSLHRQNAGVVGQDSETIELAPEYAEAIATRAGALAGISPMFQPCVVPPKPWTGITGGGYWAAGRKPLQLVRTRSLAALRRYEEVSMPEVIKAVNIAQNTAWRINKKVLDVANTITQWQHCPVADVPAMDRGEMPARPLDIDTNEIALKAWKKEASAFYRKDKARVSRRLSMEFMLSQANKFANEKAIWFPQNMDWRGRVYAVPMFNPQGNDMTKGLLTFAQEKPIGEDGFYWLKIHGANTAGVDKVPFPQRIKFVEDNHTNIMECAKAPLENTWWAEQDSPFCFLAFCFEYAGVINHGLSYNCSLPLAFDGSCSGIQHFSAMLRDEIGGKAVNLLPSAEYQDIYRIVSDKVNEVLKQDLINGTSTTVETVTDKKTGEITQRTKYGTKVMAQWWLEHGVNRGVTKRSVMTLVYGSKEFGFRDQVLSDTIQPAIDNGKGDMFLNPNQAAGYMAKLIWNAVSGTVVAAVEAMNWLKSAAKLLAAEVKDPKTDTVLRGRCAVHWVTPDGFPVWQEYKKPIQTRLNLMFLGQFRLQPTINTNKDSEIDAHKQESGIAPNFVHSQDGNHLRMTVVWAHEKYGIESFALIHDSFGTIPADAANLFKAVRETMVSTYESCDVLADFYDQFADQLHESQLDKMPALPAKGNLNLRDILKSDFAFA

SEQ ID NO: 815 - DNA, 2670 bp, synthetic construct
  misc_feature 1..2670: note = Variant of RNA polymerase
  source 1..2670: mol_type = other DNA
atgcaccatcaccatcaccatatgaacacgattaacattgctaagaacgacttctctgacatcgaactggctgctatcccgttcaacactctggctgaccattacggtgagcgtttagctcgcgaacagttggcccttgagcatgagtcttacgagatgggtgaagcacgcttccgcaagatgtttgagcgtcaacttaaagctggtgaggttgcggataacgctgccgccaagcctctcatcactaccctactccctaagatgattgcacgcatcaacgactggtttgaggaagtgaaagctaagcgcggcaagcgcccgacagccttccagttcctgcaagaaatcaagccggaagccgtagcgtacatcaccattaagaccactctggcttgcctaaccagtgcggacaatacaaccgttcaggctgtagcaagcgcaatcggtcgggccattgaggacgaggctcgcttcggtcgtatccgtgaccttgaagctaagcacttcaagaaaaacgttgaggaacaactcaacaagcgcgtagggcacgtctaccaaaaagcatttatgcaagttgtcgaggctgacatgctctctaagggtctactcggtggcgaggcgtggtcttcgtggcataaggaagactctattcatgtaggagtacgctgcatcgagatgctcattgagtcaaccggaatggttagcttacaccgccaaaatgctggcgtagtaggtcaagactctgagactatcgaactcgcacctgaatacgctgaggctatcgcaacccgtgcaggtgcgctggctggcatctctccgatgttccaaccttgcgtagttcctcctaagccgtggactggcattactggtggtggctattgggctgcggggcgcaaacccctgcagttagtacgtactcgcagtctggcggcgcttcgccgctatgaagaagtgtcgatgccggaggtcatcaaagcagtcaacattgcgcagaatacagcatggcgtattaacaagaaagttctcgacgtagcgaataccatcacccaatggcagcactgtccagtcgcggatgtgcctgcgatggatcgtggcgaaatgccagctcgtccgttggacatcgataccaacgagattgcacttaaagcgtggaagaaagaagcttccgcgttctaccgcaaagacaaagcacgcgttagccgtcgtctgtcaatggagtttatgttatctcaggcgaacaagtttgcgaatgagaaagcaatctggtttccgcaaaacatggattggcgtgggcgcgtgtacgctgtcccgatgttcaatcctcagggcaacgatatgacgaaaggcctgctgacctttgcgcaggagaaacccattggtgaagacggcttctattggctcaagattcatggcgcaaatacagctggagtggataaagtaccgtttccacaacgcatcaaatttgttgaggataaccatacgaatattatggaatgcgcgaaagcaccgctggaaaacacttggtgggcggaacaggactcgccgttctgttttctggcgttctgctttgagtatgctggcgtcatcaatagtggtctgtcgtacaactgtagcttgcctctggcatttgatggtagttgctccggcatccaacatttctcagcgatgttacgcgacgaaattggcggcaaagctgtgaatctcctcccatctgcggaataccaggatatttatcgtatcgtcagcgacaaagttaacgaggtactgaaacaagatctgattaacggtacctctaccaccgtggaaacggtgactgataagaagacaggcgaaattacccaacgcacgaaatacgggaccaaagttatggcacagtggtggttagaacacggtgtgaatcgtggcgtcacgaaacgctcggttatgactttggtgtatgggagcaaagagtttggattccgcgatcaagtgctgagtgacaccattcaaccggcgatcgataacggcaaaggtgacatgtttctgaatccgaatcaggctgctggttacatggcgaaactgatctggaacgcagtgtccgggaccgtagtcgcagcagttgaggcgatgaactggctgaaaagtgcggcgaaattacttgctgctgaagtgaaggatcctaagacggatacagttctgcgtggccgctgcgcagtacattgggtgactcccgacggcttccctgtgtggcaggaatacaagaagcctattcagacgcgcttgaacctgatgttcctcggtcagttccgcttacagcctaccattaacaccaacaaagatagcgagattgatgcacacaaacaggagtctggtatcgctcctaactttgtacacagccaagacggtaaccaccttcgtatgactgtagtgtgggcacacgagaagtacggaatcgaatcttttgcactgattcacgactccttcggtaccattccggctgacgctgcgaacctgttcaaagcagtgcgcgaaactatggtttcgacatatgagtcttgtgatgtactggctgatttctacgaccagttcgctgaccagttgcacgagtctcaattggacaaaatgccagcacttccggctaaaggtaacttgaacctccgtgacatcttaaaatcggacttcgcgttcgcg

SEQ ID NO: 816 - protein, 890 aa, synthetic construct
  REGION 1..890: note = Variant of RNA polymerase
MHHHHHHMNTINIAKNDFSDIELAAIPFNTLADHYGERLAREQLALEHESYEMGEARFRKMFERQLKAGEVADNAAAKPLITTLLPKMIARINDWFEEVKAKRGKRPTAFQFLQEIKPEAVAYITIKTTLACLTSADNTTVQAVASAIGRAIEDEARFGRIRDLEAKHFKKNVEEQLNKRVGHVYQKAFMQVVEADMLSKGLLGGEAWSSWHKEDSIHVGVRCIEMLIESTGMVSLHRQNAGVVGQDSETIELAPEYAEAIATRAGALAGISPMFQPCVVPPKPWTGITGGGYWAAGRKPLQLVRTRSLAALRRYEEVSMPEVIKAVNIAQNTAWRINKKVLDVANTITQWQHCPVADVPAMDRGEMPARPLDIDTNEIALKAWKKEASAFYRKDKARVSRRLSMEFMLSQANKFANEKAIWFPQNMDWRGRVYAVPMFNPQGNDMTKGLLTFAQEKPIGEDGFYWLKIHGANTAGVDKVPFPQRIKFVEDNHTNIMECAKAPLENTWWAEQDSPFCFLAFCFEYAGVINSGLSYNCSLPLAFDGSCSGIQHFSAMLRDEIGGKAVNLLPSAEYQDIYRIVSDKVNEVLKQDLINGTSTTVETVTDKKTGEITQRTKYGTKVMAQWWLEHGVNRGVTKRSVMTLVYGSKEFGFRDQVLSDTIQPAIDNGKGDMFLNPNQAAGYMAKLIWNAVSGTVVAAVEAMNWLKSAAKLLAAEVKDPKTDTVLRGRCAVHWVTPDGFPVWQEYKKPIQTRLNLMFLGQFRLQPTINTNKDSEIDAHKQESGIAPNFVHSQDGNHLRMTVVWAHEKYGIESFALIHDSFGTIPADAANLFKAVRETMVSTYESCDVLADFYDQFADQLHESQLDKMPALPAKGNLNLRDILKSDFAFA

SEQ ID NO: 817 - DNA, 2670 bp, synthetic construct
  misc_feature 1..2670: note = Variant of RNA polymerase
  source 1..2670: mol_type = other DNA
atgcaccatcaccatcaccatatgaacacgattaacattgctaagaacgacttctctgacatcgaactggctgctatcccgttcaacactctggctgaccattacggtgagcgtttagctcgcgaacagttggcccttgagcatgagtcttacgagatgggtgaagcacgcttccgcaagatgtttgagcgtcaacttaaagctggtgaggttgcggataacgctgccgccaagcctctcatcactaccctactccctaagatgattgcacgcatcaacgactggtttgaggaagtgaaagctaagcgcggcaagcgcccgacagccttccagttcctgcaagaaatcaagccggaagccgtagcgtacatcaccattaagaccactctggcttgcctaaccagtgcggacaatacaaccgttcaggctgtagcaagcgcaatcggtcgggccattgaggacgaggctcgcttcggtcgtatccgtgaccttgaagctaagcacttcaagaaaattgttgaggaacaactcaacaagcgcgtagggcacccgtacaagaaagcatttatgcaagttgtcgaggctgacatgctctctaagggtctactcggtggcgaggcgtggtcttcgtggcataaggaagactctattcatgtaggagtacgctgcatcgagatgctcattgagtcaaccggaatggttagcttacaccgccaaaatgctggcgtagtaggtcaagactctgagactatcgaactcgcacctgaatacgctgaggctatcgcaacccgtgcaggtgcgctggctggcatctctccgatgttccaaccttgcgtagttcctcctaagccgtggactggcattactggtggtggctattgggctgcggggcgcaaacccctgcagttagtacgtactcgcagtctggcggcgcttcgccgctatgaagaagtgtcgatgccggaggtcatcaaagcagtcaacattgcgcagaatacagcatggcgtattaacaagaaagttctcgacgtagcgaataccatcacccaatggcagcactgtccagtcgcggatgtgcctgcgatggatcgtggcgaaatgccagctcgtccgttggacatcgataccaacgagattgcacttaaagcgtggaagaaagaagcttccgcgttctaccgcaaagacaaagcacgcgttagccgtcgtctgtcaatggagtttatgttatctcaggcgaacaagtttgcgaatgagaaagcaatctggtttccgcaaaacatggattggcgtgggcgcgtgtacgctgtcccgatgttcaatcctcagggcaacgatatgacgaaaggcctgctgacctttgcgcaggagaaacccattggtgaagacggcttctattggctcaagattcatggcgcaaatacagctggagtggataaagtaccgtttccacaacgcatcaaatttgttgaggataaccatacgaatattatggaatgcgcgaaagcaccgctggaaaacacttggtgggcggaacaggactcgccgttctgttttctggcgttctgctttgagtatgctggcgtcatcaatcatggtctgtcgtacaactgtagcttgcctctggcatttgatggtagttgctccggcatccaacatttctcagcgatgttacgcgacgaaattggcggcaaagctgtgaatctcctcccatctgcggaataccaggatatttatcgtatcgtcagcgacaaagttaacgaggtactgaaacaagatctgattaacggtacctctaccaccgtggaaacggtgactgataagaagacaggcgaaattacccaacgcacgaaatacgggaccaaagttatggcacagtggtggttagaacacggtgtgaatcgtggcgtcacgaaacgctcggttatgactttggtgtatgggagcaaagagtttggattccgcgatcaagtgctgagtgacaccattcaaccggcgatcgataacggcaaaggtgacatgtttctgaatccgaatcaggctgctggttacatggcgaaactgatctggaacgcagtgtccgggaccgtagtcgcagcagttgaggcgatgaactggctgaaaagtgcggcgaaattacttgctgctgaagtgaaggatcctaagacggatacagttctgcgtggccgctgcgcagtacattgggtgactcccgacggcttccctgtgtggcaggaatacaagaagcctattcagacgcgcttgaacctgatgttcctcggtcagttccgcttacagcctaccattaacaccaacaaagatagcgagattgatgcacacaaacaggagtctggtatcgctcctaactttgtacacagccaagacggtaaccaccttcgtatgactgtagtgtgggcacacgagaagtacggaatcgaatcttttgcactgattcacgactccttcggtaccattccggctgacgctgcgaacctgttcaaagcagtgcgcgaaactatggtttcgacatatgagtcttgtgatgtactggctgatttctacgaccagttcgctgaccagttgcacgagtctcaattggacaaaatgccagcacttccggctaaaggtaacttgaacctccgtgacatcttaaaatcggacttcgcgttcgcg

SEQ ID NO: 818 - protein, 890 aa, synthetic construct
  REGION 1..890: note = Variant of RNA polymerase
MHHHHHHMNTINIAKNDFSDIELAAIPFNTLADHYGERLAREQLALEHESYEMGEARFRKMFERQLKAGEVADNAAAKPLITTLLPKMIARINDWFEEVKAKRGKRPTAFQFLQEIKPEAVAYITIKTTLACLTSADNTTVQAVASAIGRAIEDEARFGRIRDLEAKHFKKIVEEQLNKRVGHPYKKAFMQVVEADMLSKGLLGGEAWSSWHKEDSIHVGVRCIEMLIESTGMVSLHRQNAGVVGQDSETIELAPEYAEAIATRAGALAGISPMFQPCVVPPKPWTGITGGGYWAAGRKPLQLVRTRSLAALRRYEEVSMPEVIKAVNIAQNTAWRINKKVLDVANTITQWQHCPVADVPAMDRGEMPARPLDIDTNEIALKAWKKEASAFYRKDKARVSRRLSMEFMLSQANKFANEKAIWFPQNMDWRGRVYAVPMFNPQGNDMTKGLLTFAQEKPIGEDGFYWLKIHGANTAGVDKVPFPQRIKFVEDNHTNIMECAKAPLENTWWAEQDSPFCFLAFCFEYAGVINHGLSYNCSLPLAFDGSCSGIQHFSAMLRDEIGGKAVNLLPSAEYQDIYRIVSDKVNEVLKQDLINGTSTTVETVTDKKTGEITQRTKYGTKVMAQWWLEHGVNRGVTKRSVMTLVYGSKEFGFRDQVLSDTIQPAIDNGKGDMFLNPNQAAGYMAKLIWNAVSGTVVAAVEAMNWLKSAAKLLAAEVKDPKTDTVLRGRCAVHWVTPDGFPVWQEYKKPIQTRLNLMFLGQFRLQPTINTNKDSEIDAHKQESGIAPNFVHSQDGNHLRMTVVWAHEKYGIESFALIHDSFGTIPADAANLFKAVRETMVSTYESCDVLADFYDQFADQLHESQLDKMPALPAKGNLNLRDILKSDFAFA

SEQ ID NO: 819 - DNA, 2670 bp, synthetic construct
  misc_feature 1..2670: note = Variant of RNA polymerase
  source 1..2670: mol_type = other DNA
atgcaccatcaccatcaccatatgaacacgattaacattgctaagaacgacttctctgacatcgaactggctgctatcccgttcaacactctggctgaccattacggtgagcgtttagctcgcgaacagttggcccttgagcatgagtcttacgagatgggtgaagcacgcttccgcaagatgtttgagcgtcaacttaaagctggtgaggttgcggataacgctgccgccaagcctctcatcactaccctactccctaagatgattgcacgcatcaacgactggtttgaggaagtgaaagctaagcgcggcaagcgcccgacagccttccagttcctgcaagaaatcaagccggaagccgtagcgtacatcaccattaagaccactctggcttgcctaaccagtgcggacaatacaaccgttcaggctgtagcaagcgcaatcggtcgggccattgaggacgaggctcgcttcggtcgtatccgtgaccttgaagctaagcacttcaagaagaacgttgaggaacaactcaacaagcgcgtagggcacccgtacaagaaagcatttatgcaagttgtcgagaccgacatgctctctaagggtctactcggtggcgaggcgtggtcttcgtggcataaggaagactctattcatgtaggagtacgctgcatcgagatgctcattgagtcaaccggaatggttagcttacaccgccaaaatgctggcgtagtaggtcaagactctgagactatcgaactcgcacctgaatacgctgaggctatcgcaacccgtgcaggtgcgctggctggcatctctccgatgttccaaccttgcgtagttcctcctaagccgtggactggcattactggtggtggctattgggctgcggggcgcaaacccctgcagttagtacgtactcgcagtctggcggcgcttcgccgctatgaagaagtgtcgatgccggaggtcatcaaagcagtcaacattgcgcagaatacagcatggcgtattaacaagaaagttctcgacgtagcgaataccatcacccaatggcagcactgtccagtcgcggatgtgcctgcgatggatcgtggcgaaatgccagctcgtccgttggacatcgataccaacgagattgcacttaaagcgtggaagaaagaagcttccgcgttctaccgcaaagacaaagcacgcgttagccgtcgtctgtcaatggagtttatgttatctcaggcgaacaagtttgcgaatgagaaagcaatctggtttccgcaaaacatggattggcgtgggcgcgtgtacgctgtcccgatgttcaatcctcagggcaacgatatgacgaaaggcctgctgacctttgcgcaggagaaacccattggtgaagacggcttctattggctcaagattcatggcgcaaatacagctggagtggataaagtaccgtttccacaacgcatcaaatttgttgaggataaccatacgaatattatggaatgcgcgaaagcaccgctggaaaacacttggtgggcggaacaggactcgccgttctgttttctggcgttctgctttgagtatgctggcgtcatcaatcatggtctgtcgtacaactgtagcttgcctctggcatttgatggtagttgctccggcattcaacatttctcagcgatgttacgcgacgaaattggcggcaaagctgtgaatctcctcccatctgcggaataccaggatatttatcgtatcgtcagcgacaaagttaacgaggtactgaaacaagatctgattaacggtacctctaccaccgtggaaacggtgactgataagaagacaggcgaaattacccaacgcacgaaatacgggaccaaagttatggcacagtggtggttagaacacggtgtgaatcgtggcgtcacgaaacgctcggttatgactttggtgtatgggagcaaagagtttggattccgcgatcaagtgctgagtgacaccattcaaccggcgatcgataacggcaaaggtgacatgtttctgaatccgaatcaggctgctggttacatggcgaaactgatctggaacgcagtgtccgggaccgtagtcgcagcagttgaggcgatgaactggctgaaaagtgcggcgaaattacttgctgctgaagtgaaggatcctaagacggatacagttctgcgtggccgctgcgcagtacattgggtgactcccgacggcttccctgtgtggcaggaatacaagaagcctattcagacgcgcttgaacctgatgttcctcggtcagttccgcttacagcctaccattaacaccaacaaagatagcgagattgatgcacacaaacaggagtctggtatcgctcctaactttgtacacagccaagacggtaaccaccttcgtatgactgtagtgtgggcacacgagaagtacggaatcgaatcttttgcactgattcacgactccttcggtaccattccggctgacgctgcgaacctgttcaaagcagtgcgcgaaactatggtttcgacatatgagtcttgtgatgtactggctgatttctacgaccagttcgctgaccagttgcacgagtctcaattggacaaaatgccagcacttccggctaaaggtaacttgaacctccgtgacatcttaaaatcggacttcgcgttcgcg

SEQ ID NO: 820 - protein, 890 aa, synthetic construct
  REGION 1..890: note = Variant of RNA polymerase
MHHHHHHMNTINIAKNDFSDIELAAIPFNTLADHYGERLAREQLALEHESYEMGEARFRKMFERQLKAGEVADNAAAKPLITTLLPKMIARINDWFEEVKAKRGKRPTAFQFLQEIKPEAVAYITIKTTLACLTSADNTTVQAVASAIGRAIEDEARFGRIRDLEAKHFKKNVEEQLNKRVGHPYKKAFMQVVETDMLSKGLLGGEAWSSWHKEDSIHVGVRCIEMLIESTGMVSLHRQNAGVVGQDSETIELAPEYAEAIATRAGALAGISPMFQPCVVPPKPWTGITGGGYWAAGRKPLQLVRTRSLAALRRYEEVSMPEVIKAVNIAQNTAWRINKKVLDVANTITQWQHCPVADVPAMDRGEMPARPLDIDTNEIALKAWKKEASAFYRKDKARVSRRLSMEFMLSQANKFANEKAIWFPQNMDWRGRVYAVPMFNPQGNDMTKGLLTFAQEKPIGEDGFYWLKIHGANTAGVDKVPFPQRIKFVEDNHTNIMECAKAPLENTWWAEQDSPFCFLAFCFEYAGVINHGLSYNCSLPLAFDGSCSGIQHFSAMLRDEIGGKAVNLLPSAEYQDIYRIVSDKVNEVLKQDLINGTSTTVETVTDKKTGEITQRTKYGTKVMAQWWLEHGVNRGVTKRSVMTLVYGSKEFGFRDQVLSDTIQPAIDNGKGDMFLNPNQAAGYMAKLIWNAVSGTVVAAVEAMNWLKSAAKLLAAEVKDPKTDTVLRGRCAVHWVTPDGFPVWQEYKKPIQTRLNLMFLGQFRLQPTINTNKDSEIDAHKQESGIAPNFVHSQDGNHLRMTVVWAHEKYGIESFALIHDSFGTIPADAANLFKAVRETMVSTYESCDVLADFYDQFADQLHESQLDKMPALPAKGNLNLRDILKSDFAFA

SEQ ID NO: 821 - DNA, 2670 bp, synthetic construct
  misc_feature 1..2670: note = Variant of RNA polymerase
  source 1..2670: mol_type = other DNA
atgcaccatcaccatcaccatatgaacacgattaacattgctaagaacgacttctctgacatcgaactggctgctatcccgttcaacactctggctgaccattacggtgagcgtttagctcgcgaacagttggcccttgagcatgagtcttacgagatgggtgaagcacgcttccgcaagatgtttgagcgtcaacttaaagctggtgaggttgcggataacgctgccgccaagcctctcatcactaccctactccctaagatgattgcacgcatcaacgactggtttgaggaagtgaaagctaagcgcggcaagcgcccgacagccttccagttcctgcaagaaatcaagccggaagccgtagcgtacatcaccattaagaccactctggcttgcctaaccagtgcggacaatacaaccgttcaggctgtagcaagcgcaatcggtcgggccattgaggacgaggctcgcttcggtcgtatccgtgaccttgaagctaagcacttcaagggcaacgttgaggaacaactcaacaagcgcgtagggcacgtctacaaaaaagcatttatgcaagttgtcgaggctgacatgctctctaagggtctactcggtggcgaggcgtggtcttcgtggcataaggaagactctattcatgtaggagtacgctgcatcgagatgctcattgagtcaaccggaatggttagcttacaccgccaaaatgctggcgtagtaggtcaagactctgagactatcgaactcgcacctgaatacgctgaggctatcgcaacccgtgcaggtgcgctggctggcatctctccgatgttccaaccttgcgtagttcctcctaagccgtggactggcattactggtggtggctattgggctgcggggcgcaaacccctgcagttagtacgtactcgcagtctggcggcgcttcgccgctatgaagaagtgtcgatgccggaggtcatcaaagcagtcaacattgcgcagaatacagcatggcgtattaacaagaaagttctcgacgtagcgaatgcaatcacccaatggcagcactgtccagtcgcggatgtgcctgcgatggatcgtggcgaaatgccagctcgtccgttggacatcgataccaacgagattgcacttaaagcgtggaagaaagaagcttccgcgttctaccgcaaagacaaagcacgcgttagccgtcgtctgtcaatggagtttatgttatctcaggcgaacaagtttgcgaatgagaaagcaatctggtttccgcaaaacatggattggcgtgggcgcgtgtacgctgtcccgatgttcaatcctcagggcaacgatatgacgaaaggcctgctgacctttgcgcaggagaaacccattggtgaagacggcttctattggctcaagattcatggcgcaaatacagctggagtggataaagtaccgtttccacaacgcatcaaatttgttgaggataaccatacgaatattatggaatgcgcgaaagcaccgctggaaaacacttggtgggcggaacaggactcgccgttctgttttctggcgttctgctttgagtatgctggcgtcatcaatagtggtctgtcgtacaactgtagcttgcctctggcatttgatggtagttgctccggcatccaacatttctcagcgatgttacgcgacgaaattggcggcaaagctgtgaatctcctcccatctgcggaataccaggatatttatcgtatcgtcagcgacaaagttaacgaggtactgaaacaagatctgattaacggtacctctaccaccgtggaaacggtgactgataagaagacaggcgaaattacccaacgcacgaaatacgggaccaaagttatggcacagtggtggttagaacacggtgtgaatcgtggcgtcacgaaacgctcggttatgactttggtgtatgggagcaaagagtttggattccgcgatcaagtgctgagtgacaccattcaaccggcgatcgataacggcaaaggtgacatgtttctgaatccgaatcaggctgctggttacatggcgaaactgatctggaacgcagtgtccgggaccgtagtcgcagcagttgaggcgatgaactggctgaaaagtgcggcgaaattacttgctgctgaagtgaaggatcctaagacggatacagttctgcgtggccgctgcgcagtacattgggtgactcccgacggcttccctgtgtggcaggaatacaagaagcctattcagacgcgcttgaacctgatgttcctcggtcagttccgcttacagcctaccattaacaccaacaaagatagcgagattgatgcacacaaacaggagtctggtatcgctcctaactttgtacacagccaagacggtaaccaccttcgtatgactgtagtgtgggcacacgagaagtacggaatcgaatcttttgcactgattcacgactccttcggtaccattccggctgacgctgcgaacctgttcaaagcagtgcgcgaaactatggtttcgacatatgagtcttgtgatgtactggctgatttctacgaccagttcgctgaccagttgcacgagtctcaattggacaaaatgccagcacttccggctaaaggtaacttgaacctccgtgacatcttaaaatcggacttcgcgttcgcg

SEQ ID NO: 822 - protein, 890 aa, synthetic construct
  REGION 1..890: note = Variant of RNA polymerase
MHHHHHHMNTINIAKNDFSDIELAAIPFNTLADHYGERLAREQLALEHESYEMGEARFRKMFERQLKAGEVADNAAAKPLITTLLPKMIARINDWFEEVKAKRGKRPTAFQFLQEIKPEAVAYITIKTTLACLTSADNTTVQAVASAIGRAIEDEARFGRIRDLEAKHFKGNVEEQLNKRVGHVYKKAFMQVVEADMLSKGLLGGEAWSSWHKEDSIHVGVRCIEMLIESTGMVSLHRQNAGVVGQDSETIELAPEYAEAIATRAGALAGISPMFQPCVVPPKPWTGITGGGYWAAGRKPLQLVRTRSLAALRRYEEVSMPEVIKAVNIAQNTAWRINKKVLDVANAITQWQHCPVADVPAMDRGEMPARPLDIDTNEIALKAWKKEASAFYRKDKARVSRRLSMEFMLSQANKFANEKAIWFPQNMDWRGRVYAVPMFNPQGNDMTKGLLTFAQEKPIGEDGFYWLKIHGANTAGVDKVPFPQRIKFVEDNHTNIMECAKAPLENTWWAEQDSPFCFLAFCFEYAGVINSGLSYNCSLPLAFDGSCSGIQHFSAMLRDEIGGKAVNLLPSAEYQDIYRIVSDKVNEVLKQDLINGTSTTVETVTDKKTGEITQRTKYGTKVMAQWWLEHGVNRGVTKRSVMTLVYGSKEFGFRDQVLSDTIQPAIDNGKGDMFLNPNQAAGYMAKLIWNAVSGTVVAAVEAMNWLKSAAKLLAAEVKDPKTDTVLRGRCAVHWVTPDGFPVWQEYKKPIQTRLNLMFLGQFRLQPTINTNKDSEIDAHKQESGIAPNFVHSQDGNHLRMTVVWAHEKYGIESFALIHDSFGTIPADAANLFKAVRETMVSTYESCDVLADFYDQFADQLHESQLDKMPALPAKGNLNLRDILKSDFAFA

SEQ ID NO: 823 - DNA, 2670 bp, synthetic construct
  misc_feature 1..2670: note = Variant of RNA polymerase
  source 1..2670: mol_type = other DNA
atgcaccatcaccatcaccatatgaacacgattaacattgctaagaacgacttctctgacatcgaactggctgctatcccgttcaacactctggctgaccattacggtgagcgtttagctcgcgaacagttggcccttgagcatgagtcttacgagatgggtgaagcacgcttccgcaagatgtttgagcgtcaacttaaagctggtgaggttgcggataacgctgccgccaagcctctcatcactaccctactccctaagatgattgcacgcatcaacgactggtttgaggaagtgaaagctaagcgcggcaagcgcccgacagccttccagttcctgcaagaaatcaagccggaagccgtagcgtacatcaccattaagaccactctggcttgcctaaccagtgcggacaatacaaccgttcaggctgtagcaagcgcaatcggtcgggccattgaggacgaggctcgcttcggtcgtatccgtgaccttgaagctaagcacttcaagaaaaacgttgaggaacaactcaacaagcgcgtagggcacgtctacaagaaagcatttatgcaagttgtcgaggctgacatgctctctaagggtctactcggtggcgaggcgtggtcttcgtggcataaggaagactctattcatgtaggagtacgctgcatcgagatgctcattgagtcaaccggaatggttagcttacaccgccaaaatgctggcgtagtaggtcaagactctgagactatcgaactcgcacctgaatacgctgaggctatcgcaacccgtgcaggtgcgctggctggcatctctccgatgttccaaccttgcgtagttcctcctaagccgtggactggcattactggtggtggctattgggctgcggggcgcaaacccctgcagttagtacgtactcgcagtctggcggcgcttcgccgctatgaagaagtgtcgatgccggaggtcatcaaagcagtcaacattgcgcagaatacagcatggcgtattaacaagaaagttctcgacgtagcgaatgcaatcacccaatggcagcactgtccagtcgcggatgtgcctgcgatggatcgtggcgaaatgccagctcgtccgttggacatcgataccaacgagattgcacttaaagcgtggaagaaagaagcttccgcgttctaccgcaaagacaaagcacgcgttagccgtcgtctgtcaatggagtttatgttatctcaggcgaacaagtttgcgaattatgtggcaatctggtttccgcaaaacatggattggcgtgggcgcgtgtacgctgtcccgatgttcaatcctcagggcaacgatatgacgaaaggcctgctgacctttgcgcaggagaaacccattggtgaagacggcttctattggctcaagattcatggcgcaaatacagctggagtggataaagtaccgtttccacaacgcatcaaatttgttgaggataaccatacgaatattatggaatgcgcgaaagcaccgctggaaaacacttggtgggcggaacaggactcgccgttctgttttctggcgttctgctttgagtatgctggcgtcatcaatcacggtctgtcgtacaactgtagcttgcctctggcatttgatggtagttgctccggcattcaacatttctcagcgatgttacgcgacgaaattggcggcaaagctgtgaatctcctcccatctgcggaataccaggatatttatcgtatcgtcagcgacaaagttaacgaggtactgaaacaagatctgattaacggtacctctaccaccgtggaaacggtgactgataagaagacaggcgaaattacccaacgcacgaaatacgggaccaaaactatggcacagtggtggttagaacacggtgtgaatcgtggcgtcacgaaacgctcggttatgactttggtgtatgggagcaaagagtttggattccgcgatcaagtgctgagtgacaccattcaaccggcgatcgataacggcaaaggtgacatgtttctgaatccgaatcaggctgctggttacatggcgaaactgatctggaacgcagtgtccgggaccgtagtcgcagcagttgaggcgatgaactggctgaaaagtgcggcgaaattacttgctgctgaagtgaaggatcctaagacggatacagttctgcgtggccgctgcgcagtacattgggtgactcccgacggcttccctgtgtggcaggaatacaagaagcctattcagacgcgcttgaacctgatgttcctcggtcagttccgcttacagcctaccattaacaccaacaaagatagcgagattgatgcacacaaacaggagtctggtatcgctcctaactttgtacacagccaagacggtaaccaccttcgtatgactgtagtgtgggcacacgagaagtacggaatcgaatcttttgcactgattcacgactccttcggtaccattccggctgacgctgcgaacctgttcaaagcagtgcgcgaaactatggtttcgacatatgagtcttgtgatgtactggctgatttctacgaccagttcgctgaccagttgcacgagtctcaattggacaaaatgccagcacttccggctaaaggtaacttgaacctccgtgacatcttaaaatcggacttcgcgttcgcg

SEQ ID NO: 824 - protein, 890 aa, synthetic construct
  REGION 1..890: note = Variant of RNA polymerase
MHHHHHHMNTINIAKNDFSDIELAAIPFNTLADHYGERLAREQLALEHESYEMGEARFRKMFERQLKAGEVADNAAAKPLITTLLPKMIARINDWFEEVKAKRGKRPTAFQFLQEIKPEAVAYITIKTTLACLTSADNTTVQAVASAIGRAIEDEARFGRIRDLEAKHFKKNVEEQLNKRVGHVYKKAFMQVVEADMLSKGLLGGEAWSSWHKEDSIHVGVRCIEMLIESTGMVSLHRQNAGVVGQDSETIELAPEYAEAIATRAGALAGISPMFQPCVVPPKPWTGITGGGYWAAGRKPLQLVRTRSLAALRRYEEVSMPEVIKAVNIAQNTAWRINKKVLDVANAITQWQHCPVADVPAMDRGEMPARPLDIDTNEIALKAWKKEASAFYRKDKARVSRRLSMEFMLSQANKFANYVAIWFPQNMDWRGRVYAVPMFNPQGNDMTKGLLTFAQEKPIGEDGFYWLKIHGANTAGVDKVPFPQRIKFVEDNHTNIMECAKAPLENTWWAEQDSPFCFLAFCFEYAGVINHGLSYNCSLPLAFDGSCSGIQHFSAMLRDEIGGKAVNLLPSAEYQDIYRIVSDKVNEVLKQDLINGTSTTVETVTDKKTGEITQRTKYGTKTMAQWWLEHGVNRGVTKRSVMTLVYGSKEFGFRDQVLSDTIQPAIDNGKGDMFLNPNQAAGYMAKLIWNAVSGTVVAAVEAMNWLKSAAKLLAAEVKDPKTDTVLRGRCAVHWVTPDGFPVWQEYKKPIQTRLNLMFLGQFRLQPTINTNKDSEIDAHKQESGIAPNFVHSQDGNHLRMTVVWAHEKYGIESFALIHDSFGTIPADAANLFKAVRETMVSTYESCDVLADFYDQFADQLHESQLDKMPALPAKGNLNLRDILKSDFAFA

SEQ ID NO: 825 - DNA, 2670 bp, synthetic construct
  misc_feature 1..2670: note = Variant of RNA polymerase
  source 1..2670: mol_type = other DNA
atgcaccatcaccatcaccatatgaacacgattaacattgctaagaacgacttctctgacatcgaactggctgctatcccgttcaacactctggctgaccattacggtgagcgtttagctcgcgaacagttggcccttgagcatgagtcttacgagatgggtgaagcacgcttccgcaagatgtttgagcgtcaacttaaagctggtgaggttgcggataacgctgccgccaagcctctcatcactaccctactccctaagatgattgcacgcatcaacgactggtttgaggaagtgaaagctaagcgcggcaagcgcccgacagccttccagttcctgcaagaaatcaagccggaagccgtagcgtacatcaccattaagaccactctggcttgcctaaccagtgcggacaatacaaccgttcaggctgtagcaagcgcaatcggtcgggccattgaggacgaggctcgcttcggtcgtatccgtgaccttgaagctaagcacttcaagaaaaacgttgaggaacaactcaacaagcgcgtagggcacgtgtacaagaaagcatttatgcaagttgtcgaggctgacatgctctctaagggtctactcggtggcgaggcgtggtcttcgtggcataaggaagactctattcatgtaggagtacgctgcatcgagatgctcattgagtcaaccggaatggttagcttacaccgccaaaatgctggcgtagtaggtcaagactctgagactatcgaactcgcacctgaatacgctgaggctatcgcaacccgtgcaggtgcgctggctggcatctctccgatgttccaaccttgcgtagttcctcctaagccgtggactggcattactggtggtggctattgggctgcggggcgcaaacccctgcagttagtacgtactcgcagtctggcggcgcttcgccgctatgaagaagtgtcgatgccggaggtcatcaaagcagtcaacattgcgcagaatacagcatggcgtattaacaagaaagttctcgacgtagcgaataccatcacccaatggcagcactgtccagtcgcggatgtgcctgcgatggatcgtggcgaaatgccagctcgtccgttggacatcgataccaacgagattgcacttaaagcgtggaagaaagaagcttccgcgttctaccgcaaagacaaagcacgcgttagccgtcgtctgtcaatggagtttatgttatctcaggcgaacaagtttgcgaatgagaaagcaatctggtttccgcaaaacatggattggcgtgggcgcgtgtacgctgtcccgatgttcaatcctcagggcaacgatatgacgaaaggcctgctgacctttgcgcaggagaaacccattggtgaagacggcttctattggctcaagattcatggcgcaaatacagctggagtggataaagtaccgtttccacaacgcatcaaatttgttgaggataaccatacgaatattatggaatgcgcgaaagcaccgctggaaaacacttggtgggcggaacaggactcgccgttctgttttctggcgttctgctttgagtatgctggcgtcatcaatcatggtctgtcgtacaactgtagcttgcctctggcatttgatggtagttgctccggcattcaacatttctcagcgatgttacgcgacgaaattggcggcaaagctgtgaatctcctcccatctgcggaataccaggatatttatcgtatcgtcagcgacaaagttaacgagatgctgaaacaagatctgattaacggtacctctaccaccgtggaaacggtgactgataagaagacaggcgaaattacccaacgcacgaaatacgggaccaaagttatggcacagtggtggttagaacacggtgtgaatcgtggcgtcacgaaacgctcggttatgactttggtgtatgggagcaaagagtttggattccgcgatcaagtgctgagtgacaccattcaaccggcgatcgataacggcaaaggtgacatgtttctgaatccgaatcaggctgctggttacatggcgaaactgatctggaacgcagtgtccgggaccgtagtcgcagcagttgaggcgatgaactggctgaaaagtgcggcgaaattacttgctgctgaagtgaaggatcctaagacggatacagttctgcgtggccgctgcgcagtacattgggtgactcccgacggcttccctgtgtggcaggaatacaagaagcctattcagacgcgcttgaacctgatgttcctcggtcagttccgcttacagcctaccattaacaccaacaaagatagcgagattgatgcacacaaacaggagtctggtatcgctcctaactttgtacacagccaagacggtaaccaccttcgtatgactgtagtgtgggcacacgagaagtacggaatcgaatcttttgcactgattcacgactccttcggtaccattccggctgacgctgcgaacctgttcaaagcagtgcgcgaaactatggtttcgacatatgagtcttgtgatgtactggctgatttctacgaccagttcgctgaccagttgcacgagtctcaattggacaaaatgccagcacttccggctaaaggtaacttgaacctccgtgacatcttaaaatcggacttcgcgttcgcg

SEQ ID NO: 826 - protein, 890 aa, synthetic construct
  REGION 1..890: note = Variant of RNA polymerase
MHHHHHHMNTINIAKNDFSDIELAAIPFNTLADHYGERLAREQLALEHESYEMGEARFRKMFERQLKAGEVADNAAAKPLITTLLPKMIARINDWFEEVKAKRGKRPTAFQFLQEIKPEAVAYITIKTTLACLTSADNTTVQAVASAIGRAIEDEARFGRIRDLEAKHFKKNVEEQLNKRVGHVYKKAFMQVVEADMLSKGLLGGEAWSSWHKEDSIHVGVRCIEMLIESTGMVSLHRQNAGVVGQDSETIELAPEYAEAIATRAGALAGISPMFQPCVVPPKPWTGITGGGYWAAGRKPLQLVRTRSLAALRRYEEVSMPEVIKAVNIAQNTAWRINKKVLDVANTITQWQHCPVADVPAMDRGEMPARPLDIDTNEIALKAWKKEASAFYRKDKARVSRRLSMEFMLSQANKFANEKAIWFPQNMDWRGRVYAVPMFNPQGNDMTKGLLTFAQEKPIGEDGFYWLKIHGANTAGVDKVPFPQRIKFVEDNHTNIMECAKAPLENTWWAEQDSPFCFLAFCFEYAGVINHGLSYNCSLPLAFDGSCSGIQHFSAMLRDEIGGKAVNLLPSAEYQDIYRIVSDKVNEMLKQDLINGTSTTVETVTDKKTGEITQRTKYGTKVMAQWWLEHGVNRGVTKRSVMTLVYGSKEFGFRDQVLSDTIQPAIDNGKGDMFLNPNQAAGYMAKLIWNAVSGTVVAAVEAMNWLKSAAKLLAAEVKDPKTDTVLRGRCAVHWVTPDGFPVWQEYKKPIQTRLNLMFLGQFRLQPTINTNKDSEIDAHKQESGIAPNFVHSQDGNHLRMTVVWAHEKYGIESFALIHDSFGTIPADAANLFKAVRETMVSTYESCDVLADFYDQFADQLHESQLDKMPALPAKGNLNLRDILKSDFAFA

SEQ ID NO: 827 - DNA, 2670 bp, synthetic construct
  misc_feature 1..2670: note = Variant of RNA polymerase
  source 1..2670: mol_type = other DNA
atgcaccatcaccatcaccatatgaacacgattaacattgctaagaacgacttctctgacatcgaactggctgctatcccgttcaacactctggctgaccattacggtgagcgtttagctcgcgaacagttggcccttgagcatgagtcttacgagatgggtgaagcacgcttccgcaagatgtttgagcgtcaacttaaagctggtgaggttgcggataacgctgccgccaagcctctcatcactaccctactccctaagatgattgcacgcatcaacgactggtttgaggaagtgaaagctaagcgcggcaagcgcccgacagccttccagttcctgcaagaaatcaagccggaagccgtagcgtacatcaccattaagaccactctggcttgcctaaccagtgcggacaatacaaccgttcaggctgtagcaagcgcaatcggtcgggccattgaggacgaggctcgcttcggtcgtatccgtgaccttgaagctaagcacttcaagggcaacgttgaggaacaactcaacaagcgcgtagggcacgtctacaagaaagcatttatgcaagttgtcgaggctgacatgctctctaagggtctactcggtggcgaggcgtggtcttcgtggcataaggaagactctattcatgtaggagtacgctgcatcgagatgctcattgagtcaaccggaatggttagcttacaccgccaaaatgctggcgtagtaggtcaagactctgagactatcgaactcgcacctgaatacgctgaggctatcgcaacccgtgcaggtgcgctggctggcatctctccgatgttccaaccttgcgtagttcctcctaagccgtggactggcattactggtggtggctattgggctgcggggcgcaaacccctgcagttagtacgtactcgcagtctggcggcgcttcgccgctatgaagaagtgtcgatgccggaggtcatcaaagcagtcaacattgcgcagaatacagcatggcgtattaacaagaaagttctcgacgtagcgaatgcaatcacccaatggcagcactgtccagtcgcggatgtgcctgcgatggatcgtggcgaaatgccagctcgtccgttggacatcgataccaacgagattgcacttaaagcgtggaagaaagaagcttccgcgttctaccgcaaagacaaagcacgcgttagccgtcgtctgtcaatggagtttatgttatctcaggcgaacaagtttgcgaattataaagcaatctggtttccgcaaaacatggattggcgtgggcgcgtgtacgctgtcccgatgttcaatcctcagggcaacgatatgacgaaaggcctgctgacctttgcgcaggagaaacccattggtgaagacggcttctattggctcaagattcatggcgcaaatacagctggagtggataaagtaccgtttccacaacgcatcaaatttgttgaggataaccatacgaatattatggaatgcgcgaaagcaccgctggaaaacacttggtgggcggaacaggactcgccgttctgttttctggcgttctgctttgagtatgctggcgtcatcaatagtggtctgtcgtacaactgtagcttgcctctggcatttgatggtagttgctccggcattcaacatttctcagcgatgttacgcgacgaaattggcggcaaagctgtgaatctcctcccatctgcggaataccaggatatttatcgtatcgtcagcgacaaagttaacgaggtactgaaacaagatctgattaacggtacctctaccaccgtggaaacggtgactgataagaagacaggcgaaattacccaacgcacgaaatacgggaccaaagttatggcacagtggtggttagaacacggtgtgaatcgtggcgtcacgaaacgctcggttatgactttggtgtatgggagcaaagagtttggattccgcgatcaagtgctgagtgacaccattcaaccggcgatcgataacggcaaaggtgacatgtttctgaatccgaatcaggctgctggttacatggcgaaactgatctggaacgcagtgtccgggaccgtagtcgcagcagttgaggcgatgaactggctgaaaagtgcggcgaaattacttgctgctgaagtgaaggatcctaagacggatacagttctgcgtggccgctgcgcagtacattgggtgactcccgacggcttccctgtgtggcaggaatacaagaagcctattcagacgcgcttgaacctgatgttcctcggtcagttccgcttacagcctaccattaacaccaacaaagatagcgagattgatgcacacaaacaggagtctggtatcgctcctaactttgtacacagccaagacggtaaccaccttcgtatgactgtagtgtgggcacacgagaagtacggaatcgaatcttttgcactgattcacgactccttcggtaccattccggctgacgctgcgaacctgttcaaagcagtgcgcgaaactatggtttcgacatatgagtcttgtgatgtactggctgatttctacgaccagttcgctgaccagttgcacgagtctcaattggacaaaatgccagcacttccggctaaaggtaacttgaacctccgtgacatcttaaaatcggacttcgcgttcgcg

SEQ ID NO: 828 - protein, 890 aa, synthetic construct
  REGION 1..890: note = Variant of RNA polymerase
MHHHHHHMNTINIAKNDFSDIELAAIPFNTLADHYGERLAREQLALEHESYEMGEARFRKMFERQLKAGEVADNAAAKPLITTLLPKMIARINDWFEEVKAKRGKRPTAFQFLQEIKPEAVAYITIKTTLACLTSADNTTVQAVASAIGRAIEDEARFGRIRDLEAKHFKGNVEEQLNKRVGHVYKKAFMQVVEADMLSKGLLGGEAWSSWHKEDSIHVGVRCIEMLIESTGMVSLHRQNAGVVGQDSETIELAPEYAEAIATRAGALAGISPMFQPCVVPPKPWTGITGGGYWAAGRKPLQLVRTRSLAALRRYEEVSMPEVIKAVNIAQNTAWRINKKVLDVANAITQWQHCPVADVPAMDRGEMPARPLDIDTNEIALKAWKKEASAFYRKDKARVSRRLSMEFMLSQANKFANYKAIWFPQNMDWRGRVYAVPMFNPQGNDMTKGLLTFAQEKPIGEDGFYWLKIHGANTAGVDKVPFPQRIKFVEDNHTNIMECAKAPLENTWWAEQDSPFCFLAFCFEYAGVINSGLSYNCSLPLAFDGSCSGIQHFSAMLRDEIGGKAVNLLPSAEYQDIYRIVSDKVNEVLKQDLINGTSTTVETVTDKKTGEITQRTKYGTKVMAQWWLEHGVNRGVTKRSVMTLVYGSKEFGFRDQVLSDTIQPAIDNGKGDMFLNPNQAAGYMAKLIWNAVSGTVVAAVEAMNWLKSAAKLLAAEVKDPKTDTVLRGRCAVHWVTPDGFPVWQEYKKPIQTRLNLMFLGQFRLQPTINTNKDSEIDAHKQESGIAPNFVHSQDGNHLRMTVVWAHEKYGIESFALIHDSFGTIPADAANLFKAVRETMVSTYESCDVLADFYDQFADQLHESQLDKMPALPAKGNLNLRDILKSDFAFA

SEQ ID NO: 829 - DNA, 2670 bp, synthetic construct
  misc_feature 1..2670: note = Variant of RNA polymerase
  source 1..2670: mol_type = other DNA
atgcaccatcaccatcaccatatgaacacgattaacattgctaagaacgacttctctgacatcgaactggctgctatcccgttcaacactctggctgaccattacggtgagcgtttagctcgcgaacagttggcccttgagcatgagtcttacgagatgggtgaagcacgcttccgcaagatgtttgagcgtcaacttaaagctggtgaggttgcggataacgctgccgccaagcctctcatcactaccctactccctaagatgattgcacgcatcaacgactggtttgaggaagtgaaagctaagcgcggcaagcgcccgacagccttccagttcctgcaagaaatcaagccggaagccgtagcgtacatcaccattaagaccactctggcttgcctaaccagtgcggacaatacaaccgttcaggctgtagcaagcgcaatcggtcgggccattgaggacgaggctcgcttcggtcgtatccgtgaccttgaagctaagcacttcaagaaaattgttgaggaacaactcaacaagcgcgtagggcacgtctacaagaaagcatttatgcaagttgtcgaggctgacgtgctctctacgggtctactcggtggcgaggcgtggtcttcgtggcataaggaagactctattcatgtaggagtacgctgcatcgagatgctcattgagtcaaccggaatggttagcttacaccgccaaaatgctggcgtagtaggtcaagactctgagactatcgaactcgcacctgaatacgctgaggctatcgcaacccgtgcaggtgcgctggctggcatctctccgatgttccaaccttgcgtagttcctcctaagccgtggactggcattactggtggtggctattgggctgcggggcgcaaacccctgcagttagtacgtactcgcagtctggcggcgcttcgccgctatgaagaagtgtcgatgccggaggtcatcaaagcagtcaacattgcgcagaatacagcatggcgtattaacaagaaagttctcgacgtagcgaatgccatcacccaatggcagcactgtccagtcgcggatgtgcctgcgatggatcgtggcgaaatgccagctcgtccgttggacatcgataccaacgagattgcacttaaagcgtggaagaaagaagcttccgcgttctaccgcaaagacaaagcacgcgttagccgtcgtctgtcaatggagtttatgttatctcaggcgaacaagtttgcgaattataaagcaatctggtttccgcaaaacatggattggcgtgggcgcgtgtacgctgtcccgatgttcaatcctcagggcaacgatatgacgaaaggcctgctgacctttgcgcaggagaaacccattggtgaagacggcttctattggctcaagattcatggcgcaaatacagctggagtggataaagtaccgtttccacaacgcatcaaatttgttgaggataaccatacgaatattatggaatgcgcgaaagcaccgctggaaaacacttggtgggcggaacaggactcgccgttctgttttctggcgttctgctttgagtatgctggcgtcatcaatagtggtctgtcgtacaactgtagcttgcctctggcatttgatggtagttgctccggcattcaacatttctcagcgatgttacgcgacgaaattggcggcaaagctgtgaatctcctcccatctgcggaataccaggatatttatcgtatcgtcagcgacaaagttaacgaggtactgaaacaagatctgattaacggtacctctaccaccgtggaaacggtgactgataagaagacaggcgaaattacccaacgcacgaaatacgggaccaaagttatggcacagtggtggttagaacacggtgtgaatcgtggcgtcacgaaacgctcggttatgactttggtgtatgggagcaaagagtttggattccgcgatcaagtgctgagtgacaccattcaaccggcgatcgataacggcaaaggtgacatgtttctgaatccgaatcaggctgctggttacatggcgaaactgatctggaacgcagtgtccgggaccgtagtcgcagcagttgaggcgatgaactggctgaaaagtgcggcgaaattacttgctgctgaagtgaaggatcctaagacggatacagttctgcgtggccgctgcgcagtacattgggtgactcccgacggcttccctgtgtggcaggaatacaagaagcctattcagacgcgcttgaacctgatgttcctcggtcagttccgcttacagcctaccattaacaccaacaaagatagcgagattgatgcacacaaacaggagtctggtatcgctcctaactttgtacacagccaagacggtaaccaccttcgtatgactgtagtgtgggcacacgagaagtacggaatcgaatcttttgcactgattcacgactccttcggtaccattccggctgacgctgcgaacctgttcaaagcagtgcgcgaaactatggtttcgacatatgagtcttgtgatgtactggctgatttctacgaccagttcgctgaccagttgcacgagtctcaattggacaaaatgccagcacttccggctaaaggtaacttgaacctccgtgacatcttaaaatcggacttcgcgttcgcg

SEQ ID NO: 830 - protein, 890 aa, synthetic construct
  REGION 1..890: note = Variant of RNA polymerase
MHHHHHHMNTINIAKNDFSDIELAAIPFNTLADHYGERLAREQLALEHESYEMGEARFRKMFERQLKAGEVADNAAAKPLITTLLPKMIARINDWFEEVKAKRGKRPTAFQFLQEIKPEAVAYITIKTTLACLTSADNTTVQAVASAIGRAIEDEARFGRIRDLEAKHFKKIVEEQLNKRVGHVYKKAFMQVVEADVLSTGLLGGEAWSSWHKEDSIHVGVRCIEMLIESTGMVSLHRQNAGVVGQDSETIELAPEYAEAIATRAGALAGISPMFQPCVVPPKPWTGITGGGYWAAGRKPLQLVRTRSLAALRRYEEVSMPEVIKAVNIAQNTAWRINKKVLDVANAITQWQHCPVADVPAMDRGEMPARPLDIDTNEIALKAWKKEASAFYRKDKARVSRRLSMEFMLSQANKFANYKAIWFPQNMDWRGRVYAVPMFNPQGNDMTKGLLTFAQEKPIGEDGFYWLKIHGANTAGVDKVPFPQRIKFVEDNHTNIMECAKAPLENTWWAEQDSPFCFLAFCFEYAGVINSGLSYNCSLPLAFDGSCSGIQHFSAMLRDEIGGKAVNLLPSAEYQDIYRIVSDKVNEVLKQDLINGTSTTVETVTDKKTGEITQRTKYGTKVMAQWWLEHGVNRGVTKRSVMTLVYGSKEFGFRDQVLSDTIQPAIDNGKGDMFLNPNQAAGYMAKLIWNAVSGTVVAAVEAMNWLKSAAKLLAAEVKDPKTDTVLRGRCAVHWVTPDGFPVWQEYKKPIQTRLNLMFLGQFRLQPTINTNKDSEIDAHKQESGIAPNFVHSQDGNHLRMTVVWAHEKYGIESFALIHDSFGTIPADAANLFKAVRETMVSTYESCDVLADFYDQFADQLHESQLDKMPALPAKGNLNLRDILKSDFAFA

SEQ ID NO: 831 - DNA, 2670 bp, synthetic construct
  misc_feature 1..2670: note = Variant of RNA polymerase
  source 1..2670: mol_type = other DNA
atgcaccatcaccatcaccatatgaacacgattaacattgctaagaacgacttctctgacatcgaactggctgctatcccgttcaacactctggctgaccattacggtgagcgtttagctcgcgaacagttggcccttgagcatgagtcttacgagatgggtgaagcacgcttccgcaagatgtttgagcgtcaacttaaagctggtgaggttgcggataacgctgccgccaagcctctcatcactaccctactccctaagatgattgcacgcatcaacgactggtttgaggaagtgaaagctaagcgcggcaagcgcccgacagccttccagttcctgcaagaaatcaagccggaagccgtagcgtacatcaccattaagaccactctggcttgcctaaccagtgcggacaatacaaccgttcaggctgtagcaagcgcaatcggtcgggccattgaggacgaggctcgcttcggtcgtatccgtgaccttgaagctaagcacttcaagaaaaatgttgaggaacaactcaacaagcgcgtagggcacgtctacaaaaaagcatttatgcaagttgtcgaggctgacatgctctctaagggtctactcggtggcgaggcgtggtcttcgtggcataaggaagactctattcatgtaggagtacgctgcatcgagatgctcattgagtcaaccggaatggttagcttacaccgccaaaatgctggcgtagtaggtcaagactctgagactatcgaactcgcacctgaatacgctgaggctatcgcaacccgtgcaggtgcgctggctggcatctctccgatgttccaaccttgcgtagttcctcctaagccgtggactggcattactggtggtggctattgggctgcggggcgcaaacccctgcagttagtacgtactcgcagtctggcggcgcttcgccgctatgaagaagtgtcgatgccggaggtcatcaaagcagtcaacattgcgcagaatacagcatggcgtattaacaagaaagttctcgacgtagcgaataccatcacccaatggcagcactgtccagtcgcggatgtgcctgcgatggatcgtggcgaaatgccagctcgtccgttggacatcgataccaacgagattgcacttaaagcgtggaagaaagaagcttccgcgttctaccgcaaagacaaagcacgcgttagccgtcgtctgtcaatggagtttatgttatctcaggcgaacaagtttgcgaattataaagcaatctggtttccgcaaaacatggattggcgtgggcgcgtgtacgctgtcccgatgttcaatcctcagggcaacgatatgacgaaaggcctgctgacctttgcgcaggagaaacccattggtgaagacggcttctattggctcaagattcatggcgcaaatacagctggagtggataaagtaccgtttccacaacgcatcaaatttgttgaggataaccatacgaatattatggaatgcgcgaaagcaccgctggaaaacacttggtgggcggaacaggactcgccgttctgttttctggcgttctgctttgagtatgctggcgtcatcaatcacggtctgtcgtacaactgtagcttgcctctggcatttgatggtagttgctccggcattcaacatttctcagcgatgttacgcgacgaaattggcggcaaagctgtgaatctcctcccatctgcggaataccaggatatttatcgtatcgtcagcgacaaagttaacgaggtactgaaacaagatctgattaacggtacctctaccaccgtggaaacggtgactgataagaagacaggcgaaattacccaacgcacgaaatacgggaccaaagttatggcacagtggtggttagaacacggtgtgaatcgtggcgtcacgaaacgctcggttatgactttggtgtatgggagcaaagagtttggattccgcgatcaagtgctgagtgacaccattcaaccggcgatcgataacggcaaaggtgacatgtttctgaatccgaatcaggctgctggttacatggcgaaactgatctggaacgcagtgtccgggaccgtagtcgcagcagttgaggcgatgaactggctgaaaagtgcggcgaaattacttgctgctgaagtgaaggatcctaagacggatacagttctgcgtggccgctgcgcagtacattgggtgactcccgacggcttccctgtgtggcaggaatacaagaagcctattcagacgcgcttgaacctgatgttcctcggtcagttccgcttacagcctaccattaacaccaacaaagatagcgagattgatgcacacaaacaggagtctggtatcgctcctaactttgtacacagccaagacggtaaccaccttcgtatgactgtagtgtgggcacacgagaagtacggaatcgaatcttttgcactgattcacgactccttcggtaccattccggctgacgctgcgaacctgttcaaagcagtgcgcgaaactatggtttcgacatatgagtcttgtgatgtactggctgatttctacgaccagttcgctgaccagttgcacgagtctcaattggacaaaatgccagcacttccggctaaaggtaacttgaacctccgtgacatcttaaaatcggacttcgcgttcgcg

SEQ ID NO: 832 - protein, 890 aa, synthetic construct
  REGION 1..890: note = Variant of RNA polymerase
MHHHHHHMNTINIAKNDFSDIELAAIPFNTLADHYGERLAREQLALEHESYEMGEARFRKMFERQLKAGEVADNAAAKPLITTLLPKMIARINDWFEEVKAKRGKRPTAFQFLQEIKPEAVAYITIKTTLACLTSADNTTVQAVASAIGRAIEDEARFGRIRDLEAKHFKKNVEEQLNKRVGHVYKKAFMQVVEADMLSKGLLGGEAWSSWHKEDSIHVGVRCIEMLIESTGMVSLHRQNAGVVGQDSETIELAPEYAEAIATRAGALAGISPMFQPCVVPPKPWTGITGGGYWAAGRKPLQLVRTRSLAALRRYEEVSMPEVIKAVNIAQNTAWRINKKVLDVANTITQWQHCPVADVPAMDRGEMPARPLDIDTNEIALKAWKKEASAFYRKDKARVSRRLSMEFMLSQANKFANYKAIWFPQNMDWRGRVYAVPMFNPQGNDMTKGLLTFAQEKPIGEDGFYWLKIHGANTAGVDKVPFPQRIKFVEDNHTNIMECAKAPLENTWWAEQDSPFCFLAFCFEYAGVINHGLSYNCSLPLAFDGSCSGIQHFSAMLRDEIGGKAVNLLPSAEYQDIYRIVSDKVNEVLKQDLINGTSTTVETVTDKKTGEITQRTKYGTKVMAQWWLEHGVNRGVTKRSVMTLVYGSKEFGFRDQVLSDTIQPAIDNGKGDMFLNPNQAAGYMAKLIWNAVSGTVVAAVEAMNWLKSAAKLLAAEVKDPKTDTVLRGRCAVHWVTPDGFPVWQEYKKPIQTRLNLMFLGQFRLQPTINTNKDSEIDAHKQESGIAPNFVHSQDGNHLRMTVVWAHEKYGIESFALIHDSFGTIPADAANLFKAVRETMVSTYESCDVLADFYDQFADQLHESQLDKMPALPAKGNLNLRDILKSDFAFA

SEQ ID NO: 833 - DNA, 2670 bp, synthetic construct
  misc_feature 1..2670: note = Variant of RNA polymerase
  source 1..2670: mol_type = other DNA
atgcaccatcaccatcaccatatgaacacgattaacattgctaagaacgacttctctgacatcgaactggctgctatcccgttcaacactctggctgaccattacggtgagcgtttagctcgcgaacagttggcccttgagcatgagtcttacgagatgggtgaagcacgcttccgcaagatgtttgagcgtcaacttaaagctggtgaggttgcggataacgctgccgccaagcctctcatcactaccctactccctaagatgattgcacgcatcaacgactggtttgaggaagtgaaagctaagcgcggcaagcgcccgacagccttccagttcctgcaagaaatcaagccggaagccgtagcgtacatcaccattaagaccactctggcttgcctaaccagtgcggacaatacaaccgttcaggctgtagcaagcgcaatcggtcgggccattgaggacgaggctcgcttcggtcgtatccgtgaccttgaagctaagcacttcaagaaaattgttgaggaacaactcaacaagcgcgtagggcacgtctaccaaaaagcatttatgcaagttgtcgaggctgacatgctctctacgggtctactcggtggcgaggcgtggtcttcgtggcataaggaagactctattcatgtaggagtacgctgcatcgagatgctcattgagtcaaccggaatggttagcttacaccgccaaaatgctggcgtagtaggtcaagactctgagactatcgaactcgcacctgaatacgctgaggctatcgcaacccgtgcaggtgcgctggctggcatctctccgatgttccaaccttgcgtagttcctcctaagccgtggactggcattactggtggtggctattgggctgcggggcgcaaacccctgcagttagtacgtactcgcagtctggcggcgcttcgccgctatgaagaagtgtcgatgccggaggtcatcaaagcagtcaacattgcgcagaatacagcatggcgtattaacaagaaagttctcgacgtagcgaataccatcacccaatggcagcactgtccagtcgcggatgtgcctgcgatggatcgtggcgaaatgccagctcgtccgttggacatcgataccaacgagattgcacttaaagcgtggaagaaagaagcttccgcgttctaccgcaaagacaaagcacgcgttagccgtcgtctgtcaatggagtttatgttatctcaggcgaacaagtttgcgaatgagaaagcaatctggtttccgcaaaacatggattggcgtgggcgcgtgtacgctgtcccgatgttcaatcctcagggcaacgatatgacgaaaggcctgctgacctttgcgcaggagaaacccattggtgaagacggcttctattggctcaagattcatggcgcaaatacagctggagtggataaagtaccgtttccacaacgcatcaaatttgttgaggataaccatacgaatattatggaatgcgcgaaagcaccgctggaaaacacttggtgggcggaacaggactcgccgttctgttttctggcgttctgctttgagtatgctggcgtcatcaatcatggtctgtcgtacaactgtagcttgcctctggcatttgatggtagttgctccggcatccaacatttctcagcgatgttacgcgacgaaattggcgccaaagctgtgaatctcctcccatctgcggaataccaggatatttatcgtatcgtcagcgacaaagttaacgaggtactgaaacaagatctgattaacggtacctctaccaccgtggaaacggtgactgataagaagacaggcgaaattacccaacgcacgaaatacgggaccaaagttatggcacagtggtggttagaacacggtgtgaatcgtggcgtcacgaaacgctcggttatgactttggtgtatgggagcaaagagtttggattccgcgatcaagtgctgagtgacaccattcaaccggcgatcgataacggcaaaggtgacatgtttctgaatccgaatcaggctgctggttacatggcgaaactgatctggaacgcagtgtccgggaccgtagtcgcagcagttgaggcgatgaactggctgaaaagtgcggcgaaattacttgctgctgaagtgaaggatcctaagacggatacagttctgcgtggccgctgcgcagtacattgggtgactcccgacggcttccctgtgtggcaggaatacaagaagcctattcagacgcgcttgaacctgatgttcctcggtcagttccgcttacagcctaccattaacaccaacaaagatagcgagattgatgcacacaaacaggagtctggtatcgctcctaactttgtacacagccaagacggtaaccaccttcgtatgactgtagtgtgggcacacgagaagtacggaatcgaatcttttgcactgattcacgactccttcggtaccattccggctgacgctgcgaacctgttcaaagcagtgcgcgaaactatggtttcgacatatgagtcttgtgatgtactggctgatttctacgaccagttcgctgaccagttgcacgagtctcaattggacaaaatgccagcacttccggctaaaggtaacttgaacctccgtgacatcttaaaatcggacttcgcgttcgcg

SEQ ID NO: 834 - protein, 890 aa, synthetic construct
  REGION 1..890: note = Variant of RNA polymerase
MHHHHHHMNTINIAKNDFSDIELAAIPFNTLADHYGERLAREQLALEHESYEMGEARFRKMFERQLKAGEVADNAAAKPLITTLLPKMIARINDWFEEVKAKRGKRPTAFQFLQEIKPEAVAYITIKTTLACLTSADNTTVQAVASAIGRAIEDEARFGRIRDLEAKHFKKIVEEQLNKRVGHVYQKAFMQVVEADMLSTGLLGGEAWSSWHKEDSIHVGVRCIEMLIESTGMVSLHRQNAGVVGQDSETIELAPEYAEAIATRAGALAGISPMFQPCVVPPKPWTGITGGGYWAAGRKPLQLVRTRSLAALRRYEEVSMPEVIKAVNIAQNTAWRINKKVLDVANTITQWQHCPVADVPAMDRGEMPARPLDIDTNEIALKAWKKEASAFYRKDKARVSRRLSMEFMLSQANKFANEKAIWFPQNMDWRGRVYAVPMFNPQGNDMTKGLLTFAQEKPIGEDGFYWLKIHGANTAGVDKVPFPQRIKFVEDNHTNIMECAKAPLENTWWAEQDSPFCFLAFCFEYAGVINHGLSYNCSLPLAFDGSCSGIQHFSAMLRDEIGAKAVNLLPSAEYQDIYRIVSDKVNEVLKQDLINGTSTTVETVTDKKTGEITQRTKYGTKVMAQWWLEHGVNRGVTKRSVMTLVYGSKEFGFRDQVLSDTIQPAIDNGKGDMFLNPNQAAGYMAKLIWNAVSGTVVAAVEAMNWLKSAAKLLAAEVKDPKTDTVLRGRCAVHWVTPDGFPVWQEYKKPIQTRLNLMFLGQFRLQPTINTNKDSEIDAHKQESGIAPNFVHSQDGNHLRMTVVWAHEKYGIESFALIHDSFGTIPADAANLFKAVRETMVSTYESCDVLADFYDQFADQLHESQLDKMPALPAKGNLNLRDILKSDFAFA

SEQ ID NO: 835 - DNA, 2670 bp, synthetic construct
  misc_feature 1..2670: note = Variant of RNA polymerase
  source 1..2670: mol_type = other DNA
atgcaccatcaccatcaccatatgaacacgattaacattgctaagaacgacttctctgacatcgaactggctgctatcccgttcaacactctggctgaccattacggtgagcgtttagctcgcgaacagttggcccttgagcatgagtcttacgagatgggtgaagcacgcttccgcaagatgtttgagcgtcaacttaaagctggtgaggttgcggataacgctgccgccaagcctctcatcactaccctactccctaagatgattgcacgcatcaacgactggtttgaggaagtgaaagctaagcgcggcaagcgcccgacagccttccagttcctgcaagaaatcaagccggaagccgtagcgtacatcaccattaagaccactctggcttgcctaaccagtgcggacaatacaaccgttcaggctgtagcaagcgcaatcggtcgggccattgaggacgaggctcgcttcggtcgtatccgtgaccttgaagctaagcacttcaagaagaacgttgaggaacaactcaacaagcgcgtagggcacccgtacaagaaagcatttatgcaagttgtcgaggctgacatgctctctacgggtctactcggtggcgaggcgtggtcttcgtggcataaggaagactctattcatgtaggagtacgctgcatcgagatgctcattgagtcaaccggaatggttagcttacaccgccaaaatgctggcgtagtaggtcaagactctgagactatcgaactcgcacctgaatacgctgaggctatcgcaacccgtgcaggtgcgctggctggcatctctccgatgttccaaccttgcgtagttcctcctaagccgtggactggcattactggtggtggctattgggctgcggggcgcaaacccctgcagttagtacgtactcgcagtctggcggcgcttcgccgctatgaagaagtgtcgatgccggaggtcatcaaagcagtcaacattgcgcagaatacagcatggcgtattaacaagaaagttctcgacgtagcgaatgccatcacccaatggcagcactgtccagtcgcggatgtgcctgcgatggatcgtggcgaaatgccagctcgtccgttggacatcgataccaacgagattgcacttaaagcgtggaagaaagaagcttccgcgttctaccgcaaagacaaagcacgcgttagccgtcgtctgtcaatggagtttatgttatctcaggcgaacaagtttgcgaatgagaaagcaatctggtttccgcaaaacatggattggcgtgggcgcgtgtacgctgtcccgatgttcaatcctcagggcaacgatatgacgaaaggcctgctgacctttgcgcaggagaaacccattggtgaagacggcttctattggctcaagattcatggcgcaaatacagctggagtggataaagtaccgtttccacaacgcatcaaatttgttgaggataaccatacgaatattatggaatgcgcgaaagcaccgctggaaaacacttggtgggcggaacaggactcgccgttctgttttctggcgttctgctttgagtatgctggcgtcatcaatcatggtctgtcgtacaactgtagcttgcctctggcatttgatggtagttgctccggcattcaacatttctcagcgatgttacgcgacgaaattggcggcaaagctgtgaatctcctcccatctgcggaataccaggatatttatcgtatcgtcagcgacaaagttaacgaggtactgaaacaagatctgattaacggtacctctaccaccgtggaaacggtgactgataagaagacaggcgaaattacccaacgcacgaaatacgggaccaaagttatggcacagtggtggttagaacacggtgtgaatcgtggcgtcacgaaacgctcggttatgactttggtgtatgggagcaaagagtttggattccgcgatcaagtgctgagtgacaccattcaaccggcgatcgataacggcaaaggtgacatgtttctgaatccgaatcaggctgctggttacatggcgaaactgatctggaacgcagtgtccgggaccgtagtcgcagcagttgaggcgatgaactggctgaaaagtgcggcgaaattacttgctgctgaagtgaaggatcctaagacggatacagttctgcgtggccgctgcgcagtacattgggtgactcccgacggcttccctgtgtggcaggaatacaagaagcctattcagacgcgcttgaacctgatgttcctcggtcagttccgcttacagcctaccattaacaccaacaaagatagcgagattgatgcacacaaacaggagtctggtatcgctcctaactttgtacacagccaagacggtaaccaccttcgtatgactgtagtgtgggcacacgagaagtacggaatcgaatcttttgcactgattcacgactccttcggtaccattccggctgacgctgcgaacctgttcaaagcagtgcgcgaaactatggtttcgacatatgagtcttgtgatgtactggctgatttctacgaccagttcgctgaccagttgcacgagtctcaattggacaaaatgccagcacttccggctaaaggtaacttgaacctccgtgacatcttaaaatcggacttcgcgttcgcg

SEQ ID NO: 836 - protein, 890 aa, synthetic construct
  REGION 1..890: note = Variant of RNA polymerase
MHHHHHHMNTINIAKNDFSDIELAAIPFNTLADHYGERLAREQLALEHESYEMGEARFRKMFERQLKAGEVADNAAAKPLITTLLPKMIARINDWFEEVKAKRGKRPTAFQFLQEIKPEAVAYITIKTTLACLTSADNTTVQAVASAIGRAIEDEARFGRIRDLEAKHFKKNVEEQLNKRVGHPYKKAFMQVVEADMLSTGLLGGEAWSSWHKEDSIHVGVRCIEMLIESTGMVSLHRQNAGVVGQDSETIELAPEYAEAIATRAGALAGISPMFQPCVVPPKPWTGITGGGYWAAGRKPLQLVRTRSLAALRRYEEVSMPEVIKAVNIAQNTAWRINKKVLDVANAITQWQHCPVADVPAMDRGEMPARPLDIDTNEIALKAWKKEASAFYRKDKARVSRRLSMEFMLSQANKFANEKAIWFPQNMDWRGRVYAVPMFNPQGNDMTKGLLTFAQEKPIGEDGFYWLKIHGANTAGVDKVPFPQRIKFVEDNHTNIMECAKAPLENTWWAEQDSPFCFLAFCFEYAGVINHGLSYNCSLPLAFDGSCSGIQHFSAMLRDEIGGKAVNLLPSAEYQDIYRIVSDKVNEVLKQDLINGTSTTVETVTDKKTGEITQRTKYGTKVMAQWWLEHGVNRGVTKRSVMTLVYGSKEFGFRDQVLSDTIQPAIDNGKGDMFLNPNQAAGYMAKLIWNAVSGTVVAAVEAMNWLKSAAKLLAAEVKDPKTDTVLRGRCAVHWVTPDGFPVWQEYKKPIQTRLNLMFLGQFRLQPTINTNKDSEIDAHKQESGIAPNFVHSQDGNHLRMTVVWAHEKYGIESFALIHDSFGTIPADAANLFKAVRETMVSTYESCDVLADFYDQFADQLHESQLDKMPALPAKGNLNLRDILKSDFAFA

SEQ ID NO: 837 - DNA, 2670 bp, synthetic construct
  misc_feature 1..2670: note = Variant of RNA polymerase
  source 1..2670: mol_type = other DNA
atgcaccatcaccatcaccatatgaacacgattaacattgctaagaacgacttctctgacatcgaactggctgctatcccgttcaacactctggctgaccattacggtgagcgtttagctcgcgaacagttggcccttgagcatgagtcttacgagatgggtgaagcacgcttccgcaagatgtttgagcgtcaacttaaagctggtgaggttgcggataacgctgccgccaagcctctcatcactaccctactccctaagatgattgcacgcatcaacgactggtttgaggaagtgaaagctaagcgcggcaagcgcccgacagccttccagttcctgcaagaaatcaagccggaagccgtagcgtacatcaccattaagaccactctggcttgcctaaccagtgcggacaatacaaccgttcaggctgtagcaagcgcaatcggtcgggccattgaggacgaggctcgcttcggtcgtatccgtgaccttgaagctaagcacttcaagggcaacgttgaggaacaactcaacaagcgcgtagggcacgtgtacaagaaagcatttatgcaagttgtcgaggaagacatgctctctaagggtctactcggtggcgaggcgtggtcttcgtggcataaggaagactctattcatgtaggagtacgctgcatcgagatgctcattgagtcaaccggaatggttagcttacaccgccaaaatgctggcgtagtaggtcaagactctgagactatcgaactcgcacctgaatacgctgaggctatcgcaacccgtgcaggtgcgctggctggcatctctccgatgttccaaccttgcgtagttcctcctaagccgtggactggcattactggtggtggctattgggctgcggggcgcaaacccctgcagttagtacgtactcgcagtctggcggcgcttcgccgctatgaagaagtgtcgatgccggaggtcatcaaagcagtcaacattgcgcagaatacagcatggcgtattaacaagaaagttctcgacgtagcgaatgccatcacccaatggcagcactgtccagtcgcggatgtgcctgcgatggatcgtggcgaaatgccagctcgtccgttggacatcgataccaacgagattgcacttaaagcgtggaagaaagaagcttccgcgttctaccgcaaagacaaagcacgcgttagccgtcgtctgtcaatggagtttatgttatctcaggcgaacaagtttgcgaattataaagcaatctggtttccgcaaaacatggattggcgtgggcgcgtgtacgctgtcccgatgttcaatcctcagggcaacgatatgacgaaaggcctgctgacctttgcgcaggagaaacccattggtgaagacggcttctattggctcaagattcatggcgcaaatacagctggagtggataaagtaccgtttccacaacgcatcaaatttgttgaggataaccatacgaatattatggaatgcgcgaaagcaccgctggaaaacacttggtgggcggaacaggactcgccgttctgttttctggcgttctgctttgagtatgctggcgtcatcaatagtggtctgtcgtacaactgtagcttgcctctggcatttgatggtagttgctccggcattcaacatttctcagcgatgttacgcgacgaaattggcggcaaagctgtgaatctcctcccatctgcggaataccaggatatttatcgtatcgtcagcgacaaagttaacgaggtactgaaacaagatctgattaacggtacctctaccaccgtggaaacggtgactgataagaagacaggcgaaattacccaacgcacgaaatacgggaccaaagttatggcacagtggtggttagaacacggtgtgaatcgtggcgtcacgaaacgctcggttatgactttggtgtatgggagcaaagagtttggattccgcgatcaagtgctgagtgacaccattcaaccggcgatcgataacggcaaaggtgacatgtttctgaatccgaatcaggctgctggttacatggcgaaactgatctggaacgcagtgtccgggaccgtagtcgcagcagttgaggcgatgaactggctgaaaagtgcggcgaaattacttgctgctgaagtgaaggatcctaagacggatacagttctgcgtggccgctgcgcagtacattgggtgactcccgacggcttccctgtgtggcaggaatacaagaagcctattcagacgcgcttgaacctgatgttcctcggtcagttccgcttacagcctaccattaacaccaacaaagatagcgagattgatgcacacaaacaggagtctggtatcgctcctaactttgtacacagccaagacggtaaccaccttcgtatgactgtagtgtgggcacacgagaagtacggaatcgaatcttttgcactgattcacgactccttcggtaccattccggctgacgctgcgaacctgttcaaagcagtgcgcgaaactatggtttcgacatatgagtcttgtgatgtactggctgatttctacgaccagttcgctgaccagttgcacgagtctcaattggacaaaatgccagcacttccggctaaaggtaacttgaacctccgtgacatcttaaaatcggacttcgcgttcgcg

SEQ ID NO: 838 - protein, 890 aa, synthetic construct
  REGION 1..890: note = Variant of RNA polymerase
MHHHHHHMNTINIAKNDFSDIELAAIPFNTLADHYGERLAREQLALEHESYEMGEARFRKMFERQLKAGEVADNAAAKPLITTLLPKMIARINDWFEEVKAKRGKRPTAFQFLQEIKPEAVAYITIKTTLACLTSADNTTVQAVASAIGRAIEDEARFGRIRDLEAKHFKGNVEEQLNKRVGHVYKKAFMQVVEEDMLSKGLLGGEAWSSWHKEDSIHVGVRCIEMLIESTGMVSLHRQNAGVVGQDSETIELAPEYAEAIATRAGALAGISPMFQPCVVPPKPWTGITGGGYWAAGRKPLQLVRTRSLAALRRYEEVSMPEVIKAVNIAQNTAWRINKKVLDVANAITQWQHCPVADVPAMDRGEMPARPLDIDTNEIALKAWKKEASAFYRKDKARVSRRLSMEFMLSQANKFANYKAIWFPQNMDWRGRVYAVPMFNPQGNDMTKGLLTFAQEKPIGEDGFYWLKIHGANTAGVDKVPFPQRIKFVEDNHTNIMECAKAPLENTWWAEQDSPFCFLAFCFEYAGVINSGLSYNCSLPLAFDGSCSGIQHFSAMLRDEIGGKAVNLLPSAEYQDIYRIVSDKVNEVLKQDLINGTSTTVETVTDKKTGEITQRTKYGTKVMAQWWLEHGVNRGVTKRSVMTLVYGSKEFGFRDQVLSDTIQPAIDNGKGDMFLNPNQAAGYMAKLIWNAVSGTVVAAVEAMNWLKSAAKLLAAEVKDPKTDTVLRGRCAVHWVTPDGFPVWQEYKKPIQTRLNLMFLGQFRLQPTINTNKDSEIDAHKQESGIAPNFVHSQDGNHLRMTVVWAHEKYGIESFALIHDSFGTIPADAANLFKAVRETMVSTYESCDVLADFYDQFADQLHESQLDKMPALPAKGNLNLRDILKSDFAFA

SEQ ID NO: 839 - DNA, 2670 bp, synthetic construct
  misc_feature 1..2670: note = Variant of RNA polymerase
  source 1..2670: mol_type = other DNA
atgcaccatcaccatcaccatatgaacacgattaacattgctaagaacgacttctctgacatcgaactggctgctatcccgttcaacactctggctgaccattacggtgagcgtttagctcgcgaacagttggcccttgagcatgagtcttacgagatgggtgaagcacgcttccgcaagatgtttgagcgtcaacttaaagctggtgaggttgcggataacgctgccgccaagcctctcatcactaccctactccctaagatgattgcacgcatcaacgactggtttgaggaagtgaaagctaagcgcggcaagcgcccgacagccttccagttcctgcaagaaatcaagccggaagccgtagcgtacatcaccattaagaccactctggcttgcctaaccagtgcggacaatacaaccgttcaggctgtagcaagcgcaatcggtcgggccattgaggacgaggctcgcttcggtcgtatccgtgaccttgaagctaagcacttcaagaagaacgttgaggaacaactcaacaagcgcgtagggcacccgtacaagaaagcatttatgcaagttgtcgaggctgacgtgctctctaagggtctactcggtggcgaggcgtggtcttcgtggcataaggaagactctattcatgtaggagtacgctgcatcgagatgctcattgagtcaaccggaatggttagcttacaccgccaaaatgctggcgtagtaggtcaagactctgagactatcgaactcgcacctgaatacgctgaggctatcgcaacccgtgcaggtgcgctggctggcatctctccgatgttccaaccttgcgtagttcctcctaagccgtggactggcattactggtggtggctattgggctgcggggcgcaaacccctgcagttagtacgtactcgcagtctggcggcgcttcgccgctatgaagaagtgtcgatgccggaggtcatcaaagcagtcaacattgcgcagaatacagcatggcgtattaacaagaaagttctcgacgtagcgaataccatcacccaatggcagcactgtccagtcgcggatgtgcctgcgatggatcgtggcgaaatgccagctcgtccgttggacatcgataccaacgagattgcacttaaagcgtggaagaaagaagcttccgcgttctaccgcaaagacaaagcacgcgttagccgtcgtctgtcaatggagtttatgttatctcaggcgaacaagtttgcgaattataaagcaatctggtttccgcaaaacatggattggcgtgggcgcgtgtacgctgtcccgatgttcaatcctcagggcaacgatatgacgaaaggcctgctgacctttgcgcaggagaaacccattggtgaagacggcttctattggctcaagattcatggcgcaaatacagctggagtggataaagtaccgtttccacaacgcatcaaatttgttgaggataaccatacgaatattatggaatgcgcgaaagcaccgctggaaaacacttggtgggcggaacaggactcgccgttctgttttctggcgttctgctttgagtatgctggcgtcatcaatcatggtctgtcgtacaactgtagcttgcctctggcatttgatggtagttgctccggcattcaacatttctcagcgatgttacgcgacgaaattggcggcaaagctgtgaatctcctcccatctgcggaataccaggatatttatcgtatcgtcagcgacaaagttaacgaggtactgaaacaagatctgattaacggtacctctaccaccgtggaaacggtgactgataagaagacaggcgaaattacccaacgcacgaaatacgggaccaaagttatggcacagtggtggttagaacacggtgtgaatcgtggcgtcacgaaacgctcggttatgactttggtgtatgggagcaaagagtttggattccgcgatcaagtgctgagtgacaccattcaaccggcgatcgataacggcaaaggtgacatgtttctgaatccgaatcaggctgctggttacatggcgaaactgatctggaacgcagtgtccgggaccgtagtcgcagcagttgaggcgatgaactggctgaaaagtgcggcgaaattacttgctgctgaagtgaaggatcctaagacggatacagttctgcgtggccgctgcgcagtacattgggtgactcccgacggcttccctgtgtggcaggaatacaagaagcctattcagacgcgcttgaacctgatgttcctcggtcagttccgcttacagcctaccattaacaccaacaaagatagcgagattgatgcacacaaacaggagtctggtatcgctcctaactttgtacacagccaagacggtaaccaccttcgtatgactgtagtgtgggcacacgagaagtacggaatcgaatcttttgcactgattcacgactccttcggtaccattccggctgacgctgcgaacctgttcaaagcagtgcgcgaaactatggtttcgacatatgagtcttgtgatgtactggctgatttctacgaccagttcgctgaccagttgcacgagtctcaattggacaaaatgccagcacttccggctaaaggtaacttgaacctccgtgacatcttaaaatcggacttcgcgttcgcg

SEQ ID NO: 840 - protein, 890 aa, synthetic construct
  REGION 1..890: note = Variant of RNA polymerase
MHHHHHHMNTINIAKNDFSDIELAAIPFNTLADHYGERLAREQLALEHESYEMGEARFRKMFERQLKAGEVADNAAAKPLITTLLPKMIARINDWFEEVKAKRGKRPTAFQFLQEIKPEAVAYITIKTTLACLTSADNTTVQAVASAIGRAIEDEARFGRIRDLEAKHFKKNVEEQLNKRVGHPYKKAFMQVVEADVLSKGLLGGEAWSSWHKEDSIHVGVRCIEMLIESTGMVSLHRQNAGVVGQDSETIELAPEYAEAIATRAGALAGISPMFQPCVVPPKPWTGITGGGYWAAGRKPLQLVRTRSLAALRRYEEVSMPEVIKAVNIAQNTAWRINKKVLDVANTITQWQHCPVADVPAMDRGEMPARPLDIDTNEIALKAWKKEASAFYRKDKARVSRRLSMEFMLSQANKFANYKAIWFPQNMDWRGRVYAVPMFNPQGNDMTKGLLTFAQEKPIGEDGFYWLKIHGANTAGVDKVPFPQRIKFVEDNHTNIMECAKAPLENTWWAEQDSPFCFLAFCFEYAGVINHGLSYNCSLPLAFDGSCSGIQHFSAMLRDEIGGKAVNLLPSAEYQDIYRIVSDKVNEVLKQDLINGTSTTVETVTDKKTGEITQRTKYGTKVMAQWWLEHGVNRGVTKRSVMTLVYGSKEFGFRDQVLSDTIQPAIDNGKGDMFLNPNQAAGYMAKLIWNAVSGTVVAAVEAMNWLKSAAKLLAAEVKDPKTDTVLRGRCAVHWVTPDGFPVWQEYKKPIQTRLNLMFLGQFRLQPTINTNKDSEIDAHKQESGIAPNFVHSQDGNHLRMTVVWAHEKYGIESFALIHDSFGTIPADAANLFKAVRETMVSTYESCDVLADFYDQFADQLHESQLDKMPALPAKGNLNLRDILKSDFAFA

SEQ ID NO: 841 - DNA, 2670 bp, synthetic construct
  misc_feature 1..2670: note = Variant of RNA polymerase
  source 1..2670: mol_type = other DNA
atgcaccatcaccatcaccatatgaacacgattaacattgctaagaacgacttctctgacatcgaactggctgctatcccgttcaacactctggctgaccattacggtgagcgtttagctcgcgaacagttggcccttgagcatgagtcttacgagatgggtgaagcacgcttccgcaagatgtttgagcgtcaacttaaagctggtgaggttgcggataacgctgccgccaagcctctcatcactaccctactccctaagatgattgcacgcatcaacgactggtttgaggaagtgaaagctaagcgcggcaagcgcccgacagccttccagttcctgcaagaaatcaagccggaagccgtagcgtacatcaccattaagaccactctggcttgcctaaccagtgcggacaatacaaccgttcaggctgtagcaagcgcaatcggtcgggccattgaggacgaggctcgcttcggtcgtatccgtgaccttgaagctaagcacttcaagaagaacgttgaggaacaactcaacaagcgcgtagggcacgtgtacaagaaagcatttatgcaagttgtcgaggctgacatgctctctacgggtctactcggtggcgaggcgtggtcttcgtggcataaggaagactctattcatgtaggagtacgctgcatcgagatgctcattgagtcaaccggaatggttagcttacaccgccaaaatgctggcgtagtaggtcaagactctgagactatcgaactcgcacctgaatacgctgaggctatcgcaacccgtgcaggtgcgctggctggcatctctccgatgttccaaccttgcgtagttcctcctaagccgtggactggcattactggtggtggctattgggctgcggggcgcaaacccctgcagttagtacgtactcgcagtctggcggcgcttcgccgctatgaagaagtgtcgatgccggaggtcatcaaagcagtcaacattgcgcagaatacagcatggcgtattaacaagaaagttctcgacgtagcgaataccatcacccaatggcagcactgtccagtcgcggatgtgcctgcgatggatcgtggcgaaatgccagctcgtccgttggacatcgataccaacgagattgcacttaaagcgtggaagaaagaagcttccgcgttctaccgcaaagacaaagcacgcgttagccgtcgtctgtcaatggagtttatgttatctcaggcgaacaagtttgcgaattataaagcaatctggtttccgcaaaacatggattggcgtgggcgcgtgtacgctgtcccgatgttcaatcctcagggcaacgatatgacgaaaggcctgctgacctttgcgcaggagaaacccattggtgaagacggcttctattggctcaagattcatggcgcaaatacagctggagtggataaagtaccgtttccacaacgcatcaaatttgttgaggataaccatacgaatattatggaatgcgcgaaagcaccgctggaaaacacttggtgggcggaacaggactcgccgttctgttttctggcgttctgctttgagtatgctggcgtcatcaatcatggtctgtcgtacaactgtagcttgcctctggcatttgatggtagttgctccggcattcaacatttctcagcgatgttacgcgacgaaattggcggcaaagctgtgaatctcctcccatctgcggaataccaggatatttatcgtatcgtcagcgacaaagttaacgaggtactgaaacaagatctgattaacggtacctctaccaccgtggaaacggtgactgataagaagacaggcgaaattacccaacgcacgaaatacgggaccaaagttatggcacagtggtggttagaacacggtgtgaatcgtggcgtcacgaaacgctcggttatgactttggtgtatgggagcaaagagtttggattccgcgatcaagtgctgagtgacaccattcaaccggcgatcgataacggcaaaggtgacatgtttctgaatccgaatcaggctgctggttacatggcgaaactgatctggaacgcagtgtccgggaccgtagtcgcagcagttgaggcgatgaactggctgaaaagtgcggcgaaattacttgctgctgaagtgaaggatcctaagacggatacagttctgcgtggccgctgcgcagtacattgggtgactcccgacggcttccctgtgtggcaggaatacaagaagcctattcagacgcgcttgaacctgatgttcctcggtcagttccgcttacagcctaccattaacaccaacaaagatagcgagattgatgcacacaaacaggagtctggtatcgctcctaactttgtacacagccaagacggtaaccaccttcgtatgactgtagtgtgggcacacgagaagtacggaatcgaatcttttgcactgattcacgactccttcggtaccattccggctgacgctgcgaacctgttcaaagcagtgcgcgaaactatggtttcgacatatgagtcttgtgatgtactggctgatttctacgaccagttcgctgaccagttgcacgagtctcaattggacaaaatgccagcacttccggctaaaggtaacttgaacctccgtgacatcttaaaatcggacttcgcgttcgcg

SEQ ID NO: 842 - protein, 890 aa, synthetic construct
  REGION 1..890: note = Variant of RNA polymerase
MHHHHHHMNTINIAKNDFSDIELAAIPFNTLADHYGERLAREQLALEHESYEMGEARFRKMFERQLKAGEVADNAAAKPLITTLLPKMIARINDWFEEVKAKRGKRPTAFQFLQEIKPEAVAYITIKTTLACLTSADNTTVQAVASAIGRAIEDEARFGRIRDLEAKHFKKNVEEQLNKRVGHVYKKAFMQVVEADMLSTGLLGGEAWSSWHKEDSIHVGVRCIEMLIESTGMVSLHRQNAGVVGQDSETIELAPEYAEAIATRAGALAGISPMFQPCVVPPKPWTGITGGGYWAAGRKPLQLVRTRSLAALRRYEEVSMPEVIKAVNIAQNTAWRINKKVLDVANTITQWQHCPVADVPAMDRGEMPARPLDIDTNEIALKAWKKEASAFYRKDKARVSRRLSMEFMLSQANKFANYKAIWFPQNMDWRGRVYAVPMFNPQGNDMTKGLLTFAQEKPIGEDGFYWLKIHGANTAGVDKVPFPQRIKFVEDNHTNIMECAKAPLENTWWAEQDSPFCFLAFCFEYAGVINHGLSYNCSLPLAFDGSCSGIQHFSAMLRDEIGGKAVNLLPSAEYQDIYRIVSDKVNEVLKQDLINGTSTTVETVTDKKTGEITQRTKYGTKVMAQWWLEHGVNRGVTKRSVMTLVYGSKEFGFRDQVLSDTIQPAIDNGKGDMFLNPNQAAGYMAKLIWNAVSGTVVAAVEAMNWLKSAAKLLAAEVKDPKTDTVLRGRCAVHWVTPDGFPVWQEYKKPIQTRLNLMFLGQFRLQPTINTNKDSEIDAHKQESGIAPNFVHSQDGNHLRMTVVWAHEKYGIESFALIHDSFGTIPADAANLFKAVRETMVSTYESCDVLADFYDQFADQLHESQLDKMPALPAKGNLNLRDILKSDFAFA

SEQ ID NO: 843 - DNA, 2670 bp, synthetic construct
  misc_feature 1..2670: note = Variant of RNA polymerase
  source 1..2670: mol_type = other DNA
atgcaccatcaccatcaccatatgaacacgattaacattgctaagaacgacttctctgacatcgaactggctgctatcccgttcaacactctggctgaccattacggtgagcgtttagctcgcgaacagttggcccttgagcatgagtcttacgagatgggtgaagcacgcttccgcaagatgtttgagcgtcaacttaaagctggtgaggttgcggataacgctgccgccaagcctctcatcactaccctactccctaagatgattgcacgcatcaacgactggtttgaggaagtgaaagctaagcgcggcaagcgcccgacagccttccagttcctgcaagaaatcaagccggaagccgtagcgtacatcaccattaagaccactctggcttgcctaaccagtgcggacaatacaaccgttcaggctgtagcaagcgcaatcggtcgggccattgaggacgaggctcgcttcggtcgtatccgtgaccttgaagctaagcacttcaagggcaacgttgaggaacaactcaacaagcgcgtagggcacgtctacaagaaagcatttatgcaagttgtcgaggctgacatgctctctaagggtctactcggtggcgaggcgtggtcttcgtggcataaggaagactctattcatgtaggagtacgctgcatcgagatgctcattgagtcaaccggaatggttagcttacaccgccaaaatgctggcgtagtaggtcaagactctgagactatcgaactcgcacctgaatacgctgaggctatcgcaacccgtgcaggtgcgctggctggcatctctccgatgttccaaccttgcgtagttcctcctaagccgtggactggcattactggtggtggctattgggctgcggggcgcaaacccctgcagttagtacgtactcgcagtctggcggcgcttcgccgctatgaagaagtgtcgatgccggaggtcatcaaagcagtcaacattgcgcagaatacagcatggcgtattaacaagaaagttctcgacgtagcgaatgccatcacccaatggcagcactgtccagtcgcggatgtgcctgcgatggatcgtggcgaaatgccagctcgtccgttggacatcgataccaacgagattgcacttaaagcgtggaagaaagaagcttccgcgttctaccgcaaagacaaagcacgcgttagccgtcgtctgtcaatggagtttatgttatctcaggcgaacaagtttgcgaattataaagcaatctggtttccgcaaaacatggattggcgtgggcgcgtgtacgctgtcccgatgttcaatcctcagggcaacgatatgacgaaaggcctgctgacctttgcgcaggagaaacccattggtgaagacggcttctattggctcaagattcatggcgcaaatacagctggagtggataaagtaccgtttccacaacgcatcaaatttgttgaggataaccatacgaatattatggaatgcgcgaaagcaccgctggaaaacacttggtgggcggaacaggactcgccgttctgttttctggcgttctgctttgagtatgctggcgtcatcaatcatggtctgtcgtacaactgtagcttgcctctggcatttgatggtagttgctccggcattcaacatttctcagcgatgttacgcgacgaaattggcggcaaagctgtgaatctcctcccatctgcggaataccaggatatttatcgtatcgtcagcgacaaagttaacgaggtactgaaacaagatctgattaacggtacctctaccaccgtggaaacggtgactgataagaagacaggcgaaattacccaacgcacgaaatacgggaccaaagttatggcacagtggtggttagaacacggtgtgaatcgtggcgtcacgaaacgctcggttatgactttggtgtatgggagcaaagagtttggattccgcgatcaagtgctgagtgacaccattcaaccggcgatcgataacggcaaaggtgacatgtttctgaatccgaatcaggctgctggttacatggcgaaactgatctggaacgcagtgtccgggaccgtagtcgcagcagttgaggcgatgaactggctgaaaagtgcggcgaaattacttgctgctgaagtgaaggatcctaagacggatacagttctgcgtggccgctgcgcagtacattgggtgactcccgacggcttccctgtgtggcaggaatacaagaagcctattcagacgcgcttgaacctgatgttcctcggtcagttccgcttacagcctaccattaacaccaacaaagatagcgagattgatgcacacaaacaggagtctggtatcgctcctaactttgtacacagccaagacggtaaccaccttcgtatgactgtagtgtgggcacacgagaagtacggaatcgaatcttttgcactgattcacgactccttcggtaccattccggctgacgctgcgaacctgttcaaagcagtgcgcgaaactatggtttcgacatatgagtcttgtgatgtactggctgatttctacgaccagttcgctgaccagttgcacgagtctcaattggacaaaatgccagcacttccggctaaaggtaacttgaacctccgtgacatcttaaaatcggacttcgcgttcgcg

SEQ ID NO: 844 - protein, 890 aa, synthetic construct
  REGION 1..890: note = Variant of RNA polymerase
MHHHHHHMNTINIAKNDFSDIELAAIPFNTLADHYGERLAREQLALEHESYEMGEARFRKMFERQLKAGEVADNAAAKPLITTLLPKMIARINDWFEEVKAKRGKRPTAFQFLQEIKPEAVAYITIKTTLACLTSADNTTVQAVASAIGRAIEDEARFGRIRDLEAKHFKGNVEEQLNKRVGHVYKKAFMQVVEADMLSKGLLGGEAWSSWHKEDSIHVGVRCIEMLIESTGMVSLHRQNAGVVGQDSETIELAPEYAEAIATRAGALAGISPMFQPCVVPPKPWTGITGGGYWAAGRKPLQLVRTRSLAALRRYEEVSMPEVIKAVNIAQNTAWRINKKVLDVANAITQWQHCPVADVPAMDRGEMPARPLDIDTNEIALKAWKKEASAFYRKDKARVSRRLSMEFMLSQANKFANYKAIWFPQNMDWRGRVYAVPMFNPQGNDMTKGLLTFAQEKPIGEDGFYWLKIHGANTAGVDKVPFPQRIKFVEDNHTNIMECAKAPLENTWWAEQDSPFCFLAFCFEYAGVINHGLSYNCSLPLAFDGSCSGIQHFSAMLRDEIGGKAVNLLPSAEYQDIYRIVSDKVNEVLKQDLINGTSTTVETVTDKKTGEITQRTKYGTKVMAQWWLEHGVNRGVTKRSVMTLVYGSKEFGFRDQVLSDTIQPAIDNGKGDMFLNPNQAAGYMAKLIWNAVSGTVVAAVEAMNWLKSAAKLLAAEVKDPKTDTVLRGRCAVHWVTPDGFPVWQEYKKPIQTRLNLMFLGQFRLQPTINTNKDSEIDAHKQESGIAPNFVHSQDGNHLRMTVVWAHEKYGIESFALIHDSFGTIPADAANLFKAVRETMVSTYESCDVLADFYDQFADQLHESQLDKMPALPAKGNLNLRDILKSDFAFA

SEQ ID NO: 845 - DNA, 2670 bp, synthetic construct
  misc_feature 1..2670: note = Variant of RNA polymerase
  source 1..2670: mol_type = other DNA
atgcaccatcaccatcaccatatgaacacgattaacattgctaagaacgacttctctgacatcgaactggctgctatcccgttcaacactctggctgaccattacggtgagcgtttagctcgcgaacagttggcccttgagcatgagtcttacgagatgggtgaagcacgcttccgcaagatgtttgagcgtcaacttaaagctggtgaggttgcggataacgctgccgccaagcctctcatcactaccctactccctaagatgattgcacgcatcaacgactggtttgaggaagtgaaagctaagcgcggcaagcgcccgacagccttccagttcctgcaagaaatcaagccggaagccgtagcgtacatcaccattaagaccactctggcttgcctaaccagtgcggacaatacaaccgttcaggctgtagcaagcgcaatcggtcgggccattgaggacgaggctcgcttcggtcgtatccgtgaccttgaagctaagcacttcaagaaaattgttgaggaacaactcaacaagcgcgtagggcacgtctacaaaaaagcatttatgcaagttgtcgaggctgacatgctctctaagggtctactcggtggcgaggcgtggtcttcgtggcataaggaagactctattcatgtaggagtacgctgcatcgagatgctcattgagtcaaccggaatggttagcttacaccgccaaaatgctggcgtagtaggtcaagactctgagactatcgaactcgcacctgaatacgctgaggctatcgcaacccgtgcaggtgcgctggctggcatctctccgatgttccaaccttgcgtagttcctcctaagccgtggactggcattactggtggtggctattgggctgcggggcgcaaacccctgcagttagtacgtactcgcagtctggcggcgcttcgccgctatgaagaagtgtcgatgccggaggtcatcaaagcagtcaacattgcgcagaatacagcatggcgtattaacaagaaagttctcgacgtagcgaatgccatcacccaatggcagcactgtccagtcgcggatgtgcctgcgatggatcgtggcgaaatgccagctcgtccgttggacatcgataccaacgagattgcacttaaagcgtggaagaaagaagcttccgcgttctaccgcaaagacaaagcacgcgttagccgtcgtctgtcaatggagtttatgttatctcaggcgaacaagtttgcgaattataaagcaatctggtttccgcaaaacatggattggcgtgggcgcgtgtacgctgtcccgatgttcaatcctcagggcaacgatatgacgaaaggcctgctgacctttgcgcaggagaaacccattggtgaagacggcttctattggctcaagattcatggcgcaaatacagctggagtggataaagtaccgtttccacaacgcatcaaatttgttgaggataaccatacgaatattatggaatgcgcgaaagcaccgctggaaaacacttggtgggcggaacaggactcgccgttctgttttctggcgttctgctttgagtatgctggcgtcatcaatcatggtctgtcgtacaactgtagcttgcctctggcatttgatggtagttgctccggcatccaacatttctcagcgatgttacgcgacgaaattggcggcaaagctgtgaatctcctcccatctgcggaataccaggatatttatcgtatcgtcagcgacaaagttaacgaggtgctgaaacaagatctgattaacggtacctctaccaccgtggaaacggtgactgataagaagacaggcgaaattacccaacgcacgaaatacgggaccaaagttatggcacagtggtggttagaacacggtgtgaatcgtggcgtcacgaaacgctcggttatgactttggtgtatgggagcaaagagtttggattccgcgatcaagtgctgagtgacaccattcaaccggcgatcgataacggcaaaggtgacatgtttctgaatccgaatcaggctgctggttacatggcgaaactgatctggaacgcagtgtccgggaccgtagtcgcagcagttgaggcgatgaactggctgaaaagtgcggcgaaattacttgctgctgaagtgaaggatcctaagacggatacagttctgcgtggccgctgcgcagtacattgggtgactcccgacggcttccctgtgtggcaggaatacaagaagcctattcagacgcgcttgaacctgatgttcctcggtcagttccgcttacagcctaccattaacaccaacaaagatagcgagattgatgcacacaaacaggagtctggtatcgctcctaactttgtacacagccaagacggtaaccaccttcgtatgactgtagtgtgggcacacgagaagtacggaatcgaatcttttgcactgattcacgactccttcggtaccattccggctgacgctgcgaacctgttcaaagcagtgcgcgaaactatggtttcgacatatgagtcttgtgatgtactggctgatttctacgaccagttcgctgaccagttgcacgagtctcaattggacaaaatgccagcacttccggctaaaggtaacttgaacctccgtgacatcttaaaatcggacttcgcgttcgcg

SEQ ID NO: 846 - protein, 890 aa, synthetic construct
  REGION 1..890: note = Variant of RNA polymerase
MHHHHHHMNTINIAKNDFSDIELAAIPFNTLADHYGERLAREQLALEHESYEMGEARFRKMFERQLKAGEVADNAAAKPLITTLLPKMIARINDWFEEVKAKRGKRPTAFQFLQEIKPEAVAYITIKTTLACLTSADNTTVQAVASAIGRAIEDEARFGRIRDLEAKHFKKIVEEQLNKRVGHVYKKAFMQVVEADMLSKGLLGGEAWSSWHKEDSIHVGVRCIEMLIESTGMVSLHRQNAGVVGQDSETIELAPEYAEAIATRAGALAGISPMFQPCVVPPKPWTGITGGGYWAAGRKPLQLVRTRSLAALRRYEEVSMPEVIKAVNIAQNTAWRINKKVLDVANAITQWQHCPVADVPAMDRGEMPARPLDIDTNEIALKAWKKEASAFYRKDKARVSRRLSMEFMLSQANKFANYKAIWFPQNMDWRGRVYAVPMFNPQGNDMTKGLLTFAQEKPIGEDGFYWLKIHGANTAGVDKVPFPQRIKFVEDNHTNIMECAKAPLENTWWAEQDSPFCFLAFCFEYAGVINHGLSYNCSLPLAFDGSCSGIQHFSAMLRDEIGGKAVNLLPSAEYQDIYRIVSDKVNEVLKQDLINGTSTTVETVTDKKTGEITQRTKYGTKVMAQWWLEHGVNRGVTKRSVMTLVYGSKEFGFRDQVLSDTIQPAIDNGKGDMFLNPNQAAGYMAKLIWNAVSGTVVAAVEAMNWLKSAAKLLAAEVKDPKTDTVLRGRCAVHWVTPDGFPVWQEYKKPIQTRLNLMFLGQFRLQPTINTNKDSEIDAHKQESGIAPNFVHSQDGNHLRMTVVWAHEKYGIESFALIHDSFGTIPADAANLFKAVRETMVSTYESCDVLADFYDQFADQLHESQLDKMPALPAKGNLNLRDILKSDFAFA

SEQ ID NO: 847 - DNA, 2670 bp, synthetic construct
  misc_feature 1..2670: note = Variant of RNA polymerase
  source 1..2670: mol_type = other DNA
atgcaccatcaccatcaccatatgaacacgattaacattgctaagaacgacttctctgacatcgaactggctgctatcccgttcaacactctggctgaccattacggtgagcgtttagctcgcgaacagttggcccttgagcatgagtcttacgagatgggtgaagcacgcttccgcaagatgtttgagcgtcaacttaaagctggtgaggttgcggataacgctgccgccaagcctctcatcactaccctactccctaagatgattgcacgcatcaacgactggtttgaggaagtgaaagctaagcgcggcaagcgcccgacagccttccagttcctgcaagaaatcaagccggaagccgtagcgtacatcaccattaagaccactctggcttgcctaaccagtgcggacaatacaaccgttcaggctgtagcaagcgcaatcggtcgggccattgaggacgaggctcgcttcggtcgtatccgtgaccttgaagctaagcacttcaagggcaacgttgaggaacaactcaacaagcgcgtagggcacgtgtacaagaaagcatttatgcaagttgtcgaggctgacatgctctctaagggtctactcggtggcgaggcgtggtcttcgtggcataaggaagactctattcatgtaggagtacgctgcatcgagatgctcattgagtcaaccggaatggttagcttacaccgccaaaatgctggcgtagtaggtcaagactctgagactatcgaactcgcacctgaatacgctgaggctatcgcaacccgtgcaggtgcgctggctggcatctctccgatgttccaaccttgcgtagttcctcctaagccgtggactggcattactggtggtggctattgggctgcggggcgcaaacccctgcagttagtacgtactcgcagtctggcggcgcttcgccgctatgaagaagtgtcgatgccggaggtcatcaaagcagtcaacattgcgcagaatacagcatggcgtattaacaagaaagttctcgacgtagcgaataccatcacccaatggcagcactgtccagtcgcggatgtgcctgcgatggatcgtggcgaaatgccagctcgtccgttggacatcgataccaacgagattgcacttaaagcgtggaagaaagaagcttccgcgttctaccgcaaagacaaagcacgcgttagccgtcgtctgtcaatggagtttatgttatctcaggcgaacaagtttgcgaatgagaaagcaatctggtttccgcaaaacatggattggcgtgggcgcgtgtacgctgtcccgatgttcaatcctcagggcaacgatatgacgaaaggcctgctgacctttgcgcaggagaaacccattggtgaagacggcttctattggctcaagattcatggcgcaaatacagctggagtggataaagtaccgtttccacaacgcatcaaatttgttgaggataaccatacgaatattatggaatgcgcgaaagcaccgctggaaaacacttggtgggcggaacaggactcgccgttctgttttctggcgttctgctttgagtatgctggcgtcatcaatcatggtctgtcgtacaactgtagcttgcctctggcatttgatggtagttgctccggcattcaacatttctcagcgatgttacgcgacgaaattggcggcaaagctgtgaatctcctcccatctgcggaataccaggatatttatcgtatcgtcagcgacaaagttaacgaggtactgaaacaagatctgattaacggtacctctaccaccgtggaaacggtgactgataagaagacaggcgaaattacccaacgcacgaaatacgggaccaaagttatggcacagtggtggttagaacacggtgtgaatcgtggcgtcacgaaacgctcggttatgactttggtgtatgggagcaaagagtttggattccgcgatcaagtgctgagtgacaccattcaaccggcgatcgataacggcaaaggtgacatgtttctgaatccgaatcaggctgctggttacatggcgaaactgatctggaacgcagtgtccgggaccgtagtcgcagcagttgaggcgatgaactggctgaaaagtgcggcgaaattacttgctgctgaagtgaaggatcctaagacggatacagttctgcgtggccgctgcgcagtacattgggtgactcccgacggcttccctgtgtggcaggaatacaagaagcctattcagacgcgcttgaacctgatgttcctcggtcagttccgcttacagcctaccattaacaccaacaaagatagcgagattgatgcacacaaacaggagtctggtatcgctcctaactttgtacacagccaagacggtaaccaccttcgtatgactgtagtgtgggcacacgagaagtacggaatcgaatcttttgcactgattcacgactccttcggtaccattccggctgacgctgcgaacctgttcaaagcagtgcgcgaaactatggtttcgacatatgagtcttgtgatgtactggctgatttctacgaccagttcgctgaccagttgcacgagtctcaattggacaaaatgccagcacttccggctaaaggtaacttgaacctccgtgacatcttaaaatcggacttcgcgttcgcg

SEQ ID NO: 848 - protein, 890 aa, synthetic construct
  REGION 1..890: note = Variant of RNA polymerase
MHHHHHHMNTINIAKNDFSDIELAAIPFNTLADHYGERLAREQLALEHESYEMGEARFRKMFERQLKAGEVADNAAAKPLITTLLPKMIARINDWFEEVKAKRGKRPTAFQFLQEIKPEAVAYITIKTTLACLTSADNTTVQAVASAIGRAIEDEARFGRIRDLEAKHFKGNVEEQLNKRVGHVYKKAFMQVVEADMLSKGLLGGEAWSSWHKEDSIHVGVRCIEMLIESTGMVSLHRQNAGVVGQDSETIELAPEYAEAIATRAGALAGISPMFQPCVVPPKPWTGITGGGYWAAGRKPLQLVRTRSLAALRRYEEVSMPEVIKAVNIAQNTAWRINKKVLDVANTITQWQHCPVADVPAMDRGEMPARPLDIDTNEIALKAWKKEASAFYRKDKARVSRRLSMEFMLSQANKFANEKAIWFPQNMDWRGRVYAVPMFNPQGNDMTKGLLTFAQEKPIGEDGFYWLKIHGANTAGVDKVPFPQRIKFVEDNHTNIMECAKAPLENTWWAEQDSPFCFLAFCFEYAGVINHGLSYNCSLPLAFDGSCSGIQHFSAMLRDEIGGKAVNLLPSAEYQDIYRIVSDKVNEVLKQDLINGTSTTVETVTDKKTGEITQRTKYGTKVMAQWWLEHGVNRGVTKRSVMTLVYGSKEFGFRDQVLSDTIQPAIDNGKGDMFLNPNQAAGYMAKLIWNAVSGTVVAAVEAMNWLKSAAKLLAAEVKDPKTDTVLRGRCAVHWVTPDGFPVWQEYKKPIQTRLNLMFLGQFRLQPTINTNKDSEIDAHKQESGIAPNFVHSQDGNHLRMTVVWAHEKYGIESFALIHDSFGTIPADAANLFKAVRETMVSTYESCDVLADFYDQFADQLHESQLDKMPALPAKGNLNLRDILKSDFAFA

SEQ ID NO: 849 - DNA, 2670 bp, synthetic construct
  misc_feature 1..2670: note = Variant of RNA polymerase
  source 1..2670: mol_type = other DNA
atgcaccatcaccatcaccatatgaacacgattaacattgctaagaacgacttctctgacatcgaactggctgctatcccgttcaacactctggctgaccattacggtgagcgtttagctcgcgaacagttggcccttgagcatgagtcttacgagatgggtgaagcacgcttccgcaagatgtttgagcgtcaacttaaagctggtgaggttgcggataacgctgccgccaagcctctcatcactaccctactccctaagatgattgcacgcatcaacgactggtttgaggaagtgaaagctaagcgcggcaagcgcccgacagccttccagttcctgcaagaaatcaagccggaagccgtagcgtacatcaccattaagaccactctggcttgcctaaccagtgcggacaatacaaccgttcaggctgtagcaagcgcaatcggtcgggccattgaggacgaggctcgcttcggtcgtatccgtgaccttgaagctaagcacttcaagaaaaacgttgaggaacaactcaacaagcgcgtagggcacgtctacaagaaagcatttatgcaagttgtcgaggctgacatgtcgtctaagggtctactcggtggcgaggcgtggtcttcgtggcataaggaagactctattcatgtaggagtacgctgcatcgagatgctcattgagtcaaccggaatggttagcttacaccgccaaaatgctggcgtagtaggtcaagactctgagactatcgaactcgcacctgaatacgctgaggctatcgcaacccgtgcaggtgcgctggctggcatctctccgatgttccaaccttgcgtagttcctcctaagccgtggactggcattactggtggtggctattgggctgcggggcgcaaacccctgcagttagtacgtactcgcagtctggcggcgcttcgccgctatgaagaagtgtcgatgccggaggtcatcaaagcagtcaacattgcgcagaatacagcatggcgtattaacaagaaagttctcgacgtagcgaatgcaatcacccaatggcagcactgtccagtcgcggatgtgcctgcgatggatcgtggcgaaatgccagctcgtccgttggacatcgataccaacgagattgcacttaaagcgtggaagaaagaagcttccgcgttctaccgcaaagacaaagcacgcgttagccgtcgtctgtcaatggagtttatgttatctcaggcgaacaagtttgcgaattataacgcaatctggtttccgcaaaacatggattggcgtgggcgcgtgtacgctgtcccgatgttcaatcctcagggcaacgatatgacgaaaggcctgctgacctttgcgcaggagaaacccattggtgaagacggcttctattggctcaagattcatggcgcaaatacagctggagtggataaagtaccgtttccacaacgcatcaaatttgttgaggataaccatacgaatattatggaatgcgcgaaagcaccgctggaaaacacttggtgggcggaacaggactcgccgttctgttttctggcgttctgctttgagtatgctggcgtcatcaatcacggtctgtcgtacaactgtagcttgcctctggcatttgatggtagttgctccggcattcaacatttctcagcgatgttacgcgacgaaattggcggcaaagctgtgaatctcctcccatctgcggaataccaggatatttatcgtatcgtcagcgacaaagttaacgaggtactgaaacaagatctgattaacggtacctctaccaccgtggaaacggtgactgataagaagacaggcgaaattacccaacgcacgaaatacgggaccaaagttatggcacagtggtggttagaacacggtgtgaatcgtggcgtcacgaaacgctcggttatgactttggtgtatgggagcaaagagtttggattccgcgatcaagtgctgagtgacaccattcaaccggcgatcgataacggcaaaggtgacatgtttctgaatccgaatcaggctgctggttacatggcgaaactgatctggaacgcagtgtccgggaccgtagtcgcagcagttgaggcgatgaactggctgaaaagtgcggcgaaattacttgctgctgaagtgaaggatcctaagacggatacagttctgcgtggccgctgcgcagtacattgggtgactcccgacggcttccctgtgtggcaggaatacaagaagcctattcagacgcgcttgaacctgatgttcctcggtcagttccgcttacagcctaccattaacaccaacaaagatagcgagattgatgcacacaaacaggagtctggtatcgctcctaactttgtacacagccaagacggtaaccaccttcgtatgactgtagtgtgggcacacgagaagtacggaatcgaatcttttgcactgattcacgactccttcggtaccattccggctgacgctgcgaacctgttcaaagcagtgcgcgaaactatggtttcgacatatgagtcttgtgatgtactggctgatttctacgaccagttcgctgaccagttgcacgagtctcaattggacaaaatgccagcacttccggctaaaggtaacttgaacctccgtgacatcttaaaatcggacttcgcgttcgcg

SEQ ID NO: 850 - protein, 890 aa, synthetic construct
  REGION 1..890: note = Variant of RNA polymerase
MHHHHHHMNTINIAKNDFSDIELAAIPFNTLADHYGERLAREQLALEHESYEMGEARFRKMFERQLKAGEVADNAAAKPLITTLLPKMIARINDWFEEVKAKRGKRPTAFQFLQEIKPEAVAYITIKTTLACLTSADNTTVQAVASAIGRAIEDEARFGRIRDLEAKHFKKNVEEQLNKRVGHVYKKAFMQVVEADMSSKGLLGGEAWSSWHKEDSIHVGVRCIEMLIESTGMVSLHRQNAGVVGQDSETIELAPEYAEAIATRAGALAGISPMFQPCVVPPKPWTGITGGGYWAAGRKPLQLVRTRSLAALRRYEEVSMPEVIKAVNIAQNTAWRINKKVLDVANAITQWQHCPVADVPAMDRGEMPARPLDIDTNEIALKAWKKEASAFYRKDKARVSRRLSMEFMLSQANKFANYNAIWFPQNMDWRGRVYAVPMFNPQGNDMTKGLLTFAQEKPIGEDGFYWLKIHGANTAGVDKVPFPQRIKFVEDNHTNIMECAKAPLENTWWAEQDSPFCFLAFCFEYAGVINHGLSYNCSLPLAFDGSCSGIQHFSAMLRDEIGGKAVNLLPSAEYQDIYRIVSDKVNEVLKQDLINGTSTTVETVTDKKTGEITQRTKYGTKVMAQWWLEHGVNRGVTKRSVMTLVYGSKEFGFRDQVLSDTIQPAIDNGKGDMFLNPNQAAGYMAKLIWNAVSGTVVAAVEAMNWLKSAAKLLAAEVKDPKTDTVLRGRCAVHWVTPDGFPVWQEYKKPIQTRLNLMFLGQFRLQPTINTNKDSEIDAHKQESGIAPNFVHSQDGNHLRMTVVWAHEKYGIESFALIHDSFGTIPADAANLFKAVRETMVSTYESCDVLADFYDQFADQLHESQLDKMPALPAKGNLNLRDILKSDFAFA

SEQ ID NO: 851 - DNA, 2670 bp, synthetic construct
  misc_feature 1..2670: note = Variant of RNA polymerase
  source 1..2670: mol_type = other DNA
atgcaccatcaccatcaccatatgaacacgattaacattgctaagaacgacttctctgacatcgaactggctgctatcccgttcaacactctggctgaccattacggtgagcgtttagctcgcgaacagttggcccttgagcatgagtcttacgagatgggtgaagcacgcttccgcaagatgtttgagcgtcaacttaaagctggtgaggttgcggataacgctgccgccaagcctctcatcactaccctactccctaagatgattgcacgcatcaacgactggtttgaggaagtgaaagctaagcgcggcaagcgcccgacagccttccagttcctgcaagaaatcaagccggaagccgtagcgtacatcaccattaagaccactctggcttgcctaaccagtgcggacaatacaaccgttcaggctgtagcaagcgcaatcggtcgggccattgaggacgaggctcgcttcggtcgtatccgtgaccttgaagctaagcacttcaagaagaacgttgaggaacaactcaacaagcgcgtagggcacgtctacaagaaagcatttatgcaagttgtcgaggctgacatgctctctaagggtctactcggtggcgaggcgtggtcttcgtggcataaggaagactctattcatgtaggagtacgctgcatcgagatgctcattgagtcaaccggaatggttagcttacaccgccaaaatgctggcgtagtaggtcaagactctgagactatcgaactcgcacctgaatacgctgaggctatcgcaacccgtgcaggtgcgctggctggcatctctccgatgttccaaccttgcgtagttcctcctaagccgtggactggcattactggtggtggctattgggctgcggggcgcaaacccctgcagttagtacgtactcgcagtctggcggcgcttcgccgctatgaagaagtgtcgatgccggaggtcatcaaagcagtcaacattgcgcagaatacagcatggcgtattaacaagaaagttctcgacgtagcgaataccatcacccaatggcagcactgtccagtcgcggatgtgcctgcgatggatcgtggcgaaatgccagctcgtccgttggacatcgataccaacgagattgcacttaaagcgtggaagaaagaagcttccgcgttctaccgcaaagacaaagcacgcgttagccgtcgtctgtcaatggagtttatgttatctcaggcgaacaagtttgcgaattataaagcaatctggtttccgcaaaacatggattggcgtgggcgcgtgtacgctgtcccgatgttcaatcctcagggcaacgatatgacgaaaggcctgctgacctttgcgcaggagaaacccattggtgaagacggcttctattggctcaagattcatggcgcaaatacagctggagtggataaagtaccgtttccacaacgcatcaaatttgttgaggataaccatacgaatattatggaatgcgcgaaagcaccgctggaaaacacttggtgggcggaacaggactcgccgttctgttttctggcgttctgctttgagtatgctggcgtcatcaatagtggtctgtcgtacaactgtagcttgcctctggcatttgatggtagttgctccggcattcaacatttctcagcgatgttacgcgacgaaattggcggcaaagctgtgaatctcctcccatctgcggaataccaggatatttatcgtatcgtcagcgacaaagttaacgaggtactgaaacaagatctgattaacggtacctctaccaccgtggaaacggtgactgataagaagacaggcgaaattacccaacgcacgaaatacgggaccaaagttatggcacagtggtggttagaacacggtgtgaatcgtggcgtcacgaaacgctcggttatgactttggtgtatgggagcaaagagtttggattccgcgatcaagtgctgagtgacaccattcaaccggcgatcgataacggcaaaggtgacatgtttctgaatccgaatcaggctgctggttacatggcgaaactgatctggaacgcagtgtccgggaccgtagtcgcagcagttgaggcgatgaactggctgaaaagtgcggcgaaattacttgctgctgaagtgaaggatcctaagacggatacagttctgcgtggccgctgcgcagtacattgggtgactcccgacggcttccctgtgtggcaggaatacaagaagcctattcagacgcgcttgaacctgatgttcctcggtcagttccgcttacagcctaccattaacaccaacaaagatagcgagattgatgcacacaaacaggagtctggtatcgctcctaactttgtacacagccaagacggtaaccaccttcgtatgactgtagtgtgggcacacgagaagtacggaatcgaatcttttgcactgattcacgactccttcggtaccattccggctgacgctgcgaacctgttcaaagcagtgcgcgaaactatggtttcgacatatgagtcttgtgatgtactggctgatttctacgaccagttcgctgaccagttgcacgagtctcaattggacaaaatgccagcacttccggctaaaggtaacttgaacctccgtgacatcttaaaatcggacttcgcgttcgcg

SEQ ID NO: 852 - protein, 890 aa, synthetic construct
  REGION 1..890: note = Variant of RNA polymerase
MHHHHHHMNTINIAKNDFSDIELAAIPFNTLADHYGERLAREQLALEHESYEMGEARFRKMFERQLKAGEVADNAAAKPLITTLLPKMIARINDWFEEVKAKRGKRPTAFQFLQEIKPEAVAYITIKTTLACLTSADNTTVQAVASAIGRAIEDEARFGRIRDLEAKHFKKNVEEQLNKRVGHVYKKAFMQVVEADMLSKGLLGGEAWSSWHKEDSIHVGVRCIEMLIESTGMVSLHRQNAGVVGQDSETIELAPEYAEAIATRAGALAGISPMFQPCVVPPKPWTGITGGGYWAAGRKPLQLVRTRSLAALRRYEEVSMPEVIKAVNIAQNTAWRINKKVLDVANTITQWQHCPVADVPAMDRGEMPARPLDIDTNEIALKAWKKEASAFYRKDKARVSRRLSMEFMLSQANKFANYKAIWFPQNMDWRGRVYAVPMFNPQGNDMTKGLLTFAQEKPIGEDGFYWLKIHGANTAGVDKVPFPQRIKFVEDNHTNIMECAKAPLENTWWAEQDSPFCFLAFCFEYAGVINSGLSYNCSLPLAFDGSCSGIQHFSAMLRDEIGGKAVNLLPSAEYQDIYRIVSDKVNEVLKQDLINGTSTTVETVTDKKTGEITQRTKYGTKVMAQWWLEHGVNRGVTKRSVMTLVYGSKEFGFRDQVLSDTIQPAIDNGKGDMFLNPNQAAGYMAKLIWNAVSGTVVAAVEAMNWLKSAAKLLAAEVKDPKTDTVLRGRCAVHWVTPDGFPVWQEYKKPIQTRLNLMFLGQFRLQPTINTNKDSEIDAHKQESGIAPNFVHSQDGNHLRMTVVWAHEKYGIESFALIHDSFGTIPADAANLFKAVRETMVSTYESCDVLADFYDQFADQLHESQLDKMPALPAKGNLNLRDILKSDFAFA

SEQ ID NO: 853 - DNA, 2670 bp, synthetic construct
  misc_feature 1..2670: note = Variant of RNA polymerase
  source 1..2670: mol_type = other DNA
atgcaccatcaccatcaccatatgaacacgattaacattgctaagaacgacttctctgacatcgaactggctgctatcccgttcaacactctggctgaccattacggtgagcgtttagctcgcgaacagttggcccttgagcatgagtcttacgagatgggtgaagcacgcttccgcaagatgtttgagcgtcaacttaaagctggtgaggttgcggataacgctgccgccaagcctctcatcactaccctactccctaagatgattgcacgcatcaacgactggtttgaggaagtgaaagctaagcgcggcaagcgcccgacagccttccagttcctgcaagaaatcaagccggaagccgtagcgtacatcaccattaagaccactctggcttgcctaaccagtgcggacaatacaaccgttcaggctgtagcaagcgcaatcggtcgggccattgaggacgaggctcgcttcggtcgtatccgtgaccttgaagctaagcacttcaagaagaacgttgaggaacaactcaacaagcgcgtagggcacgtgtacaagaaagcatttatgcaagttgtcgaggctgacatgctctctacgggtctactcggtggcgaggcgtggtcttcgtggcataaggaagactctattcatgtaggagtacgctgcatcgagatgctcattgagtcaaccggaatggttagcttacaccgccaaaatgctggcgtagtaggtcaagactctgagactatcgaactcgcacctgaatacgctgaggctatcgcaacccgtgcaggtgcgctggctggcatctctccgatgttccaaccttgcgtagttcctcctaagccgtggactggcattactggtggtggctattgggctgcggggcgcaaacccctgcagttagtacgtactcgcagtctggcggcgcttcgccgctatgaagaagtgtcgatgccggaggtcatcaaagcagtcaacattgcgcagaatacagcatggcgtattaacaagaaagttctcgacgtagcgaatgccatcacccaatggcagcactgtccagtcgcggatgtgcctgcgatggatcgtggcgaaatgccagctcgtccgttggacatcgataccaacgagattgcacttaaagcgtggaagaaagaagcttccgcgttctaccgcaaagacaaagcacgcgttagccgtcgtctgtcaatggagtttatgttatctcaggcgaacaagtttgcgaattataaagcaatctggtttccgcaaaacatggattggcgtgggcgcgtgtacgctgtcccgatgttcaatcctcagggcaacgatatgacgaaaggcctgctgacctttgcgcaggagaaacccattggtgaagacggcttctattggctcaagattcatggcgcaaatacagctggagtggataaagtaccgtttccacaacgcatcaaatttgttgaggataaccatacgaatattatggaatgcgcgaaagcaccgctggaaaacacttggtgggcggaacaggactcgccgttctgttttctggcgttctgctttgagtatgctggcgtcatcaatcatggtctgtcgtacaactgtagcttgcctctggcatttgatggtagttgctccggcatccaacatttctcagcgatgttacgcgacgaaattggcggcaaagctgtgaatctcctcccatctgcggaataccaggatatttatcgtatcgtcagcgacaaagttaacgaggtactgaaacaagatctgattaacggtacctctaccaccgtggaaacggtgactgataagaagacaggcgaaattacccaacgcacgaaatacgggaccaaagttatggcacagtggtggttagaacacggtgtgaatcgtggcgtcacgaaacgctcggttatgactttggtgtatgggagcaaagagtttggattccgcgatcaagtgctgagtgacaccattcaaccggcgatcgataacggcaaaggtgacatgtttctgaatccgaatcaggctgctggttacatggcgaaactgatctggaacgcagtgtccgggaccgtagtcgcagcagttgaggcgatgaactggctgaaaagtgcggcgaaattacttgctgctgaagtgaaggatcctaagacggatacagttctgcgtggccgctgcgcagtacattgggtgactcccgacggcttccctgtgtggcaggaatacaagaagcctattcagacgcgcttgaacctgatgttcctcggtcagttccgcttacagcctaccattaacaccaacaaagatagcgagattgatgcacacaaacaggagtctggtatcgctcctaactttgtacacagccaagacggtaaccaccttcgtatgactgtagtgtgggcacacgagaagtacggaatcgaatcttttgcactgattcacgactccttcggtaccattccggctgacgctgcgaacctgttcaaagcagtgcgcgaaactatggtttcgacatatgagtcttgtgatgtactggctgatttctacgaccagttcgctgaccagttgcacgagtctcaattggacaaaatgccagcacttccggctaaaggtaacttgaacctccgtgacatcttaaaatcggacttcgcgttcgcg

SEQ ID NO: 854 - protein, 890 aa, synthetic construct
  REGION 1..890: note = Variant of RNA polymerase
MHHHHHHMNTINIAKNDFSDIELAAIPFNTLADHYGERLAREQLALEHESYEMGEARFRKMFERQLKAGEVADNAAAKPLITTLLPKMIARINDWFEEVKAKRGKRPTAFQFLQEIKPEAVAYITIKTTLACLTSADNTTVQAVASAIGRAIEDEARFGRIRDLEAKHFKKNVEEQLNKRVGHVYKKAFMQVVEADMLSTGLLGGEAWSSWHKEDSIHVGVRCIEMLIESTGMVSLHRQNAGVVGQDSETIELAPEYAEAIATRAGALAGISPMFQPCVVPPKPWTGITGGGYWAAGRKPLQLVRTRSLAALRRYEEVSMPEVIKAVNIAQNTAWRINKKVLDVANAITQWQHCPVADVPAMDRGEMPARPLDIDTNEIALKAWKKEASAFYRKDKARVSRRLSMEFMLSQANKFANYKAIWFPQNMDWRGRVYAVPMFNPQGNDMTKGLLTFAQEKPIGEDGFYWLKIHGANTAGVDKVPFPQRIKFVEDNHTNIMECAKAPLENTWWAEQDSPFCFLAFCFEYAGVINHGLSYNCSLPLAFDGSCSGIQHFSAMLRDEIGGKAVNLLPSAEYQDIYRIVSDKVNEVLKQDLINGTSTTVETVTDKKTGEITQRTKYGTKVMAQWWLEHGVNRGVTKRSVMTLVYGSKEFGFRDQVLSDTIQPAIDNGKGDMFLNPNQAAGYMAKLIWNAVSGTVVAAVEAMNWLKSAAKLLAAEVKDPKTDTVLRGRCAVHWVTPDGFPVWQEYKKPIQTRLNLMFLGQFRLQPTINTNKDSEIDAHKQESGIAPNFVHSQDGNHLRMTVVWAHEKYGIESFALIHDSFGTIPADAANLFKAVRETMVSTYESCDVLADFYDQFADQLHESQLDKMPALPAKGNLNLRDILKSDFAFA

SEQ ID NO: 855 - DNA, 2670 bp, synthetic construct
  misc_feature 1..2670: note = Variant of RNA polymerase
  source 1..2670: mol_type = other DNA
atgcaccatcaccatcaccatatgaacacgattaacattgctaagaacgacttctctgacatcgaactggctgctatcccgttcaacactctggctgaccattacggtgagcgtttagctcgcgaacagttggcccttgagcatgagtcttacgagatgggtgaagcacgcttccgcaagatgtttgagcgtcaacttaaagctggtgaggttgcggataacgctgccgccaagcctctcatcactaccctactccctaagatgattgcacgcatcaacgactggtttgaggaagtgaaagctaagcgcggcaagcgcccgacagccttccagttcctgcaagaaatcaagccggaagccgtagcgtacatcaccattaagaccactctggcttgcctaaccagtgcggacaatacaaccgttcaggctgtagcaagcgcaatcggtcgggccattgaggacgaggctcgcttcggtcgtatccgtgaccttgaagctaagcacttcaagaaaaacgttgaggaacaactcaacaagcgcgtagggcacgtctacaagaaagcatttatgcaagttgtcgaggctgacatgctctctaagggtctactcggtggcgaggcgtggtcttcgtggcataaggaagactctattcatgtaggagtacgctgcatcgagatgctcattgagtcaaccggaatggttagcttacaccgccaaaatgctggcgtagtaggtcaagactctgagactatcgaactcgcacctgaatacgctgaggctatcgcaacccgtgcaggtgcgctggctggcatctctccgatgttccaaccttgcgtagttcctcctaagccgtggactggcattactggtggtggctattgggctgcggggcgcaaacccctgcagttagtacgtactcgcagtctggcggcgcttcgccgctatgaagaagtgtcgatgccggaggtcatcaaagcagtcaacattgcgcagaatacagcatggcgtattaacaagaaagttctcgacgtagcgaatgcaatcacccaatggcagcactgtccagtcgcggatgtgcctgcgatggatcgtggcgaaatgccagctcgtccgttggacatcgataccaacgagattgcacttaaagcgtggaagaaagaagcttccgcgttctaccgcaaagacaaagcacgcgttagccgtcgtctgtcaatggagtttatgttatctcaggcgaacaagtttgcgaattataaagcaatctggtttccgcaaaacatggattggcgtgggcgcgtgtacgctgtcccgatgttcaatcctcagggcaacgatatgacgaaaggcctgctgacctttgcgcaggagaaacccattggtgaagacggcttctattggctcaagattcatggcgcaaatacagctggagtggataaagtaccgtttccacaacgcatcaaatttgttgaggataaccatacgaatattatggaatgcgcgaaagcaccgctggaaaacacttggtgggcggaacaggactcgccgttctgttttctggcgttctgctttgagtatgctggcgtcatcaatagtggtctgtcgtacaactgtagcttgcctctggcatttgatggtagttgctccggcatccaacatttctcagcgatgttacgcgacgaaattggcggcaaagctgtgaatctcctcccatctgcggaataccaggatatttatcgtatcgtcagcgacaaagttaacgaggtactgaaacaagatctgattaacggtacctctaccaccgtggaaacggtgactgataagaagacaggcgaaattacccaacgcacgaaatacgggaccaaagttatggcacagtggtggttagaacacggtgtgaatcgtggcgtcacgaaacgctcggttatgactttggtgtatgggagcaaagagtttggattccgcgatcaagtgctgagtgacaccattcaaccggcgatcgataacggcaaaggtgacatgtttctgaatccgaatcaggctgctggttacatggcgaaactgatctggaacgcagtgtccgggaccgtagtcgcagcagttgaggcgatgaactggctgaaaagtgcggcgaaattacttgctgctgaagtgaaggatcctaagacggatacagttctgcgtggccgctgcgcagtacattgggtgactcccgacggcttccctgtgtggcaggaatacaagaagcctattcagacgcgcttgaacctgatgttcctcggtcagttccgcttacagcctaccattaacaccaacaaagatagcgagattgatgcacacaaacaggagtctggtatcgctcctaactttgtacacagccaagacggtaaccaccttcgtatgactgtagtgtgggcacacgagaagtacggaatcgaatcttttgcactgattcacgactccttcggtaccattccggctgacgctgcgaacctgttcaaagcagtgcgcgaaactatggtttcgacatatgagtcttgtgatgtactggctgatttctacgaccagttcgctgaccagttgcacgagtctcaattggacaaaatgccagcacttccggctaaaggtaacttgaacctccgtgacatcttaaaatcggacttcgcgttcgcg

SEQ ID NO: 856 - protein, 890 aa, synthetic construct
  REGION 1..890: note = Variant of RNA polymerase
MHHHHHHMNTINIAKNDFSDIELAAIPFNTLADHYGERLAREQLALEHESYEMGEARFRKMFERQLKAGEVADNAAAKPLITTLLPKMIARINDWFEEVKAKRGKRPTAFQFLQEIKPEAVAYITIKTTLACLTSADNTTVQAVASAIGRAIEDEARFGRIRDLEAKHFKKNVEEQLNKRVGHVYKKAFMQVVEADMLSKGLLGGEAWSSWHKEDSIHVGVRCIEMLIESTGMVSLHRQNAGVVGQDSETIELAPEYAEAIATRAGALAGISPMFQPCVVPPKPWTGITGGGYWAAGRKPLQLVRTRSLAALRRYEEVSMPEVIKAVNIAQNTAWRINKKVLDVANAITQWQHCPVADVPAMDRGEMPARPLDIDTNEIALKAWKKEASAFYRKDKARVSRRLSMEFMLSQANKFANYKAIWFPQNMDWRGRVYAVPMFNPQGNDMTKGLLTFAQEKPIGEDGFYWLKIHGANTAGVDKVPFPQRIKFVEDNHTNIMECAKAPLENTWWAEQDSPFCFLAFCFEYAGVINSGLSYNCSLPLAFDGSCSGIQHFSAMLRDEIGGKAVNLLPSAEYQDIYRIVSDKVNEVLKQDLINGTSTTVETVTDKKTGEITQRTKYGTKVMAQWWLEHGVNRGVTKRSVMTLVYGSKEFGFRDQVLSDTIQPAIDNGKGDMFLNPNQAAGYMAKLIWNAVSGTVVAAVEAMNWLKSAAKLLAAEVKDPKTDTVLRGRCAVHWVTPDGFPVWQEYKKPIQTRLNLMFLGQFRLQPTINTNKDSEIDAHKQESGIAPNFVHSQDGNHLRMTVVWAHEKYGIESFALIHDSFGTIPADAANLFKAVRETMVSTYESCDVLADFYDQFADQLHESQLDKMPALPAKGNLNLRDILKSDFAFA

SEQ ID NO: 857 - DNA, 2670 bp, synthetic construct
  misc_feature 1..2670: note = Variant of RNA polymerase
  source 1..2670: mol_type = other DNA
atgcaccatcaccatcaccatatgaacacgattaacattgctaagaacgacttctctgacatcgaactggctgctatcccgttcaacactctggctgaccattacggtgagcgtttagctcgcgaacagttggcccttgagcatgagtcttacgagatgggtgaagcacgcttccgcaagatgtttgagcgtcaacttaaagctggtgaggttgcggataacgctgccgccaagcctctcatcactaccctactccctaagatgattgcacgcatcaacgactggtttgaggaagtgaaagctaagcgcggcaagcgcccgacagccttccagttcctgcaagaaatcaagccggaagccgtagcgtacatcaccattaagaccactctggcttgcctaaccagtgcggacaatacaaccgttcaggctgtagcaagcgcaatcggtcgggccattgaggacgaggctcgcttcggtcgtatccgtgaccttgaagctaagcacttcaagggcaacgttgaggaacaactcaacaagcgcgtagggcacccgtacaagaaagcatttatgcaagttgtcgaggctgacatgctctctaagggtctactcggtggcgaggcgtggtcttcgtggcataaggaagactctattcatgtaggagtacgctgcatcgagatgctcattgagtcaaccggaatggttagcttacaccgccaaaatgctggcgtagtaggtcaagactctgagactatcgaactcgcacctgaatacgctgaggctatcgcaacccgtgcaggtgcgctggctggcatctctccgatgttccaaccttgcgtagttcctcctaagccgtggactggcattactggtggtggctattgggctgcggggcgcaaacccctgcagttagtacgtactcgcagtctggcggcgcttcgccgctatgaagaagtgtcgatgccggaggtcatcaaagcagtcaacattgcgcagaatacagcatggcgtattaacaagaaagttctcgacgtagcgaatgcaatcacccaatggcagcactgtccagtcgcggatgtgcctgcgatggatcgtggcgaaatgccagctcgtccgttggacatcgataccaacgagattgcacttaaagcgtggaagaaagaagcttccgcgttctaccgcaaagacaaagcacgcgttagccgtcgtctgtcaatggagtttatgttatctcaggcgaacaagtttgcgaattataaagcaatctggtttccgcaaaacatggattggcgtgggcgcgtgtacgctgtcccgatgttcaatcctcagggcaacgatatgacgaaaggcctgctgacctttgcgcaggagaaacccattggtgaagacggcttctattggctcaagattcatggcgcaaatacagctggagtggataaagtaccgtttccacaacgcatcaaatttgttgaggataaccatacgaatattatggaatgcgcgaaagcaccgctggaaaacacttggtgggcggaacaggactcgccgttctgttttctggcgttctgctttgagtatgctggcgtcatcaatcatggtctgtcgtacaactgtagcttgcctctggcatttgatggtagttgctccggcatccaacatttctcagcgatgttacgcgacgaaattggcggcaaagctgtgaatctcctcccatctgcggaataccaggatatttatcgtatcgtcagcgacaaagttaacgaggtactgaaacaagatctgattaacggtacctctaccaccgtggaaacggtgactgataagaagacaggcgaaattacccaacgcacgaaatacgggaccaaagttatggcacagtggtggttagaacacggtgtgaatcgtggcgtcacgaaacgctcggttatgactttggtgtatgggagcaaagagtttggattccgcgatcaagtgctgagtgacaccattcaaccggcgatcgataacggcaaaggtgacatgtttctgaatccgaatcaggctgctggttacatggcgaaactgatctggaacgcagtgtccgggaccgtagtcgcagcagttgaggcgatgaactggctgaaaagtgcggcgaaattacttgctgctgaagtgaaggatcctaagacggatacagttctgcgtggccgctgcgcagtacattgggtgactcccgacggcttccctgtgtggcaggaatacaagaagcctattcagacgcgcttgaacctgatgttcctcggtcagttccgcttacagcctaccattaacaccaacaaagatagcgagattgatgcacacaaacaggagtctggtatcgctcctaactttgtacacagccaagacggtaaccaccttcgtatgactgtagtgtgggcacacgagaagtacggaatcgaatcttttgcactgattcacgactccttcggtaccattccggctgacgctgcgaacctgttcaaagcagtgcgcgaaactatggtttcgacatatgagtcttgtgatgtactggctgatttctacgaccagttcgctgaccagttgcacgagtctcaattggacaaaatgccagcacttccggctaaaggtaacttgaacctccgtgacatcttaaaatcggacttcgcgttcgcg

SEQ ID NO: 858 - protein, 890 aa, synthetic construct
  REGION 1..890: note = Variant of RNA polymerase
MHHHHHHMNTINIAKNDFSDIELAAIPFNTLADHYGERLAREQLALEHESYEMGEARFRKMFERQLKAGEVADNAAAKPLITTLLPKMIARINDWFEEVKAKRGKRPTAFQFLQEIKPEAVAYITIKTTLACLTSADNTTVQAVASAIGRAIEDEARFGRIRDLEAKHFKGNVEEQLNKRVGHPYKKAFMQVVEADMLSKGLLGGEAWSSWHKEDSIHVGVRCIEMLIESTGMVSLHRQNAGVVGQDSETIELAPEYAEAIATRAGALAGISPMFQPCVVPPKPWTGITGGGYWAAGRKPLQLVRTRSLAALRRYEEVSMPEVIKAVNIAQNTAWRINKKVLDVANAITQWQHCPVADVPAMDRGEMPARPLDIDTNEIALKAWKKEASAFYRKDKARVSRRLSMEFMLSQANKFANYKAIWFPQNMDWRGRVYAVPMFNPQGNDMTKGLLTFAQEKPIGEDGFYWLKIHGANTAGVDKVPFPQRIKFVEDNHTNIMECAKAPLENTWWAEQDSPFCFLAFCFEYAGVINHGLSYNCSLPLAFDGSCSGIQHFSAMLRDEIGGKAVNLLPSAEYQDIYRIVSDKVNEVLKQDLINGTSTTVETVTDKKTGEITQRTKYGTKVMAQWWLEHGVNRGVTKRSVMTLVYGSKEFGFRDQVLSDTIQPAIDNGKGDMFLNPNQAAGYMAKLIWNAVSGTVVAAVEAMNWLKSAAKLLAAEVKDPKTDTVLRGRCAVHWVTPDGFPVWQEYKKPIQTRLNLMFLGQFRLQPTINTNKDSEIDAHKQESGIAPNFVHSQDGNHLRMTVVWAHEKYGIESFALIHDSFGTIPADAANLFKAVRETMVSTYESCDVLADFYDQFADQLHESQLDKMPALPAKGNLNLRDILKSDFAFA

SEQ ID NO: 859 - DNA, 2670 bp, synthetic construct
  misc_feature 1..2670: note = Variant of RNA polymerase
  source 1..2670: mol_type = other DNA
atgcaccatcaccatcaccatatgaacacgattaacattgctaagaacgacttctctgacatcgaactggctgctatcccgttcaacactctggctgaccattacggtgagcgtttagctcgcgaacagttggcccttgagcatgagtcttacgagatgggtgaagcacgcttccgcaagatgtttgagcgtcaacttaaagctggtgaggttgcggataacgctgccgccaagcctctcatcactaccctactccctaagatgattgcacgcatcaacgactggtttgaggaagtgaaagctaagcgcggcaagcgcccgacagccttccagttcctgcaagaaatcaagccggaagccgtagcgtacatcaccattaagaccactctggcttgcctaaccagtgcggacaatacaaccgttcaggctgtagcaagcgcaatcggtcgggccattgaggacgaggctcgcttcggtcgtatccgtgaccttgaagctaagcacgtcaagaaaaacgttgaggaacaactcaacaagcgcgtagggcacgtctacaagaaagcatttatgcaagttgtcgaggctgacatgctctctaagggtctactcggtggcgaggcgtggtcttcgtggcataaggaagactctattcatgtaggagtacgctgcatcgagatgctcattgagtcaaccggaatggttagcttacaccgccaaaatgctggcgtagtaggtcaagactctgagactatcgaactcgcacctgaatacgctgaggctatcgcaacccgtgcaggtgcgctggctggcatctctccgatgttccaaccttgcgtagttcctcctaagccgtggactggcattactggtggtggctattgggctgcggggcgcaaacccctgcagttagtacgtactcgcagtctggcggcgcttcgccgctatgaagaagtgtcgatgccggaggtcatcaaagcagtcaacattgcgcagaatacagcatggcgtattaacaagaaagttctcgacgtagcgaatgcaatcacccaatggcagcactgtccagtcgcggatgtgcctgcgatggatcgtggcgaaatgccagctcgtccgttggacatcgataccaacgagattgcacttaaagcgtggaagaaagaagcttccgcgttctaccgcaaagacaaagcacgcgttagccgtcgtctgtcaatggagtttatgttatctcaggcgaacaagtttgcgaattataaagcaatctggtttccgcaaaacatggattggcgtgggcgcgtgtacgctgtcccgatgttcaatcctcagggcaacgatatgacgaaaggcctgctgacctttgcgcaggagaaacccattggtgaagacggcttctattggctcaagattcatggcgcaaatacagctggagtggataaagtaccgtttccacaacgcatcaaatttgttgaggataaccatacgaatattatggaatgcgcgaaagcaccgctggaaaacacttggtgggcggaacaggactcgccgttctgttttctggcgttctgctttgagtatgctggcgtcatcaatcacggtctgtcgtacaactgtagcttgcctctggcatttgatggtagttgctccggcattcaacatttctcagcgatgttacgcgacgaaattggcggcaaagctgtgaatctcctcccatctgcggaataccaggatatttatcgtatcgtcagcgacaaagttaacgaggtgctgaaacaagatctgattaacggtacctctaccaccgtggaaacggtgactgataagaagacaggcgaaattacccaacgcacgaaatacgggaccaaagttatggcacagtggtggttagaacacggtgtgaatcgtggcgtcacgaaacgctcggttatgactttggtgtatgggagcaaagagtttggattccgcgatcaagtgctgagtgacaccattcaaccggcgatcgataacggcaaaggtgacatgtttctgaatccgaatcaggctgctggttacatggcgaaactgatctggaacgcagtgtccgggaccgtagtcgcagcagttgaggcgatgaactggctgaaaagtgcggcgaaattacttgctgctgaagtgaaggatccaaagacggacacagttctgcgtggccgctgcgcagtacattgggtgactcccgacggcttccctgtgtggcaggaatacaagaagcctattcagacgcgcttgaacctgatgttcctcggtcagttccgcttacagcctaccattaacaccaacaaagatagcgagattgatgcacacaaacaggagtctggtatcgctcctaactttgtacacagccaagacggtaaccaccttcgtatgactgtagtgtgggcacacgagaagtacggaatcgaatcttttgcactgattcacgactccttcggtaccattccggctgacgctgcgaacctgttcaaagcagtgcgcgaaactatggtttcgacatatgagtcttgtgatgtactggctgatttctacgaccagttcgctgaccagttgcacgagtctcaattggacaaaatgccagcacttccggctaaaggtaacttgaacctccgtgacatcttaaaatcggacttcgcgttcgcg

SEQ ID NO: 860 - protein, 890 aa, synthetic construct
  REGION 1..890: note = Variant of RNA polymerase
MHHHHHHMNTINIAKNDFSDIELAAIPFNTLADHYGERLAREQLALEHESYEMGEARFRKMFERQLKAGEVADNAAAKPLITTLLPKMIARINDWFEEVKAKRGKRPTAFQFLQEIKPEAVAYITIKTTLACLTSADNTTVQAVASAIGRAIEDEARFGRIRDLEAKHVKKNVEEQLNKRVGHVYKKAFMQVVEADMLSKGLLGGEAWSSWHKEDSIHVGVRCIEMLIESTGMVSLHRQNAGVVGQDSETIELAPEYAEAIATRAGALAGISPMFQPCVVPPKPWTGITGGGYWAAGRKPLQLVRTRSLAALRRYEEVSMPEVIKAVNIAQNTAWRINKKVLDVANAITQWQHCPVADVPAMDRGEMPARPLDIDTNEIALKAWKKEASAFYRKDKARVSRRLSMEFMLSQANKFANYKAIWFPQNMDWRGRVYAVPMFNPQGNDMTKGLLTFAQEKPIGEDGFYWLKIHGANTAGVDKVPFPQRIKFVEDNHTNIMECAKAPLENTWWAEQDSPFCFLAFCFEYAGVINHGLSYNCSLPLAFDGSCSGIQHFSAMLRDEIGGKAVNLLPSAEYQDIYRIVSDKVNEVLKQDLINGTSTTVETVTDKKTGEITQRTKYGTKVMAQWWLEHGVNRGVTKRSVMTLVYGSKEFGFRDQVLSDTIQPAIDNGKGDMFLNPNQAAGYMAKLIWNAVSGTVVAAVEAMNWLKSAAKLLAAEVKDPKTDTVLRGRCAVHWVTPDGFPVWQEYKKPIQTRLNLMFLGQFRLQPTINTNKDSEIDAHKQESGIAPNFVHSQDGNHLRMTVVWAHEKYGIESFALIHDSFGTIPADAANLFKAVRETMVSTYESCDVLADFYDQFADQLHESQLDKMPALPAKGNLNLRDILKSDFAFA

SEQ ID NO: 861 - DNA, 2670 bp, synthetic construct
  misc_feature 1..2670: note = Variant of RNA polymerase
  source 1..2670: mol_type = other DNA
atgcaccatcaccatcaccatatgaacacgattaacattgctaagaacgacttctctgacatcgaactggctgctatcccgttcaacactctggctgaccattacggtgagcgtttagctcgcgaacagttggcccttgagcatgagtcttacgagatgggtgaagcacgcttccgcaagatgtttgagcgtcaacttaaagctggtgaggttgcggataacgctgccgccaagcctctcatcactaccctactccctaagatgattgcacgcatcaacgactggtttgaggaagtgaaagctaagcgcggcaagcgcccgacagccttccagttcctgcaagaaatcaagccggaagccgtagcgtacatcaccattaagaccactctggcttgcctaaccagtgcggacaatacaaccgttcaggctgtagcaagcgcaatcggtcgggccattgaggacgaggctcgcttcggtcgtatccgtgaccttgaagctaagcacttcaagaaaaacgttgaggaacaactcaacaagcgcgtagggcacgtctacaagaaagcactgatgcaagttgtcgaggctgacatgctctctaagggtctactcggtggcgaggcgtggtcttcgtggcataaggaagactctattcatgtaggagtacgctgcatcgagatgctcattgagtcaaccggaatggttagcttacaccgccaaaatgctggcgtagtaggtcaagactctgagactatcgaactcgcacctgaatacgctgaggctatcgcaacccgtgcaggtgcgctggctggcatctctccgatgttccaaccttgcgtagttcctcctaagccgtggactggcattactggtggtggctattgggctgcggggcgcaaacccctgcagttagtacgtactcgcagtctggcggcgcttcgccgctatgaagaagtgtcgatgccggaggtcatcaaagcagtcaacattgcgcagaatacagcatggcgtattaacaagaaagttctcgacgtagcgaatgcaatcacccaatggcagcactgtccagtcgcggatgtgcctgcgatggatcgtggcgaaatgccagctcgtccgttggacatcgataccaacgagattgcacttaaagcgtggaagaaagaagcttccgcgttctaccgcaaagacaaagcacgcgttagccgtcgtctgtcaatggagtttatgttatctcaggcgaacaagtttgcgaatgagaacgcaatctggtttccgcaaaacatggattggcgtgggcgcgtgtacgctgtcccgatgttcaatcctcagggcaacgatatgacgaaaggcctgctgacctttgcgcaggagaaacccattggtgaagacggcttctattggctcaagattcatggcgcaaatacagctggagtggataaagtaccgtttccacaacgcatcaaatttgttgaggataaccatacgaatattatggaatgcgcgaaagcaccgctggaaaacacttggtgggcggaacaggactcgccgttctgttttctggcgttctgctttgagtatgctggcgtcatcaatcacggtctgtcgtacaactgtagcttgcctcaggcatttgatggtagttgctccggcattcaacatttctcagcgatgttacgcgacgaaattggcggcaaagctgtgaatctcctcccatctgcggaataccaggatatttatcgtatcgtcagcgacaaagttaacgaggtactgaaacaagatctgattaacggtacctctaccaccgtggaaacggtgactgataagaagacaggcgaaattacccaacgcacgaaatacgggaccaaagtaatggcacagtggtggttagaacacggtgtgaatcgtggcgtcacgaaacgctcggttatgactttggtgtatgggagcaaagagtttggattccgcgatcaagtgctgagtgacaccattcaaccggcgatcgataacggcaaaggtgacatgtttctgaatccgaatcaggctgctggttacatggcgaaactgatctggaacgcagtgtccgggaccgtagtcgcagcagttgaggcgatgaactggctgaaaagtgcggcgaaattacttgctgctgaagtgaaggatccaaagacggacacagttctgcgtggccgctgcgcagtacattgggtgactcccgacggcttccctgtgtggcaggaatacaagaagcctattcagacgcgcttgaacctgatgttcctcggtcagttccgcttacagcctaccattaacaccaacaaagatagcgagattgatgcacacaaacaggagtctggtatcgctcctaactttgtacacagccaagacggtaaccaccttcgtatgactgtagtgtgggcacacgagaagtacggaatcgaatcttttgcactgattcacgactccttcggtaccattccggctgacgctgcgaacctgttcaaagcagtgcgcgaaactatggttagcacatatgagtcttgtgatgtactggctgatttctacgaccagttcgctgaccagttgcacgagtctcaattggacaaaatgccagcacttccggctaaaggtaacttgaacctccgtgacatcttaaaatcggacttcgcgttcgcg

SEQ ID NO: 862 - protein, 890 aa, synthetic construct
  REGION 1..890: note = Variant of RNA polymerase
MHHHHHHMNTINIAKNDFSDIELAAIPFNTLADHYGERLAREQLALEHESYEMGEARFRKMFERQLKAGEVADNAAAKPLITTLLPKMIARINDWFEEVKAKRGKRPTAFQFLQEIKPEAVAYITIKTTLACLTSADNTTVQAVASAIGRAIEDEARFGRIRDLEAKHFKKNVEEQLNKRVGHVYKKALMQVVEADMLSKGLLGGEAWSSWHKEDSIHVGVRCIEMLIESTGMVSLHRQNAGVVGQDSETIELAPEYAEAIATRAGALAGISPMFQPCVVPPKPWTGITGGGYWAAGRKPLQLVRTRSLAALRRYEEVSMPEVIKAVNIAQNTAWRINKKVLDVANAITQWQHCPVADVPAMDRGEMPARPLDIDTNEIALKAWKKEASAFYRKDKARVSRRLSMEFMLSQANKFANENAIWFPQNMDWRGRVYAVPMFNPQGNDMTKGLLTFAQEKPIGEDGFYWLKIHGANTAGVDKVPFPQRIKFVEDNHTNIMECAKAPLENTWWAEQDSPFCFLAFCFEYAGVINHGLSYNCSLPQAFDGSCSGIQHFSAMLRDEIGGKAVNLLPSAEYQDIYRIVSDKVNEVLKQDLINGTSTTVETVTDKKTGEITQRTKYGTKVMAQWWLEHGVNRGVTKRSVMTLVYGSKEFGFRDQVLSDTIQPAIDNGKGDMFLNPNQAAGYMAKLIWNAVSGTVVAAVEAMNWLKSAAKLLAAEVKDPKTDTVLRGRCAVHWVTPDGFPVWQEYKKPIQTRLNLMFLGQFRLQPTINTNKDSEIDAHKQESGIAPNFVHSQDGNHLRMTVVWAHEKYGIESFALIHDSFGTIPADAANLFKAVRETMVSTYESCDVLADFYDQFADQLHESQLDKMPALPAKGNLNLRDILKSDFAFA

SEQ ID NO: 863 - DNA, 2670 bp, synthetic construct
  misc_feature 1..2670: note = Variant of RNA polymerase
  source 1..2670: mol_type = other DNA
atgcaccatcaccatcaccatatgaacacgattaacattgctaagaacgacttctctgacatcgaactggctgctatcccgttcaacactctggctgaccattacggtgagcgtttagctcgcgaacagttggcccttgagcatgagtcttacgagatgggtgaagcacgcttccgcaagatgtttgagcgtcaacttaaagctggtgaggttgcggataacgctgccgccaagcctctcatcactaccctactccctaagatgattgcacgcatcaacgactggtttgaggaagtgaaagctaagcgcggcaagcgcccgacagccttccagttcctgcaagaaatcaagccggaagccgtagcgtacatcaccattaagaccactctggcttgcctaaccagtgcggacaatacaaccgttcaggctgtagcaagcgcaatcggtcgggccattgaggacgaggctcgcttcggtcgtatccgtgaccttgaagctaagcacttcaagaaaaacgttgaggaacaactcaacaagcgcgtagggcacccgtacaagaaagcatttatgcaagttgtcgagcacgacatgctctctaagggtctactcggtggcgaggcgtggtcttcgtggcataaggaagactctattcatgtaggagtacgctgcatcgagatgctcattgagtcaaccggaatggttagcttacaccgccaaaatgctggcgtagtaggtcaagactctgagactatcgaactcgcacctgaatacgctgaggctatcgcaacccgtgcaggtgcgctggctggcatctctccgatgttccaaccttgcgtagttcctcctaagccgtggactggcattactggtggtggctattgggctgcggggcgcaaacccctgcagttagtacgtactcgcagtctggcggcgcttcgccgctatgaagaagtgtcgatgccggaggtcatcaaagcagtcaacattgcgcagaatacagcatggcgtattaacaagaaagttctcgacgtagcgaataccatcacccaatggcagcactgtccagtcgcggatgtgcctgcgatggatcgtggcgaaatgccagctcgtccgttggacatcgataccaacgagattgcacttaaagcgtggaagaaagaagcttccgcgttctaccgcaaagacaaagcacgcgttagccgtcgtctgtcaatggagtttatgttatctcaggcgaacaagtttgcgaatgaggaggcaatctggtttccgcaaaacatggattggcgtgggcgcgtgtacgctgtcccgatgttcaatcctcagggcaacgatatgacgaaaggcctgctgacctttgcgcaggagaaacccattggtgaagacggcttctattggctcaagattcatggcgcaaatacagctggagtggataaagtaccgtttccacaacgcatcaaatttgttgaggataaccatacgaatattatggaatgcgcgaaagcaccgctggaaaacacttggtgggcggaacaggactcgccgttctgttttctggcgttctgctttgagtatgctggcgtcatcaatagtggtctgtcgtacaactgtagcttgcctctggcatttgatggtagttgctccggcctgcaacatttctcagcgatgttacgcgacgaaattggcggcaaagctgtgaatctcctcccatctgcggaataccaggatatttatcgtatcgtcagcgacaaagttaacgagatgctgaaacaagatctgattaacggtacctctaccaccgtggaaacggtgactgataagaagacaggcgaaattacccaacgcacgaaatacgggaccaaagaaatggcacagtggtggttagaacacggtgtgaatcgtggcgtcacgaaacgctcggttatgactttggtgtatgggagcaaagagtttggattccgcgatcaagtgctgagtgacaccattcaaccggcgatcgataacggcaaaggtgacatgtttctgaatccgaatcaggctgctggttacatggcgaaactgatctggaacgcagtgtccgggaccgtagtcgcagcagttgaggcgatgaactggctgaaaagtgcggcgaaattacttgctgctgaagtgaaggatccaaagacgggcacagttctgcgtggccgctgcgcagtacattgggtgactcccgacggcttccctgtgtggcaggaatacaagaagcctattcagacgcgcttgaacctgatgttcctcggtcagttccgcttacagcctaccattaacaccaacaaagatagcgagattgatgcacacaaacaggagtctggtatcgctcctaactttgtacacagccaagacggtaaccaccttcgtatgactgtagtgtgggcacacgagaagtacggaatcgaatcttttgcactgattcacgactccttcggtaccattccggctgacgctgcgaacctgttcaaagcagtgcgcgaaactatggtttcgacatatgagtcttgtgatgtactggctgatttctacgaccagttcgctgaccagttgcacgagtctcaacgcgacaaaatgccagcacttccggctaaaggtaacttgaacctccgtgacatcttaaaatcggacttcgcgttcgcg

SEQ ID NO: 864 - protein, 890 aa, synthetic construct
  REGION 1..890: note = Variant of RNA polymerase
MHHHHHHMNTINIAKNDFSDIELAAIPFNTLADHYGERLAREQLALEHESYEMGEARFRKMFERQLKAGEVADNAAAKPLITTLLPKMIARINDWFEEVKAKRGKRPTAFQFLQEIKPEAVAYITIKTTLACLTSADNTTVQAVASAIGRAIEDEARFGRIRDLEAKHFKKNVEEQLNKRVGHPYKKAFMQVVEHDMLSKGLLGGEAWSSWHKEDSIHVGVRCIEMLIESTGMVSLHRQNAGVVGQDSETIELAPEYAEAIATRAGALAGISPMFQPCVVPPKPWTGITGGGYWAAGRKPLQLVRTRSLAALRRYEEVSMPEVIKAVNIAQNTAWRINKKVLDVANTITQWQHCPVADVPAMDRGEMPARPLDIDTNEIALKAWKKEASAFYRKDKARVSRRLSMEFMLSQANKFANEEAIWFPQNMDWRGRVYAVPMFNPQGNDMTKGLLTFAQEKPIGEDGFYWLKIHGANTAGVDKVPFPQRIKFVEDNHTNIMECAKAPLENTWWAEQDSPFCFLAFCFEYAGVINSGLSYNCSLPLAFDGSCSGLQHFSAMLRDEIGGKAVNLLPSAEYQDIYRIVSDKVNEMLKQDLINGTSTTVETVTDKKTGEITQRTKYGTKEMAQWWLEHGVNRGVTKRSVMTLVYGSKEFGFRDQVLSDTIQPAIDNGKGDMFLNPNQAAGYMAKLIWNAVSGTVVAAVEAMNWLKSAAKLLAAEVKDPKTGTVLRGRCAVHWVTPDGFPVWQEYKKPIQTRLNLMFLGQFRLQPTINTNKDSEIDAHKQESGIAPNFVHSQDGNHLRMTVVWAHEKYGIESFALIHDSFGTIPADAANLFKAVRETMVSTYESCDVLADFYDQFADQLHESQRDKMPALPAKGNLNLRDILKSDFAFA

SEQ ID NO: 865 - DNA, 2670 bp, synthetic construct
  misc_feature 1..2670: note = Variant of RNA polymerase
  source 1..2670: mol_type = other DNA
atgcaccatcaccatcaccatatgaacacgattaacattgctaagaacgacttctctgacatcgaactggctgctatcccgttcaacactctggctgaccattacggtgagcgtttagctcgcgaacagttggcccttgagcatgagtcttacgagatgggtgaagcacgcttccgcaagatgtttgagcgtcaacttaaagctggtgaggttgcggataacgctgccgccaagcctctcatcactaccctactccctaagatgattgcacgcatcaacgactggtttgaggaagtgaaagctaagcgcggcaagcgcccgacagccttccagttcctgcaagaaatcaagccggaagccgtagcgtacatcaccattaagaccactctggcttgcctaaccagtgcggacaatacaaccgttcaggctgtagcaagcgcaatcggtcgggccattgaggacgaggctcgcttcggtcgtatccgtgaccttgaagctaagcacttcaagaaaaacgttgaggaacaactcaacaagcgcgtagggcacgtgtacaagaaagcatttatgcaagttgtcgagcacgacatgctctctaagggtctactcggtggcgaggcgtggtcttcgtggcataaggaagactctattcatgtaggagtacgctgcatcgagatgctcattgagtcaaccggaatggttagcttacaccgccaaaatgctggcgtagtaggtcaagactctgagactatcgaactcgcacctgaatacgctgaggctatcgcaacccgtgcaggtgcgctggctggcatctctccgatgttccaaccttgcgtagttcctcctaagccgtggactggcattactggtggtggctattgggctgcggggcgcaaacccctgcagttagtacgtactcgcagtctggcggcgcttcgccgctatgaagaagtgtcgatgccggaggtcatcaaagcagtcaacattgcgcagaatacagcatggcgtattaacaagaaagttctcgacgtagcgaataccatcacccaatggcagcactgtccagtcgcggatgtgcctgcgatggatcgtggcgaaatgccagctcgtccgttggacatcgataccaacgagattgcacttaaagcgtggaagaaagaagcttccgcgttctaccgcaaagacaaagcacgcgttagccgtcgtctgtcaatggagtttatgttatctcaggcgaacaagtttgcgaattatatggcaatctggtttccgcaaaacatggattggcgtgggcgcgtgtacgctgtcccgatgttcaatcctcagggcaacgatatgacgaaaggcctgctgacctttgcgcaggagaaacccattggtgaagacggcttctattggctcaagattcatggcgcaaatacagctggagtggataaagtaccgtttccacaacgcatcaaatttgttgaggataaccatacgaatattatggaatgcgcgaaagcaccgctggaaaacacttggtgggcggaacaggactcgccgttctgttttctggcgttctgctttgagtatgctggcgtcatcaatagtggtctgtcgtacaactgtagcttgcctctggcatttgatggtagttgctccggcctgcaacatttctcagcgatgttacgcgacgaaattggcggcaaagctgtgaatctcctcccatctgcggaataccaggatatttatcgtatcgtcagcgacaaagttaacgagatgctgaaacaagatctgattaacggtacctctaccaccgtggaaacggtgactgataagaagacaggcgaaattacccaacgcacgaaatacgggaccaaagttatggcacagtggtggttagaacacggtgtgaatcgtggcgtcacgaaacgctcggttatgactttggtgtatgggagcaaagagtttggattccgcgatcaagtgctgagtgacaccattcaaccggcgatcgataacggcaaaggtgacatgtttctgaatccgaatcaggctgctggttacatggcgaaactgatctggaacgcagtgtccgggaccgtagtcgcagcagttgaggcgatgaactggctgaaaagtgcggcgaaattacttgctgctgaagtgaaggatccaaagacgggcacagttctgcgtggccgctgcgcagtacattgggtgactcccgacggcttccctgtgtggcaggaatacaagaagcctattcagacgcgcttgaacctgatgttcctcggtcagttccgcttacagcctaccattaacaccaacaaagatagcgagattgatgcacacaaacaggagtctggtatcgctcctaactttgtacacagccaagacggtaaccaccttcgtatgactgtagtgtgggcacacgagaagtacggaatcgaatcttttgcactgattcacgactccttcggtaccattccggctgacgctgcgaacctgttcaaagcagtgcgcgaaactttcgttgacacatatgagtcttgtgatgtactggctgatttctacgaccagttcgctgaccagttgcacgagtctcaacgcgacaaaatgccagcacttccggctaaaggtaacttgaacctccgtgacatcttaaaatcggacttcgcgttcgcg

SEQ ID NO: 866 - protein, 890 aa, synthetic construct
  REGION 1..890: note = Variant of RNA polymerase
MHHHHHHMNTINIAKNDFSDIELAAIPFNTLADHYGERLAREQLALEHESYEMGEARFRKMFERQLKAGEVADNAAAKPLITTLLPKMIARINDWFEEVKAKRGKRPTAFQFLQEIKPEAVAYITIKTTLACLTSADNTTVQAVASAIGRAIEDEARFGRIRDLEAKHFKKNVEEQLNKRVGHVYKKAFMQVVEHDMLSKGLLGGEAWSSWHKEDSIHVGVRCIEMLIESTGMVSLHRQNAGVVGQDSETIELAPEYAEAIATRAGALAGISPMFQPCVVPPKPWTGITGGGYWAAGRKPLQLVRTRSLAALRRYEEVSMPEVIKAVNIAQNTAWRINKKVLDVANTITQWQHCPVADVPAMDRGEMPARPLDIDTNEIALKAWKKEASAFYRKDKARVSRRLSMEFMLSQANKFANYMAIWFPQNMDWRGRVYAVPMFNPQGNDMTKGLLTFAQEKPIGEDGFYWLKIHGANTAGVDKVPFPQRIKFVEDNHTNIMECAKAPLENTWWAEQDSPFCFLAFCFEYAGVINSGLSYNCSLPLAFDGSCSGLQHFSAMLRDEIGGKAVNLLPSAEYQDIYRIVSDKVNEMLKQDLINGTSTTVETVTDKKTGEITQRTKYGTKVMAQWWLEHGVNRGVTKRSVMTLVYGSKEFGFRDQVLSDTIQPAIDNGKGDMFLNPNQAAGYMAKLIWNAVSGTVVAAVEAMNWLKSAAKLLAAEVKDPKTGTVLRGRCAVHWVTPDGFPVWQEYKKPIQTRLNLMFLGQFRLQPTINTNKDSEIDAHKQESGIAPNFVHSQDGNHLRMTVVWAHEKYGIESFALIHDSFGTIPADAANLFKAVRETFVDTYESCDVLADFYDQFADQLHESQRDKMPALPAKGNLNLRDILKSDFAFA

SEQ ID NO: 867 - DNA, 2670 bp, synthetic construct
  misc_feature 1..2670: note = Variant of RNA polymerase
  source 1..2670: mol_type = other DNA
atgcaccatcaccatcaccatatgaacacgattaacattgctaagaacgacttctctgacatcgaactggctgctatcccgttcaacactctggctgaccattacggtgagcgtttagctcgcgaacagttggcccttgagcatgagtcttacgagatgggtgaagcacgcttccgcaagatgtttgagcgtcaacttaaagctggtgaggttgcggataacgctgccgccaagcctctcatcactaccctactccctaagatgattgcacgcatcaacgactggtttgaggaagtgaaagctaagcgcggcaagcgcccgacagccttccagttcctgcaagaaatcaagccggaagccgtagcgtacatcaccattaagaccactctggcttgcctaaccagtgcggacaatacaaccgttcaggctgtagcaagcgcaatcggtcgggccattgaggacgaggctcgcttcggtcgtatccgtgaccttgaagctaagcacttcaagaagaacgttgaggaacaactcaacaagcgcgtagggcacgtgtacaagaaagcatttatgcaagttgtcgagcacgacatgctctctaagggtctactcggtggcgaggcgtggtcttcgtggcataaggaagactctattcatgtaggagtacgctgcatcgagatgctcattgagtcaaccggaatggttagcttacaccgccaaaatgctggcgtagtaggtcaagactctgagactatcgaactcgcacctgaatacgctgaggctatcgcaacccgtgcaggtgcgctggctggcatctctccgatgttccaaccttgcgtagttcctcctaagccgtggactggcattactggtggtggctattgggctgcggggcgcaaacccctgcagttagtacgtactcgcagtctggcggcgcttcgccgctatgaagaagtgtcgatgccggaggtcatcaaagcagtcaacattgcgcagaatacagcatggcgtattaacaagaaagttctcgacgtagcgaataccatcacccaatggcagcactgtccagtcgcggatgtgcctgcgatggatcgtggcgaaatgccagctcgtccgttggacatcgataccaacgagattgcacttaaagcgtggaagaaagaagcttccgcgttctaccgcaaagacaaagcacgcgttagccgtcgtctgtcaatggagtttatgttatctcaggcgaacaagtttgcgaattatgtggcaatctggtttccgcaaaacatggattggcgtgggcgcgtgtacgctgtcccgatgttcaatcctcagggcaacgatatgacgaaaggcctgctgacctttgcgcaggagaaacccattggtgaagacggcttctattggctcaagattcatggcgcaaatacagctggagtggataaagtaccgtttccacaacgcatcaaatttgttgaggataaccatacgaatattatggaatgcgcgaaagcaccgctggaaaacacttggtgggcggaacaggactcgccgttctgttttctggcgttctgctttgagtatgctggcgtcatcaatagtggtctgtcgtacaactgtagcttgcctctggcatttgatggtagttgctccggcctgcaacatttctcagcgatgttacgcgacgaaattggcggcaaagctgtgaatctcctcccatctgcggaataccaggatatttatcgtatcgtcagcgacaaagttaacgagatgctgaaacaagatctgattaacggtacctctaccaccgtggaaacggtgactgataagaagacaggcgaaattacccaacgcacgaaatacgggaccaaagttatggcacagtggtggttagaacacggtgtgaatcgtggcgtcacgaaacgctcggttatgactttggtgtatgggagcaaagagtttggattccgcgatcaagtgctgagtgacaccattcaaccggcgatcgataacggcaaaggtgacatgtttctgaatccgaatcaggctgctggttacatggcgaaactgatctggaacgcagtgtccgggaccgtagtcgcagcagttgaggcgatgaactggctgaaaagtgcggcgaaattacttgctgctgaagtgaaggatccaaagacggacacagttctgcgtggccgctgcgcagtacattgggtgactcccgacggcttccctgtgtggcaggaatacaagaagcctattcagacgcgcttgaacctgatgttcctcggtcagttccgcttacagcctaccattaacaccaacaaagatagcgagattgatgcacacaaacaggagtctggtatcgctcctaactttgtacacagccaagacggtaaccaccttcgtatgactgtagtgtgggcacacgagaagtacggaatcgaatcttttgcactgattcacgactccttcggtaccattccggctgacgctgcgaacctgttcaaagcagtgcgcgaaactttcgttagcacatatgagtcttgtgatgtactggctgatttctacgaccagttcgctgaccagttgcacgagtctcaactggacaaaatgccagcacttccggctaaaggtaacttgaacctccgtgacatcttaaaatcggacttcgcgttcgcg

SEQ ID NO: 868 - protein, 890 aa, synthetic construct
  REGION 1..890: note = Variant of RNA polymerase
MHHHHHHMNTINIAKNDFSDIELAAIPFNTLADHYGERLAREQLALEHESYEMGEARFRKMFERQLKAGEVADNAAAKPLITTLLPKMIARINDWFEEVKAKRGKRPTAFQFLQEIKPEAVAYITIKTTLACLTSADNTTVQAVASAIGRAIEDEARFGRIRDLEAKHFKKNVEEQLNKRVGHVYKKAFMQVVEHDMLSKGLLGGEAWSSWHKEDSIHVGVRCIEMLIESTGMVSLHRQNAGVVGQDSETIELAPEYAEAIATRAGALAGISPMFQPCVVPPKPWTGITGGGYWAAGRKPLQLVRTRSLAALRRYEEVSMPEVIKAVNIAQNTAWRINKKVLDVANTITQWQHCPVADVPAMDRGEMPARPLDIDTNEIALKAWKKEASAFYRKDKARVSRRLSMEFMLSQANKFANYVAIWFPQNMDWRGRVYAVPMFNPQGNDMTKGLLTFAQEKPIGEDGFYWLKIHGANTAGVDKVPFPQRIKFVEDNHTNIMECAKAPLENTWWAEQDSPFCFLAFCFEYAGVINSGLSYNCSLPLAFDGSCSGLQHFSAMLRDEIGGKAVNLLPSAEYQDIYRIVSDKVNEMLKQDLINGTSTTVETVTDKKTGEITQRTKYGTKVMAQWWLEHGVNRGVTKRSVMTLVYGSKEFGFRDQVLSDTIQPAIDNGKGDMFLNPNQAAGYMAKLIWNAVSGTVVAAVEAMNWLKSAAKLLAAEVKDPKTDTVLRGRCAVHWVTPDGFPVWQEYKKPIQTRLNLMFLGQFRLQPTINTNKDSEIDAHKQESGIAPNFVHSQDGNHLRMTVVWAHEKYGIESFALIHDSFGTIPADAANLFKAVRETFVSTYESCDVLADFYDQFADQLHESQLDKMPALPAKGNLNLRDILKSDFAFA

SEQ ID NO: 869 - DNA, 2670 bp, synthetic construct
  misc_feature 1..2670: note = Variant of RNA polymerase
  source 1..2670: mol_type = other DNA
atgcaccatcaccatcaccatatgaacacgattaacattgctaagaacgacttctctgacatcgaactggctgctatcccgttcaacactctggctgaccattacggtgagcgtttagctcgcgaacagttggcccttgagcatgagtcttacgagatgggtgaagcacgcttccgcaagatgtttgagcgtcaacttaaagctggtgaggttgcggataacgctgccgccaagcctctcatcactaccctactccctaagatgattgcacgcatcaacgactggtttgaggaagtgaaagctaagcgcggcaagcgcccgacagccttccagttcctgcaagaaatcaagccggaagccgtagcgtacatcaccattaagaccactctggcttgcctaaccagtgcggacaatacaaccgttcaggctgtagcaagcgcaatcggtcgggccattgaggacgaggctcgcttcggtcgtatccgtgaccttgaagctaagcacttcaagaagaacgttgaggaacaactcaacaagcgcgtagggcacgtctacaagaaagcatttatgcaagttgtcgagcacgacatgctctctaagggtctactcggtggcgaggcgtggtcttcgtggcataaggaagactctattcatgtaggagtacgctgcatcgagatgctcattgagtcaaccggaatggttagcttacaccgccaaaatgctggcgtagtaggtcaagactctgagactatcgaactcgcacctgaatacgctgaggctatcgcaacccgtgcaggtgcgctggctggcatctctccgatgttccaaccttgcgtagttcctcctaagccgtggactggcattactggtggtggctattgggctgcggggcgcaaacccctgcagttagtacgtactcgcagtctggcggcgcttcgccgctatgaagaagtgtcgatgccggaggtcatcaaagcagtcaacattgcgcagaatacagcatggcgtattaacaagaaagttctcgacgtagcgaataccatcacccaatggcagcactgtccagtcgcggatgtgcctgcgatggatcgtggcgaaatgccagctcgtccgttggacatcgataccaacgagattgcacttaaagcgtggaagaaagaagcttccgcgttctaccgcaaagacaaagcacgcgttagccgtcgtctgtcaatggagtttatgttatctcaggcgaacaagtttgcgaattataaagcaatctggtttccgcaaaacatggattggcgtgggcgcgtgtacgctgtcccgatgttcaatcctcagggcaacgatatgacgaaaggcctgctgacctttgcgcaggagaaacccattggtgaagacggcttctattggctcaagattcatggcgcaaatacagctggaggggataaagtaccgtttccacaacgcatcaaatttgttgaggataaccatacgaatattatggaatgcgcgaaagcaccgctggaaaacacttggtgggcggaacaggactcgccgttctgttttctggcgttctgctttgagtatgctggcgtcatcaatagtggtctgtcgtacaactgtagcttgcctctggcatttgatggtagttgctccggcctgcaacatttctcagcgatgttacgcgacgaaattggcggcaaagctgtgaatctcctcccatctgcggaataccaggatatttatcgtatcgtcagcgacaaagttaacgagatgctgaaacaagatctgattaacggtacctctaccaccgtggaaacggtgactgataagaagacaggcgaaattacccaacgcacgaaatacgggaccaaagttatggcacagtggtggttagaacacggtgtgaatcgtggcgtcacgaaacgctcggttatgactttggtgtatgggagcaaagagtttggattccgcgatcaagtgctgagtgacaccattcaaccggcgatcgataacggcaaaggtgacatgtttctgaatccgaatcaggctgctggttacatggcgaaactgatctggaacgcagtgtccgggaccgtagtcgcagcagttgaggcgatgaactggctgaaaagtgcggcgaaattacttgctgctgaagtgaaggatcctaagacggatacagttctgcgtggccgctgcgcagtacattgggtgactcccgacggcttccctgtgtggcaggaatacaagaagcctattcagacgcgcttgaacctgatgttcctcggtcagttccgcttacagcctaccattaacaccaacaaagatagcgagattgatgcacacaaacaggagtctggtatcgctcctaactttgtacacagccaagacggtaaccaccttcgtatgactgtagtgtgggcacacgagaagtacggaatcgaatcttttgcactgattcacgactccttcggtaccattccggctgacgctgcgaacctgttcaaagcagtgcgcgaaactatggtttcgacatatgagtcttgtgatgtactggctgatttctacgaccagttcgctgaccagttgcacgagtctcaattggacaaaatgccagcacttccggctaaaggtaacttgaacctccgtgacatcttaaaatcggacttcgcgttcgcg

SEQ ID NO: 870 - protein, 890 aa, synthetic construct
  REGION 1..890: note = Variant of RNA polymerase
MHHHHHHMNTINIAKNDFSDIELAAIPFNTLADHYGERLAREQLALEHESYEMGEARFRKMFERQLKAGEVADNAAAKPLITTLLPKMIARINDWFEEVKAKRGKRPTAFQFLQEIKPEAVAYITIKTTLACLTSADNTTVQAVASAIGRAIEDEARFGRIRDLEAKHFKKNVEEQLNKRVGHVYKKAFMQVVEHDMLSKGLLGGEAWSSWHKEDSIHVGVRCIEMLIESTGMVSLHRQNAGVVGQDSETIELAPEYAEAIATRAGALAGISPMFQPCVVPPKPWTGITGGGYWAAGRKPLQLVRTRSLAALRRYEEVSMPEVIKAVNIAQNTAWRINKKVLDVANTITQWQHCPVADVPAMDRGEMPARPLDIDTNEIALKAWKKEASAFYRKDKARVSRRLSMEFMLSQANKFANYKAIWFPQNMDWRGRVYAVPMFNPQGNDMTKGLLTFAQEKPIGEDGFYWLKIHGANTAGGDKVPFPQRIKFVEDNHTNIMECAKAPLENTWWAEQDSPFCFLAFCFEYAGVINSGLSYNCSLPLAFDGSCSGLQHFSAMLRDEIGGKAVNLLPSAEYQDIYRIVSDKVNEMLKQDLINGTSTTVETVTDKKTGEITQRTKYGTKVMAQWWLEHGVNRGVTKRSVMTLVYGSKEFGFRDQVLSDTIQPAIDNGKGDMFLNPNQAAGYMAKLIWNAVSGTVVAAVEAMNWLKSAAKLLAAEVKDPKTDTVLRGRCAVHWVTPDGFPVWQEYKKPIQTRLNLMFLGQFRLQPTINTNKDSEIDAHKQESGIAPNFVHSQDGNHLRMTVVWAHEKYGIESFALIHDSFGTIPADAANLFKAVRETMVSTYESCDVLADFYDQFADQLHESQLDKMPALPAKGNLNLRDILKSDFAFA

SEQ ID NO: 871 - DNA, 2670 bp, synthetic construct
  misc_feature 1..2670: note = Variant of RNA polymerase
  source 1..2670: mol_type = other DNA
atgcaccatcaccatcaccatatgaacacgattaacattgctaagaacgacttctctgacatcgaactggctgctatcccgttcaacactctggctgaccattacggtgagcgtttagctcgcgaacagttggcccttgagcatgagtcttacgagatgggtgaagcacgcttccgcaagatgtttgagcgtcaacttaaagctggtgaggttgcggataacgctgccgccaagcctctcatcactaccctactccctaagatgattgcacgcatcaacgactggtttgaggaagtgaaagctaagcgcggcaagcgcccgacagccttccagttcctgcaagaaatcaagccggaagccgtagcgtacatcaccattaagaccactctggcttgcctaaccagtgcggacaatacaaccgttcaggctgtagcaagcgcaatcggtcgggccattgaggacgaggctcgcttcggtcgtatccgtgaccttgaagctaagcacttcaagaagaacgttgaggaacaactcaacaagcgcgtagggcacgtctacaagaaagcatttatgcaagttgtcgagcacgacatgctctctaagggtctactcggtggcgaggcgtggtcttcgtggcataaggaagactctattcatgtaggagtacgctgcatcgagatgctcattgagtcaaccggaatggttagcttacaccgccaaaatgctggcgtagtaggtcaagactctgagactatcgaactcgcacctgaatacgctgaggctatcgcaacccgtgcaggtgcgctggctggcatctctccgatgttccaaccttgcgtagttcctcctaagccgtggactggcattactggtggtggctattgggctgcggggcgcaaacccctgcagttagtacgtactcgcagtctggcggcgcttcgccgctatgaagaagtgtcgatgccggaggtcatcaaagcagtcaacattgcgcagaatacagcatggcgtattaacaagaaagttctcgacgtagcgaataccatcacccaatggcagcactgtccagtcgcggatgtgcctgcgatggatcgtggcgaaatgccagctcgtccgttggacatcgataccaacgagattgcacttaaagcgtggaagaaagaagcttccgcgttctaccgcaaagacaaagcacgcgttagccgtcgtctgtcaatggagtttatgttatctcaggcgaacaagtttgcgaattataaagcaatctggtttccgcaaaacatggattggcgtgggcgcgtgtacgctgtcccgatgttcaatcctcagggcaacgatatgacgaaaggcctgctgacctttgcgcaggagaaacccattggtgaagacggcttctattggctcaagattcatggcgcaaatacagctggagtggataaagtaccgtttccacaacgcatcaaatttgttgaggataaccatacgaatattatggaatgcgcgaaagcaccgctggaaaacacttggtgggcggaacaggactcgccgttctgttttctggcgttctgctttgagtatgctggcgtcatcaatagtggtctgtcgtacaactgtagcttgcctctggcatttgatggtagttgctccggcctgcaacatttctcagcgatgttacgcgacgaaattggcggcaaagctgtgaatctcctcccatctgcggaataccaggatatttatcgtatcgtcagcgacaaagttaacgagatgctgaaacaagatctgattaacggtacctctaccaccgtggaaacggtgactgataagaagacaggcgaaattacccaacgcacgaaatacgggaccaaagttatggcacagtggtggttagaacacggtgtgaatcgtggcgtcacgaaacgctcggttatgactttggtgtatgggagcaaagagtttggattccgcgatcaagtgctgagtgacaccattcaaccggcgatcgataacggcaaaggtgacatgtttctgaatccgaatcaggctgctggttacatggcgaaactgatctggaacgcagtgtccgggaccgtagtcgcagcagttgaggcgatgaactggctgaaaagtgcggcgaaattacttgctgctgaagtgaaggatcctaagacggatacagttctgcgtggccgctgcgcagtacattgggtgactcccgacggcttccctgtgtggcaggaatacaagaagcctattcagacgcgcttgaacctgatgttcctcggtcagttccgcttacagcctaccattaacaccaacaaagatagcgagattgatgcacacaaacaggagtctggtatcgctcctaactttgtacacagccaagacggtaaccaccttcgtatgactgtagtgtgggcacacgagaagtacggaatcgaatcttttgcactgattcacgactccttcggtaccattccggctgacgctgcgaacctgaggaaagcagtgcgcgaaactatggtttcgacatatgagtcttgtgatgtactggctgatttctacgaccagttcgctgaccagttgcacgagtctcaattggacaaaatgccagcacttccggctaaaggtaacttgaacctccgtgacatcttaaaatcggacttcgcgttcgcg

SEQ ID NO: 872 - protein, 890 aa, synthetic construct
  REGION 1..890: note = Variant of RNA polymerase
MHHHHHHMNTINIAKNDFSDIELAAIPFNTLADHYGERLAREQLALEHESYEMGEARFRKMFERQLKAGEVADNAAAKPLITTLLPKMIARINDWFEEVKAKRGKRPTAFQFLQEIKPEAVAYITIKTTLACLTSADNTTVQAVASAIGRAIEDEARFGRIRDLEAKHFKKNVEEQLNKRVGHVYKKAFMQVVEHDMLSKGLLGGEAWSSWHKEDSIHVGVRCIEMLIESTGMVSLHRQNAGVVGQDSETIELAPEYAEAIATRAGALAGISPMFQPCVVPPKPWTGITGGGYWAAGRKPLQLVRTRSLAALRRYEEVSMPEVIKAVNIAQNTAWRINKKVLDVANTITQWQHCPVADVPAMDRGEMPARPLDIDTNEIALKAWKKEASAFYRKDKARVSRRLSMEFMLSQANKFANYKAIWFPQNMDWRGRVYAVPMFNPQGNDMTKGLLTFAQEKPIGEDGFYWLKIHGANTAGVDKVPFPQRIKFVEDNHTNIMECAKAPLENTWWAEQDSPFCFLAFCFEYAGVINSGLSYNCSLPLAFDGSCSGLQHFSAMLRDEIGGKAVNLLPSAEYQDIYRIVSDKVNEMLKQDLINGTSTTVETVTDKKTGEITQRTKYGTKVMAQWWLEHGVNRGVTKRSVMTLVYGSKEFGFRDQVLSDTIQPAIDNGKGDMFLNPNQAAGYMAKLIWNAVSGTVVAAVEAMNWLKSAAKLLAAEVKDPKTDTVLRGRCAVHWVTPDGFPVWQEYKKPIQTRLNLMFLGQFRLQPTINTNKDSEIDAHKQESGIAPNFVHSQDGNHLRMTVVWAHEKYGIESFALIHDSFGTIPADAANLRKAVRETMVSTYESCDVLADFYDQFADQLHESQLDKMPALPAKGNLNLRDILKSDFAFA

SEQ ID NO: 873 - DNA, 2670 bp, synthetic construct
  misc_feature 1..2670: note = Variant of RNA polymerase
  source 1..2670: mol_type = other DNA
atgcaccatcaccatcaccatatgaacacgattaacattgctaagaacgacttctctgacatcgaactggctgctatcccgttcaacactctggctgaccattacggtgagcgtttagctcgcgaacagttggcccttgagcatgagtcttacgagatgggtgaagcacgcttccgcaagatgtttgagcgtcaacttaaagctggtgaggttgcggataacgctgccgccaagcctctcatcactaccctactccctaagatgattgcacgcatcaacgactggtttgaggaagtgaaagctaagcgcggcaagcgcccgacagccttccagttcctgcaagaaatcaagccggaagccgtagcgtacatcaccattaagaccactctggcttgcctaaccagtgcggacaatacaaccgttcaggctgtagcaagcgcaatcggtcgggccattgaggacgaggctcgcttcggtcgtatccgtgaccttgaagctaagcacttcaagaagaacgttgaggaacaactcaacaagcgcgtagggcacgtgtacaagaaagcatttatgcaagttgtcgagcacgacatgctctctaagggtctactcggtggcgaggcgtggtcttcgtggcataaggaagactctattcatgtaggagtacgctgcatcgagatgctcattgagtcaaccggaatggttagcttacaccgccaaaatgctggcgtagtaggtcaagactctgagactatcgaactcgcacctgaatacgctgaggctatcgcaacccgtgcaggtgcgctggctggcatctctccgatgttccaaccttgcgtagttcctcctaagccgtggactggcattactggtggtggctattgggctgcggggcgcaaacccctgcagttagtacgtactcgcagtctggcggcgcttcgccgctatgaagaagtgtcgatgccggaggtcatcaaagcagtcaacattgcgcagaatacagcatggcgtattaacaagaaagttctcgacgtagcgaataccatcacccaatggcagcactgtccagtcgcggatgtgcctgcgatggatcgtggcgaaatgccagctcgtccgttggacatcgataccaacgagattgcacttaaagcgtggaagaaagaagcttccgcgttctaccgcaaagacaaagcacgcgttagccgtcgtctgtcaatggagtttatgttatctcaggcgaacaagtttgcgaatgagaacgcaatctggtttccgcaaaacatggattggcgtgggcgcgtgtacgctgtcccgatgttcaatcctcagggcaacgatatgacgaaaggcctgctgacctttgcgcaggagaaacccattggtgaagacggcttctattggctcaagattcatggcgcaaatacagctggagtggataaagtaccgtttccacaacgcatcaaatttgttgaggataaccatacgaatattatggaatgcgcgaaagcaccgctggaaaacacttggtgggcggaacaggactcgccgttctgttttctggcgttctgctttgagtatgctggcgtcatcaatagtggtctgtcgtacaactgtagcttgcctctggcatttgatggtagttgctccggcctgcaacatttctcagcgatgttacgcgacgaaattggcggcaaagctgtgaatctcctcccatctgcggaataccaggatatttatcgtatcgtcagcgacaaagttaacgagatgctgaaacaagatctgattaacggtacctctaccaccgtggaaacggtgactgataagaagacaggcgaaattacccaacgcacgaaatacgggaccaaagttatggcacagtggtggttagaacacggtgtgaatcgtggcgtcacgaaacgctcggttatgactttggtgtatgggagcaaagagtttggattccgcgatcaagtgctgagtgacaccattcaaccggcgatcgataacggcaaaggtgacatgtttctgaatccgaatcaggctgctggttacatggcgaaactgatctggaacgcagtgtccgggaccgtagtcgcagcagttgaggcgatgaactggctgaaaagtgcggcgaaattacttgctgctgaagtgaaggatcctaagacggatacagttctgcgtggccgctgcgcagtacattgggtgactcccgacggcttccctgtgtggcaggaatacaagaagcctattcagacgcgcttgaacctgatgttcctcggtcagttccgcttacagcctaccattaacaccaacaaagatagcgagattgatgcacacaaacaggagtctggtatcgctcctaactttgtacacagccaagacggtaaccaccttcgtatgactgtagtgtgggcacacgagaagtacggaatcgaatcttttgcactgattcacgactccttcggtaccattccggctgacgctgcgaacctgttcaaagcagtgcgcgaaactttcgttgacacatatgagtcttgtgatgtactggctgatttctacgaccagttcgctgaccagttgcacgagtctcaattggacaaaatgccagcacttccggctaaaggtaacttgaacctccgtgacatcttaaaatcggacttcgcgttcgcg

SEQ ID NO: 874 - protein, 890 aa, synthetic construct
  REGION 1..890: note = Variant of RNA polymerase
MHHHHHHMNTINIAKNDFSDIELAAIPFNTLADHYGERLAREQLALEHESYEMGEARFRKMFERQLKAGEVADNAAAKPLITTLLPKMIARINDWFEEVKAKRGKRPTAFQFLQEIKPEAVAYITIKTTLACLTSADNTTVQAVASAIGRAIEDEARFGRIRDLEAKHFKKNVEEQLNKRVGHVYKKAFMQVVEHDMLSKGLLGGEAWSSWHKEDSIHVGVRCIEMLIESTGMVSLHRQNAGVVGQDSETIELAPEYAEAIATRAGALAGISPMFQPCVVPPKPWTGITGGGYWAAGRKPLQLVRTRSLAALRRYEEVSMPEVIKAVNIAQNTAWRINKKVLDVANTITQWQHCPVADVPAMDRGEMPARPLDIDTNEIALKAWKKEASAFYRKDKARVSRRLSMEFMLSQANKFANENAIWFPQNMDWRGRVYAVPMFNPQGNDMTKGLLTFAQEKPIGEDGFYWLKIHGANTAGVDKVPFPQRIKFVEDNHTNIMECAKAPLENTWWAEQDSPFCFLAFCFEYAGVINSGLSYNCSLPLAFDGSCSGLQHFSAMLRDEIGGKAVNLLPSAEYQDIYRIVSDKVNEMLKQDLINGTSTTVETVTDKKTGEITQRTKYGTKVMAQWWLEHGVNRGVTKRSVMTLVYGSKEFGFRDQVLSDTIQPAIDNGKGDMFLNPNQAAGYMAKLIWNAVSGTVVAAVEAMNWLKSAAKLLAAEVKDPKTDTVLRGRCAVHWVTPDGFPVWQEYKKPIQTRLNLMFLGQFRLQPTINTNKDSEIDAHKQESGIAPNFVHSQDGNHLRMTVVWAHEKYGIESFALIHDSFGTIPADAANLFKAVRETFVDTYESCDVLADFYDQFADQLHESQLDKMPALPAKGNLNLRDILKSDFAFA

SEQ ID NO: 875 - DNA, 2670 bp, synthetic construct
  misc_feature 1..2670: note = Variant of RNA polymerase
  source 1..2670: mol_type = other DNA
atgcaccatcaccatcaccatatgaacacgattaacattgctaagaacgacttctctgacatcgaactggctgctatcccgttcaacactctggctgaccattacggtgagcgtttagctcgcgaacagttggcccttgagcatgagtcttacgagatgggtgaagcacgcttccgcaagatgtttgagcgtcaacttaaagctggtgaggttgcggataacgctgccgccaagcctctcatcactaccctactccctaagatgattgcacgcatcaacgactggtttgaggaagtgaaagctaagcgcggcaagcgcccgacagccttccagttcctgcaagaaatcaagccggaagccgtagcgtacatcaccattaagaccactctggcttgcctaaccagtgcggacaatacaaccgttcaggctgtagcaagcgcaatcggtcgggccattgaggacgaggctcgcttcggtcgtatccgtgaccttgaagctaagcacttcaagaagaacgttgaggaacaactcaacaagcgcgtagggcacgtctacaagaaagcatttatgcaagttgtcgagcacgacatgctctctaagggtctactcggtggcgaggcgtggtcttcgtggcataaggaagactctattcatgtaggagtacgctgcatcgagatgctcattgagtcaaccggaatggttagcttacaccgccaaaatgctggcgtagtaggtcaagactctgagactatcgaactcgcacctgaatacgctgaggctatcgcaacccgtgcaggtgcgctggctggcatctctccgatgttccaaccttgcgtagttcctcctaagccgtggactggcattactggtggtggctattgggctgcggggcgcaaacccctgcagttagtacgtactcgcagtctggcggcgcttcgccgctatgaagaagtgtcgatgccggaggtcatcaaagcagtcaacattgcgcagaatacagcatggcgtattaacaagaaagttctcgacgtagcgaataccatcacccaatggcagcactgtccagtcgcggatgtgcctgcgatggatcgtggcgaaatgccagctcgtccgttggacatcgataccaacgagattgcacttaaagcgtggaagaaagaagcttccgcgttctaccgcaaagacaaagcacgcgttagccgtcgtctgtcaatggagtttatgttatctcaggcgaacaagtttgcgaatgagatggcaatctggtttccgcaaaacatggattggcgtgggcgcgtgtacgctgtcccgatgttcaatcctcagggcaacgatatgacgaaaggcctgctgacctttgcgcaggagaaacccattggtgaagacggcttctattggctcaagattcatggcgcaaatacagctggagtggataaagtaccgtttccacaacgcatcaaatttgttgaggataaccatacgaatattatggaatgcgcgaaagcaccgctggaaaacacttggtgggcggaacaggactcgccgttctgttttctggcgttctgctttgagtatgctggcgtcatcaatagtggtctgtcgtacaactgtagcttgcctctggcatttgatggtagttgctccggcctgcaacatttctcagcgatgttacgcgacgaaattggcggcaaagctgtgaatctcctcccatctgcggaataccaggatatttatcgtatcgtcagcgacaaagttaacgagatgctgaaacaagatctgattaacggtacctctaccaccgtggaaacggtgactgataagaagacaggcgaaattacccaacgcacgaaatacgggaccaaagttatggcacagtggtggttagaacacggtgtgaatcgtggcgtcacgaaacgctcggttatgactttggtgtatgggagcaaagagtttggattccgcgatcaagtgctgagtgacaccattcaaccggcgatcgataacggcaaaggtgacatgtttctgaatccgaatcaggctgctggttacatggcgaaactgatctggaacgcagtgtccgggaccgtagtcgcagcagttgaggcgatgaactggctgaaaagtgcggcgaaattacttgctgctgaagtgaaggatccaaagacggccacagttctgcgtggccgctgcgcagtacattgggtgactcccgacggcttccctgtgtggcaggaatacaagaagcctattcagacgcgcttgaacctgatgttcctcggtcagttccgcttacagcctaccattaacaccaacaaagatagcgagattgatgcacacaaacaggagtctggtatcgctcctaactttgtacacagccaagacggtaaccaccttcgtatgactgtagtgtgggcacacgagaagtacggaatcgaatcttttgcactgattcacgactccttcggtaccattccggctgacgctgcgaacctgttcaaagcagtgcgcgaaactttcgttagcacatatgagtcttgtgatgtactggctgatttctacgaccagttcgctgaccagttgcacgagtctcaactggacaaaatgccagcacttccggctaaaggtaacttgaacctccgtgacatcttaaaatcggacttcgcgttcgcg

SEQ ID NO: 876 - protein, 890 aa, synthetic construct
  REGION 1..890: note = Variant of RNA polymerase
MHHHHHHMNTINIAKNDFSDIELAAIPFNTLADHYGERLAREQLALEHESYEMGEARFRKMFERQLKAGEVADNAAAKPLITTLLPKMIARINDWFEEVKAKRGKRPTAFQFLQEIKPEAVAYITIKTTLACLTSADNTTVQAVASAIGRAIEDEARFGRIRDLEAKHFKKNVEEQLNKRVGHVYKKAFMQVVEHDMLSKGLLGGEAWSSWHKEDSIHVGVRCIEMLIESTGMVSLHRQNAGVVGQDSETIELAPEYAEAIATRAGALAGISPMFQPCVVPPKPWTGITGGGYWAAGRKPLQLVRTRSLAALRRYEEVSMPEVIKAVNIAQNTAWRINKKVLDVANTITQWQHCPVADVPAMDRGEMPARPLDIDTNEIALKAWKKEASAFYRKDKARVSRRLSMEFMLSQANKFANEMAIWFPQNMDWRGRVYAVPMFNPQGNDMTKGLLTFAQEKPIGEDGFYWLKIHGANTAGVDKVPFPQRIKFVEDNHTNIMECAKAPLENTWWAEQDSPFCFLAFCFEYAGVINSGLSYNCSLPLAFDGSCSGLQHFSAMLRDEIGGKAVNLLPSAEYQDIYRIVSDKVNEMLKQDLINGTSTTVETVTDKKTGEITQRTKYGTKVMAQWWLEHGVNRGVTKRSVMTLVYGSKEFGFRDQVLSDTIQPAIDNGKGDMFLNPNQAAGYMAKLIWNAVSGTVVAAVEAMNWLKSAAKLLAAEVKDPKTATVLRGRCAVHWVTPDGFPVWQEYKKPIQTRLNLMFLGQFRLQPTINTNKDSEIDAHKQESGIAPNFVHSQDGNHLRMTVVWAHEKYGIESFALIHDSFGTIPADAANLFKAVRETFVSTYESCDVLADFYDQFADQLHESQLDKMPALPAKGNLNLRDILKSDFAFA

SEQ ID NO: 877 - DNA, 2670 bp, synthetic construct
  misc_feature 1..2670: note = Variant of RNA polymerase
  source 1..2670: mol_type = other DNA
atgcaccatcaccatcaccatatgaacacgattaacattgctaagaacgacttctctgacatcgaactggctgctatcccgttcaacactctggctgaccattacggtgagcgtttagctcgcgaacagttggcccttgagcatgagtcttacgagatgggtgaagcacgcttccgcaagatgtttgagcgtcaacttaaagctggtgaggttgcggataacgctgccgccaagcctctcatcactaccctactccctaagatgattgcacgcatcaacgactggtttgaggaagtgaaagctaagcgcggcaagcgcccgacagccttccagttcctgcaagaaatcaagccggaagccgtagcgtacatcaccattaagaccactctggcttgcctaaccagtgcggacaatacaaccgttcaggctgtagcaagcgcaatcggtcgggccattgaggacgaggctcgcttcggtcgtatccgtgaccttgaagctaagcacttcaagaagaacgttgaggaacaactcaacaagcgcgtagggcacccgtacaagaaagcatttatgcaagttgtcgagcacgacatgctctctaagggtctactcggtggcgaggcgtggtcttcgtggcataaggaagactctattcatgtaggagtacgctgcatcgagatgctcattgagtcaaccggaatggttagcttacaccgccaaaatgctggcgtagtaggtcaagactctgagactatcgaactcgcacctgaatacgctgaggctatcgcaacccgtgcaggtgcgctggctggcatctctccgatgttccaaccttgcgtagttcctcctaagccgtggactggcattactggtggtggctattgggctgcggggcgcaaacccctgcagttagtacgtactcgcagtctggcggcgcttcgccgctatgaagaagtgtcgatgccggaggtcatcaaagcagtcaacattgcgcagaatacagcatggcgtattaacaagaaagttctcgacgtagcgaataccatcacccaatggcagcactgtccagtcgcggatgtgcctgcgatggatcgtggcgaaatgccagctcgtccgttggacatcgataccaacgagattgcacttaaagcgtggaagaaagaagcttccgcgttctaccgcaaagacaaagcacgcgttagccgtcgtctgtcaatggagtttatgttatctcaggcgaacaagtttgcgaattatgaggcaatctggtttccgcaaaacatggattggcgtgggcgcgtgtacgctgtcccgatgttcaatcctcagggcaacgatatgacgaaaggcctgctgacctttgcgcaggagaaacccattggtgaagacggcttctattggctcaagattcatggcgcaaatacagctggagtggataaagtaccgtttccacaacgcatcaaatttgttgaggataaccatacgaatattatggaatgcgcgaaagcaccgctggaaaacacttggtgggcggaacaggactcgccgttctgttttctggcgttctgctttgagtatgctggcgtcatcaatagtggtctgtcgtacaactgtagcttgcctctggcatttgatggtagttgctccggcctgcaacatttctcagcgatgttacgcgacgaaattggcggcaaagctgtgaatctcctcccatctgcggaataccaggatatttatcgtatcgtcagcgacaaagttaacgagatgctgaaacaagatctgattaacggtacctctaccaccgtggaaacggtgactgataagaagacaggcgaaattacccaacgcacgaaatacgggaccaaagtaatggcacagtggtggttagaacacggtgtgaatcgtggcgtcacgaaacgctcggttatgactttggtgtatgggagcaaagagtttggattccgcgatcaagtgctgagtgacaccattcaaccggcgatcgataacggcaaaggtgacatgtttctgaatccgaatcaggctgctggttacatggcgaaactgatctggaacgcagtgtccgggaccgtagtcgcagcagttgaggcgatgaactggctgaaaagtgcggcgaaattacttgctgctgaagtgaaggatccaaagacgggcacagttctgcgtggccgctgcgcagtacattgggtgactcccgacggcttccctgtgtggcaggaatacaagaagcctattcagacgcgcttgaacctgatgttcctcggtcagttccgcttacagcctaccattaacaccaacaaagatagcgagattgatgcacacaaacaggagtctggtatcgctcctaactttgtacacagccaagacggtaaccaccttcgtatgactgtagtgtgggcacacgagaagtacggaatcgaatcttttgcactgattcacgactccttcggtaccattccggctgacgctgcgaacctgttcaaagcagtgcgcgaaactttcgttagcacatatgagtcttgtgatgtactggctgatttctacgaccagttcgctgaccagttgcacgagtctcaattggacaaaatgccagcacttccggctaaaggtaacttgaacctccgtgacatcttaaaatcggacttcgcgttcgcg

SEQ ID NO: 878 - protein, 890 aa, synthetic construct
  REGION 1..890: note = Variant of RNA polymerase
MHHHHHHMNTINIAKNDFSDIELAAIPFNTLADHYGERLAREQLALEHESYEMGEARFRKMFERQLKAGEVADNAAAKPLITTLLPKMIARINDWFEEVKAKRGKRPTAFQFLQEIKPEAVAYITIKTTLACLTSADNTTVQAVASAIGRAIEDEARFGRIRDLEAKHFKKNVEEQLNKRVGHPYKKAFMQVVEHDMLSKGLLGGEAWSSWHKEDSIHVGVRCIEMLIESTGMVSLHRQNAGVVGQDSETIELAPEYAEAIATRAGALAGISPMFQPCVVPPKPWTGITGGGYWAAGRKPLQLVRTRSLAALRRYEEVSMPEVIKAVNIAQNTAWRINKKVLDVANTITQWQHCPVADVPAMDRGEMPARPLDIDTNEIALKAWKKEASAFYRKDKARVSRRLSMEFMLSQANKFANYEAIWFPQNMDWRGRVYAVPMFNPQGNDMTKGLLTFAQEKPIGEDGFYWLKIHGANTAGVDKVPFPQRIKFVEDNHTNIMECAKAPLENTWWAEQDSPFCFLAFCFEYAGVINSGLSYNCSLPLAFDGSCSGLQHFSAMLRDEIGGKAVNLLPSAEYQDIYRIVSDKVNEMLKQDLINGTSTTVETVTDKKTGEITQRTKYGTKVMAQWWLEHGVNRGVTKRSVMTLVYGSKEFGFRDQVLSDTIQPAIDNGKGDMFLNPNQAAGYMAKLIWNAVSGTVVAAVEAMNWLKSAAKLLAAEVKDPKTGTVLRGRCAVHWVTPDGFPVWQEYKKPIQTRLNLMFLGQFRLQPTINTNKDSEIDAHKQESGIAPNFVHSQDGNHLRMTVVWAHEKYGIESFALIHDSFGTIPADAANLFKAVRETFVSTYESCDVLADFYDQFADQLHESQLDKMPALPAKGNLNLRDILKSDFAFA

SEQ ID NO: 879 - DNA, 2670 bp, synthetic construct
  misc_feature 1..2670: note = Variant of RNA polymerase
  source 1..2670: mol_type = other DNA
atgcaccatcaccatcaccatatgaacacgattaacattgctaagaacgacttctctgacatcgaactggctgctatcccgttcaacactctggctgaccattacggtgagcgtttagctcgcgaacagttggcccttgagcatgagtcttacgagatgggtgaagcacgcttccgcaagatgtttgagcgtcaacttaaagctggtgaggttgcggataacgctgccgccaagcctctcatcactaccctactccctaagatgattgcacgcatcaacgactggtttgaggaagtgaaagctaagcgcggcaagcgcccgacagccttccagttcctgcaagaaatcaagccggaagccgtagcgtacatcaccattaagaccactctggcttgcctaaccagtgcggacaatacaaccgttcaggctgtagcaagcgcaatcggtcgggccattgaggacgaggctcgcttcggtcgtatccgtgaccttgaagctaagcacttcaagaaaaacgttgaggaacaactcaacaagcgcgtagggcacgtgtacaagaaagcatttatgcaagttgtcgagcacgacatgctctctaagggtctactcggtggcgaggcgtggtcttcgtggcataaggaagactctattcatgtaggagtacgctgcatcgagatgctcattgagtcaaccggaatggttagcttacaccgccaaaatgctggcgtagtaggtcaagactctgagactatcgaactcgcacctgaatacgctgaggctatcgcaacccgtgcaggtgcgctggctggcatctctccgatgttccaaccttgcgtagttcctcctaagccgtggactggcattactggtggtggctattgggctgcggggcgcaaacccctgcagttagtacgtactcgcagtctggcggcgcttcgccgctatgaagaagtgtcgatgccggaggtcatcaaagcagtcaacattgcgcagaatacagcatggcgtattaacaagaaagttctcgacgtagcgaataccatcacccaatggcagcactgtccagtcgcggatgtgcctgcgatggatcgtggcgaaatgccagctcgtccgttggacatcgataccaacgagattgcacttaaagcgtggaagaaagaagcttccgcgttctaccgcaaagacaaagcacgcgttagccgtcgtctgtcaatggagtttatgttatctcaggcgaacaagtttgcgaattataacgcaatctggtttccgcaaaacatggattggcgtgggcgcgtgtacgctgtcccgatgttcaatcctcagggcaacgatatgacgaaaggcctgctgacctttgcgcaggagaaacccattggtgaagacggcttctattggctcaagattcatggcgcaaatacagctggagtggataaagtaccgtttccacaacgcatcaaatttgttgaggataaccatacgaatattatggaatgcgcgaaagcaccgctggaaaacacttggtgggcggaacaggactcgccgttctgttttctggcgttctgctttgagtatgctggcgtcatcaatagtggtctgtcgtacaactgtagcttgcctctggcatttgatggtagttgctccggcctgcaacatttctcagcgatgttacgcgacgaaattggcggcaaagctgtgaatctcctcccatctgcggaataccaggatatttatcgtatcgtcagcgacaaagttaacgagatgctgaaacaagatctgattaacggtacctctaccaccgtggaaacggtgactgataagaagacaggcgaaattacccaacgcacgaaatacgggaccaaagtaatggcacagtggtggttagaacacggtgtgaatcgtggcgtcacgaaacgctcggttatgactttggtgtatgggagcaaagagtttggattccgcgatcaagtgctgagtgacaccattcaaccggcgatcgataacggcaaaggtgacatgtttctgaatccgaatcaggctgctggttacatggcgaaactgatctggaacgcagtgtccgggaccgtagtcgcagcagttgaggcgatgaactggctgaaaagtgcggcgaaattacttgctgctgaagtgaaggatcctaagacggatacagttctgcgtggccgctgcgcagtacattgggtgactcccgacggcttccctgtgtggcaggaatacaagaagcctattcagacgcgcttgaacctgatgttcctcggtcagttccgcttacagcctaccattaacaccaacaaagatagcgagattgatgcacacaaacaggagtctggtatcgctcctaactttgtacacagccaagacggtaaccaccttcgtatgactgtagtgtgggcacacgagaagtacggaatcgaatcttttgcactgattcacgactccttcggtaccattccggctgacgctgcgaacctgttcaaagcagtgcgcgaaactttcgttagcacatatgagtcttgtgatgtactggctgatttctacgaccagttcgctgaccagttgcacgagtctcaattggacaaaatgccagcacttccggctaaaggtaacttgaacctccgtgacatcttaaaatcggacttcgcgttcgcg

SEQ ID NO: 880 - protein, 890 aa, synthetic construct
  REGION 1..890: note = Variant of RNA polymerase
MHHHHHHMNTINIAKNDFSDIELAAIPFNTLADHYGERLAREQLALEHESYEMGEARFRKMFERQLKAGEVADNAAAKPLITTLLPKMIARINDWFEEVKAKRGKRPTAFQFLQEIKPEAVAYITIKTTLACLTSADNTTVQAVASAIGRAIEDEARFGRIRDLEAKHFKKNVEEQLNKRVGHVYKKAFMQVVEHDMLSKGLLGGEAWSSWHKEDSIHVGVRCIEMLIESTGMVSLHRQNAGVVGQDSETIELAPEYAEAIATRAGALAGISPMFQPCVVPPKPWTGITGGGYWAAGRKPLQLVRTRSLAALRRYEEVSMPEVIKAVNIAQNTAWRINKKVLDVANTITQWQHCPVADVPAMDRGEMPARPLDIDTNEIALKAWKKEASAFYRKDKARVSRRLSMEFMLSQANKFANYNAIWFPQNMDWRGRVYAVPMFNPQGNDMTKGLLTFAQEKPIGEDGFYWLKIHGANTAGVDKVPFPQRIKFVEDNHTNIMECAKAPLENTWWAEQDSPFCFLAFCFEYAGVINSGLSYNCSLPLAFDGSCSGLQHFSAMLRDEIGGKAVNLLPSAEYQDIYRIVSDKVNEMLKQDLINGTSTTVETVTDKKTGEITQRTKYGTKVMAQWWLEHGVNRGVTKRSVMTLVYGSKEFGFRDQVLSDTIQPAIDNGKGDMFLNPNQAAGYMAKLIWNAVSGTVVAAVEAMNWLKSAAKLLAAEVKDPKTDTVLRGRCAVHWVTPDGFPVWQEYKKPIQTRLNLMFLGQFRLQPTINTNKDSEIDAHKQESGIAPNFVHSQDGNHLRMTVVWAHEKYGIESFALIHDSFGTIPADAANLFKAVRETFVSTYESCDVLADFYDQFADQLHESQLDKMPALPAKGNLNLRDILKSDFAFA

SEQ ID NO: 881 - DNA, 2670 bp, synthetic construct
  misc_feature 1..2670: note = Variant of RNA polymerase
  source 1..2670: mol_type = other DNA
atgcaccatcaccatcaccatatgaacacgattaacattgctaagaacgacttctctgacatcgaactggctgctatcccgttcaacactctggctgaccattacggtgagcgtttagctcgcgaacagttggcccttgagcatgagtcttacgagatgggtgaagcacgcttccgcaagatgtttgagcgtcaacttaaagctggtgaggttgcggataacgctgccgccaagcctctcatcactaccctactccctaagatgattgcacgcatcaacgactggtttgaggaagtgaaagctaagcgcggcaagcgcccgacagccttccagttcctgcaagaaatcaagccggaagccgtagcgtacatcaccattaagaccactctggcttgcctaaccagtgcggacaatacaaccgttcaggctgtagcaagcgcaatcggtcgggccattgaggacgaggctcgcttcggtcgtatccgtgaccttgaagctaagcacttcaagaaaaacgttgaggaacaactcaacaagcgcgtagggcacccgtacaagaaagcatttatgcaagttgtcgagcacgacatgctctctaagggtctactcggtggcgaggcgtggtcttcgtggcataaggaagactctattcatgtaggagtacgctgcatcgagatgctcattgagtcaaccggaatggttagcttacaccgccaaaatgctggcgtagtaggtcaagactctgagactatcgaactcgcacctgaatacgctgaggctatcgcaacccgtgcaggtgcgctggctggcatctctccgatgttccaaccttgcgtagttcctcctaagccgtggactggcattactggtggtggctattgggctgcggggcgcaaacccctgcagttagtacgtactcgcagtctggcggcgcttcgccgctatgaagaagtgtcgatgccggaggtcatcaaagcagtcaacattgcgcagaatacagcatggcgtattaacaagaaagttctcgacgtagcgaataccatcacccaatggcagcactgtccagtcgcggatgtgcctgcgatggatcgtggcgaaatgccagctcgtccgttggacatcgataccaacgagattgcacttaaagcgtggaagaaagaagcttccgcgttctaccgcaaagacaaagcacgcgttagccgtcgtctgtcaatggagtttatgttatctcaggcgaacaagtttgcgaatgaggtggcaatctggtttccgcaaaacatggattggcgtgggcgcgtgtacgctgtcccgatgttcaatcctcagggcaacgatatgacgaaaggcctgctgacctttgcgcaggagaaacccattggtgaagacggcttctattggctcaagattcatggcgcaaatacagctggagtggataaagtaccgtttccacaacgcatcaaatttgttgaggataaccatacgaatattatggaatgcgcgaaagcaccgctggaaaacacttggtgggcggaacaggactcgccgttctgttttctggcgttctgctttgagtatgctggcgtcatcaatagtggtctgtcgtacaactgtagcttgcctctggcatttgatggtagttgctccggcctgcaacatttctcagcgatgttacgcgacgaaattggcggcaaagctgtgaatctcctcccatctgcggaataccaggatatttatcgtatcgtcagcgacaaagttaacgagatgctgaaacaagatctgattaacggtacctctaccaccgtggaaacggtgactgataagaagacaggcgaaattacccaacgcacgaaatacgggaccaaagtaatggcacagtggtggttagaacacggtgtgaatcgtggcgtcacgaaacgctcggttatgactttggtgtatgggagcaaagagtttggattccgcgatcaagtgctgagtgacaccattcaaccggcgatcgataacggcaaaggtgacatgtttctgaatccgaatcaggctgctggttacatggcgaaactgatctggaacgcagtgtccgggaccgtagtcgcagcagttgaggcgatgaactggctgaaaagtgcggcgaaattacttgctgctgaagtgaaggatcctaagacggatacagttctgcgtggccgctgcgcagtacattgggtgactcccgacggcttccctgtgtggcaggaatacaagaagcctattcagacgcgcttgaacctgatgttcctcggtcagttccgcttacagcctaccattaacaccaacaaagatagcgagattgatgcacacaaacaggagtctggtatcgctcctaactttgtacacagccaagacggtaaccaccttcgtatgactgtagtgtgggcacacgagaagtacggaatcgaatcttttgcactgattcacgactccttcggtaccattccggctgacgctgcgaacctgttcaaagcagtgcgcgaaactttcgttagcacatatgagtcttgtgatgtactggctgatttctacgaccagttcgctgaccagttgcacgagtctcaactggacaaaatgccagcacttccggctaaaggtaacttgaacctccgtgacatcttaaaatcggacttcgcgttcgcg

SEQ ID NO: 882 - protein, 890 aa, synthetic construct
  REGION 1..890: note = Variant of RNA polymerase
MHHHHHHMNTINIAKNDFSDIELAAIPFNTLADHYGERLAREQLALEHESYEMGEARFRKMFERQLKAGEVADNAAAKPLITTLLPKMIARINDWFEEVKAKRGKRPTAFQFLQEIKPEAVAYITIKTTLACLTSADNTTVQAVASAIGRAIEDEARFGRIRDLEAKHFKKNVEEQLNKRVGHPYKKAFMQVVEHDMLSKGLLGGEAWSSWHKEDSIHVGVRCIEMLIESTGMVSLHRQNAGVVGQDSETIELAPEYAEAIATRAGALAGISPMFQPCVVPPKPWTGITGGGYWAAGRKPLQLVRTRSLAALRRYEEVSMPEVIKAVNIAQNTAWRINKKVLDVANTITQWQHCPVADVPAMDRGEMPARPLDIDTNEIALKAWKKEASAFYRKDKARVSRRLSMEFMLSQANKFANEVAIWFPQNMDWRGRVYAVPMFNPQGNDMTKGLLTFAQEKPIGEDGFYWLKIHGANTAGVDKVPFPQRIKFVEDNHTNIMECAKAPLENTWWAEQDSPFCFLAFCFEYAGVINSGLSYNCSLPLAFDGSCSGLQHFSAMLRDEIGGKAVNLLPSAEYQDIYRIVSDKVNEMLKQDLINGTSTTVETVTDKKTGEITQRTKYGTKVMAQWWLEHGVNRGVTKRSVMTLVYGSKEFGFRDQVLSDTIQPAIDNGKGDMFLNPNQAAGYMAKLIWNAVSGTVVAAVEAMNWLKSAAKLLAAEVKDPKTDTVLRGRCAVHWVTPDGFPVWQEYKKPIQTRLNLMFLGQFRLQPTINTNKDSEIDAHKQESGIAPNFVHSQDGNHLRMTVVWAHEKYGIESFALIHDSFGTIPADAANLFKAVRETFVSTYESCDVLADFYDQFADQLHESQLDKMPALPAKGNLNLRDILKSDFAFA

SEQ ID NO: 883 - DNA, 2670 bp, synthetic construct
  misc_feature 1..2670: note = Variant of RNA polymerase
  source 1..2670: mol_type = other DNA
atgcaccatcaccatcaccatatgaacacgattaacattgctaagaacgacttctctgacatcgaactggctgctatcccgttcaacactctggctgaccattacggtgagcgtttagctcgcgaacagttggcccttgagcatgagtcttacgagatgggtgaagcacgcttccgcaagatgtttgagcgtcaacttaaagctggtgaggttgcggataacgctgccgccaagcctctcatcactaccctactccctaagatgattgcacgcatcaacgactggtttgaggaagtgaaagctaagcgcggcaagcgcccgacagccttccagttcctgcaagaaatcaagccggaagccgtagcgtacatcaccattaagaccactctggcttgcctaaccagtgcggacaatacaaccgttcaggctgtagcaagcgcaatcggtcgggccattgaggacgaggctcgcttcggtcgtatccgtgaccttgaagctaagcacttcaagaagaacgttgaggaacaactcaacaagcgcgtagggcacgtctacaagaaagcatttatgcaagttgtcgagcacgacatgctctctaagggtctactcggtggcgaggcgtggtcttcgtggcataaggaagactctattcatgtaggagtacgctgcatcgagatgctcattgagtcaaccggaatggttagcttacaccgccaaaatgctggcgtagtaggtcaagactctgagactatcgaactcgcacctgaatacgctgaggctatcgcaacccgtgcaggtgcgctggctggcatctctccgatgttccaaccttgcgtagttcctcctaagccgtggactggcattactggtggtggctattgggctgcggggcgcaaacccctgcagttagtacgtactcgcagtctggcggcgcttcgccgctatgaagaagtgtcgatgccggaggtcatcaaagcagtcaacattgcgcagaatacagcatggcgtattaacaagaaagttctcgacgtagcgaataccatcacccaatggcagcactgtccagtcgcggatgtgcctgcgatggatcgtggcgaaatgccagctcgtccgttggacatcgataccaacgagattgcacttaaagcgtggaagaaagaagcttccgcgttctaccgcaaagacaaagcacgcgttagccgtcgtctgtcaatggagtttatgttatctcaggcgaacaagtttgcgaatgagaaggcaatctggtttccgcaaaacatggattggcgtgggcgcgtgtacgctgtcccgatgttcaatcctcagggcaacgatatgacgaaaggcctgctgacctttgcgcaggagaaacccattggtgaagacggcttctattggctcaagattcatggcgcaaatacagctggagtggataaagtaccgtttccacaacgcatcaaatttgttgaggataaccatacgaatattatggaatgcgcgaaagcaccgctggaaaacacttggtgggcggaacaggactcgccgttctgttttctggcgttctgctttgagtatgctggcgtcatcaatagtggtctgtcgtacaactgtagcttgcctctggcatttgatggtagttgctccggcctgcaacatttctcagcgatgttacgcgacgaaattggcggcaaagctgtgaatctcctcccatctgcggaataccaggatatttatcgtatcgtcagcgacaaagttaacgagatgctgaaacaagatctgattaacggtacctctaccaccgtggaaacggtgactgataagaagacaggcgaaattacccaacgcacgaaatacgggaccaaagtaatggcacagtggtggttagaacacggtgtgaatcgtggcgtcacgaaacgctcggttatgactttggtgtatgggagcaaagagtttggattccgcgatcaagtgctgagtgacaccattcaaccggcgatcgataacggcaaaggtgacatgtttctgaatccgaatcaggctgctggttacatggcgaaactgatctggaacgcagtgtccgggaccgtagtcgcagcagttgaggcgatgaactggctgaaaagtgcggcgaaattacttgctgctgaagtgaaggatcctaagacggatacagttctgcgtggccgctgcgcagtacattgggtgactcccgacggcttccctgtgtggcaggaatacaagaagcctattcagacgcgcttgaacctgatgttcctcggtcagttccgcttacagcctaccattaacaccaacaaagatagcgagattgatgcacacaaacaggagtctggtatcgctcctaactttgtacacagccaagacggtaaccaccttcgtatgactgtagtgtgggcacacgagaagtacggaatcgaatcttttgcactgattcacgactccttcggtaccattccggctgacgctgcgaacctgttcaaagcagtgcgcgaaactttcgttagcacatatgagtcttgtgatgtactggctgatttctacgaccagttcgctgaccagttgcacgagtctcaactggacaaaatgccagcacttccggctaaaggtaacttgaacctccgtgacatcttaaaatcggacttcgcgttcgcg

SEQ ID NO: 884 - protein, 890 aa, synthetic construct
  REGION 1..890: note = Variant of RNA polymerase
MHHHHHHMNTINIAKNDFSDIELAAIPFNTLADHYGERLAREQLALEHESYEMGEARFRKMFERQLKAGEVADNAAAKPLITTLLPKMIARINDWFEEVKAKRGKRPTAFQFLQEIKPEAVAYITIKTTLACLTSADNTTVQAVASAIGRAIEDEARFGRIRDLEAKHFKKNVEEQLNKRVGHVYKKAFMQVVEHDMLSKGLLGGEAWSSWHKEDSIHVGVRCIEMLIESTGMVSLHRQNAGVVGQDSETIELAPEYAEAIATRAGALAGISPMFQPCVVPPKPWTGITGGGYWAAGRKPLQLVRTRSLAALRRYEEVSMPEVIKAVNIAQNTAWRINKKVLDVANTITQWQHCPVADVPAMDRGEMPARPLDIDTNEIALKAWKKEASAFYRKDKARVSRRLSMEFMLSQANKFANEKAIWFPQNMDWRGRVYAVPMFNPQGNDMTKGLLTFAQEKPIGEDGFYWLKIHGANTAGVDKVPFPQRIKFVEDNHTNIMECAKAPLENTWWAEQDSPFCFLAFCFEYAGVINSGLSYNCSLPLAFDGSCSGLQHFSAMLRDEIGGKAVNLLPSAEYQDIYRIVSDKVNEMLKQDLINGTSTTVETVTDKKTGEITQRTKYGTKVMAQWWLEHGVNRGVTKRSVMTLVYGSKEFGFRDQVLSDTIQPAIDNGKGDMFLNPNQAAGYMAKLIWNAVSGTVVAAVEAMNWLKSAAKLLAAEVKDPKTDTVLRGRCAVHWVTPDGFPVWQEYKKPIQTRLNLMFLGQFRLQPTINTNKDSEIDAHKQESGIAPNFVHSQDGNHLRMTVVWAHEKYGIESFALIHDSFGTIPADAANLFKAVRETFVSTYESCDVLADFYDQFADQLHESQLDKMPALPAKGNLNLRDILKSDFAFA

SEQ ID NO: 885 - DNA, 2670 bp, synthetic construct
  misc_feature 1..2670: note = Variant of RNA polymerase
  source 1..2670: mol_type = other DNA
atgcaccatcaccatcaccatatgaacacgattaacattgctaagaacgacttctctgacatcgaactggctgctatcccgttcaacactctggctgaccattacggtgagcgtttagctcgcgaacagttggcccttgagcatgagtcttacgagatgggtgaagcacgcttccgcaagatgtttgagcgtcaacttaaagctggtgaggttgcggataacgctgccgccaagcctctcatcactaccctactccctaagatgattgcacgcatcaacgactggtttgaggaagtgaaagctaagcgcggcaagcgcccgacagccttccagttcctgcaagaaatcaagccggaagccgtagcgtacatcaccattaagaccactctggcttgcctaaccagtgcggacaatacaaccgttcaggctgtagcaagcgcaatcggtcgggccattgaggacgaggctcgcttcggtcgtatccgtgaccttgaagctaagcacttcaagaaaaacgttgaggaacaactcaacaagcgcgtagggcacgtgtacaagaaagcatttatgcaagttgtcgagcacgacatgctctctaagggtctactcggtggcgaggcgtggtcttcgtggcataaggaagactctattcatgtaggagtacgctgcatcgagatgctcattgagtcaaccggaatggttagcttacaccgccaaaatgctggcgtagtaggtcaagactctgagactatcgaactcgcacctgaatacgctgaggctatcgcaacccgtgcaggtgcgctggctggcatctctccgatgttccaaccttgcgtagttcctcctaagccgtggactggcattactggtggtggctattgggctgcggggcgcaaacccctgcagttagtacgtactcgcagtctggcggcgcttcgccgctatgaagaagtgtcgatgccggaggtcatcaaagcagtcaacattgcgcagaatacagcatggcgtattaacaagaaagttctcgacgtagcgaataccatcacccaatggcagcactgtccagtcgcggatgtgcctgcgatggatcgtggcgaaatgccagctcgtccgttggacatcgataccaacgagattgcacttaaagcgtggaagaaagaagcttccgcgttctaccgcaaagacaaagcacgcgttagccgtcgtctgtcaatggagtttatgttatctcaggcgaacaagtttgcgaattatatggcaatctggtttccgcaaaacatggattggcgtgggcgcgtgtacgctgtcccgatgttcaatcctcagggcaacgatatgacgaaaggcctgctgacctttgcgcaggagaaacccattggtgaagacggcttctattggctcaagattcatggcgcaaatacagctggagtggataaagtaccgtttccacaacgcatcaaatttgttgaggataaccatacgaatattatggaatgcgcgaaagcaccgctggaaaacacttggtgggcggaacaggactcgccgttctgttttctggcgttctgctttgagtatgctggcgtcatcaatagtggtctgtcgtacaactgtagcttgcctctggcatttgatggtagttgctccggcctgcaacatttctcagcgatgttacgcgacgaaattggcggcaaagctgtgaatctcctcccatctgcggaataccaggatatttatcgtatcgtcagcgacaaagttaacgagatgctgaaacaagatctgattaacggtacctctaccaccgtggaaacggtgactgataagaagacaggcgaaattacccaacgcacgaaatacgggaccaaagtaatggcacagtggtggttagaacacggtgtgaatcgtggcgtcacgaaacgctcggttatgactttggtgtatgggagcaaagagtttggattccgcgatcaagtgctgagtgacaccattcaaccggcgatcgataacggcaaaggtgacatgtttctgaatccgaatcaggctgctggttacatggcgaaactgatctggaacgcagtgtccgggaccgtagtcgcagcagttgaggcgatgaactggctgaaaagtgcggcgaaattacttgctgctgaagtgaaggatccaaagacggacacagttctgcgtggccgctgcgcagtacattgggtgactcccgacggcttccctgtgtggcaggaatacaagaagcctattcagacgcgcttgaacctgatgttcctcggtcagttccgcttacagcctaccattaacaccaacaaagatagcgagattgatgcacacaaacaggagtctggtatcgctcctaactttgtacacagccaagacggtaaccaccttcgtatgactgtagtgtgggcacacgagaagtacggaatcgaatcttttgcactgattcacgactccttcggtaccattccggctgacgctgcgaacctgttcaaagcagtgcgcgaaactatggtttcgacatatgagtcttgtgatgtactggctgatttctacgaccagttcgctgaccagttgcacgagtctcaacgcgacaaaatgccagcacttccggctaaaggtaacttgaacctccgtgacatcttaaaatcggacttcgcgttcgcg

SEQ ID NO: 886 - protein, 890 aa, synthetic construct
  REGION 1..890: note = Variant of RNA polymerase
MHHHHHHMNTINIAKNDFSDIELAAIPFNTLADHYGERLAREQLALEHESYEMGEARFRKMFERQLKAGEVADNAAAKPLITTLLPKMIARINDWFEEVKAKRGKRPTAFQFLQEIKPEAVAYITIKTTLACLTSADNTTVQAVASAIGRAIEDEARFGRIRDLEAKHFKKNVEEQLNKRVGHVYKKAFMQVVEHDMLSKGLLGGEAWSSWHKEDSIHVGVRCIEMLIESTGMVSLHRQNAGVVGQDSETIELAPEYAEAIATRAGALAGISPMFQPCVVPPKPWTGITGGGYWAAGRKPLQLVRTRSLAALRRYEEVSMPEVIKAVNIAQNTAWRINKKVLDVANTITQWQHCPVADVPAMDRGEMPARPLDIDTNEIALKAWKKEASAFYRKDKARVSRRLSMEFMLSQANKFANYMAIWFPQNMDWRGRVYAVPMFNPQGNDMTKGLLTFAQEKPIGEDGFYWLKIHGANTAGVDKVPFPQRIKFVEDNHTNIMECAKAPLENTWWAEQDSPFCFLAFCFEYAGVINSGLSYNCSLPLAFDGSCSGLQHFSAMLRDEIGGKAVNLLPSAEYQDIYRIVSDKVNEMLKQDLINGTSTTVETVTDKKTGEITQRTKYGTKVMAQWWLEHGVNRGVTKRSVMTLVYGSKEFGFRDQVLSDTIQPAIDNGKGDMFLNPNQAAGYMAKLIWNAVSGTVVAAVEAMNWLKSAAKLLAAEVKDPKTDTVLRGRCAVHWVTPDGFPVWQEYKKPIQTRLNLMFLGQFRLQPTINTNKDSEIDAHKQESGIAPNFVHSQDGNHLRMTVVWAHEKYGIESFALIHDSFGTIPADAANLFKAVRETMVSTYESCDVLADFYDQFADQLHESQRDKMPALPAKGNLNLRDILKSDFAFA

SEQ ID NO: 887 - DNA, 2670 bp, synthetic construct
  misc_feature 1..2670: note = Variant of RNA polymerase
  source 1..2670: mol_type = other DNA
atgcaccatcaccatcaccatatgaacacgattaacattgctaagaacgacttctctgacatcgaactggctgctatcccgttcaacactctggctgaccattacggtgagcgtttagctcgcgaacagttggcccttgagcatgagtcttacgagatgggtgaagcacgcttccgcaagatgtttgagcgtcaacttaaagctggtgaggttgcggataacgctgccgccaagcctctcatcactaccctactccctaagatgattgcacgcatcaacgactggtttgaggaagtgaaagctaagcgcggcaagcgcccgacagccttccagttcctgcaagaaatcaagccggaagccgtagcgtacatcaccattaagaccactctggcttgcctaaccagtgcggacaatacaaccgttcaggctgtagcaagcgcaatcggtcgggccattgaggacgaggctcgcttcggtcgtatccgtgaccttgaagctaagcacttcaagaagaacgttgaggaacaactcaacaagcgcgtagggcacgtgtacaagaaagcatttatgcaagttgtcgagcacgacatgctctctaagggtctactcggtggcgaggcgtggtcttcgtggcataaggaagactctattcatgtaggagtacgctgcatcgagatgctcattgagtcaaccggaatggttagcttacaccgccaaaatgctggcgtagtaggtcaagactctgagactatcgaactcgcacctgaatacgctgaggctatcgcaacccgtgcaggtgcgctggctggcatctctccgatgttccaaccttgcgtagttcctcctaagccgtggactggcattactggtggtggctattgggctgcggggcgcaaacccctgcagttagtacgtactcgcagtctggcggcgcttcgccgctatgaagaagtgtcgatgccggaggtcatcaaagcagtcaacattgcgcagaatacagcatggcgtattaacaagaaagttctcgacgtagcgaataccatcacccaatggcagcactgtccagtcgcggatgtgcctgcgatggatcgtggcgaaatgccagctcgtccgttggacatcgataccaacgagattgcacttaaagcgtggaagaaagaagcttccgcgttctaccgcaaagacaaagcacgcgttagccgtcgtctgtcaatggagtttatgttatctcaggcgaacaagtttgcgaattataaagcaatctggtttccgcaaaacatggattggcgtgggcgcgtgtacgctgtcccgatgttcaatcctcagggcaacgatatgacgaaaggcctgctgacctttgcgcaggagaaacccattggtgaagacggcttctattggctcaagattcatggcgcaaatacagctggagtggataaagtaccgtttccacaacgcatcaaatttgttgaggataaccatacgaatattatggaatgcgcgaaagcaccgctggaaaacacttggtgggcggaacaggactcgccgttctgttttctggcgttctgctttgagtatgctggcgtcatcaatagtggtctgtcgtacaactgtagcttgcctctggcatttgatggtagttgctccggcctgcaacatttctcagcgatgttacgcgacgaaattggcggcaaagctgtgaatctcctcccatctgcggaataccaggatatttatcgtatcgtcagcgacaaagttaacgagatgctgaaacaagatctgattaacggtacctctaccaccgtggaaacggtgactgataagaagacaggcgaaattacccaacgcacgaaatacgggaccaaagaaatggcacagtggtggttagaacacggtgtgaatcgtggcgtcacgaaacgctcggttatgactttggtgtatgggagcaaagagtttggattccgcgatcaagtgctgagtgacaccattcaaccggcgatcgataacggcaaaggtgacatgtttctgaatccgaatcaggctgctggttacatggcgaaactgatctggaacgcagtgtccgggaccgtagtcgcagcagttgaggcgatgaactggctgaaaagtgcggcgaaattacttgctgctgaagtgaaggatccaaagacgggcacagttctgcgtggccgctgcgcagtacattgggtgactcccgacggcttccctgtgtggcaggaatacaagaagcctattcagacgcgcttgaacctgatgttcctcggtcagttccgcttacagcctaccattaacaccaacaaagatagcgagattgatgcacacaaacaggagtctggtatcgctcctaactttgtacacagccaagacggtaaccaccttcgtatgactgtagtgtgggcacacgagaagtacggaatcgaatcttttgcactgattcacgactccttcggtaccattccggctgacgctgcgaacctgttcaaagcagtgcgcgaaactatggtttcgacatatgagtcttgtgatgtactggctgatttctacgaccagttcgctgaccagttgcacgagtctcaattggacaaaatgccagcacttccggctaaaggtaacttgaacctccgtgacatcttaaaatcggacttcgcgttcgcg

SEQ ID NO: 888 - protein, 890 aa, synthetic construct
  REGION 1..890: note = Variant of RNA polymerase
MHHHHHHMNTINIAKNDFSDIELAAIPFNTLADHYGERLAREQLALEHESYEMGEARFRKMFERQLKAGEVADNAAAKPLITTLLPKMIARINDWFEEVKAKRGKRPTAFQFLQEIKPEAVAYITIKTTLACLTSADNTTVQAVASAIGRAIEDEARFGRIRDLEAKHFKKNVEEQLNKRVGHVYKKAFMQVVEHDMLSKGLLGGEAWSSWHKEDSIHVGVRCIEMLIESTGMVSLHRQNAGVVGQDSETIELAPEYAEAIATRAGALAGISPMFQPCVVPPKPWTGITGGGYWAAGRKPLQLVRTRSLAALRRYEEVSMPEVIKAVNIAQNTAWRINKKVLDVANTITQWQHCPVADVPAMDRGEMPARPLDIDTNEIALKAWKKEASAFYRKDKARVSRRLSMEFMLSQANKFANYKAIWFPQNMDWRGRVYAVPMFNPQGNDMTKGLLTFAQEKPIGEDGFYWLKIHGANTAGVDKVPFPQRIKFVEDNHTNIMECAKAPLENTWWAEQDSPFCFLAFCFEYAGVINSGLSYNCSLPLAFDGSCSGLQHFSAMLRDEIGGKAVNLLPSAEYQDIYRIVSDKVNEMLKQDLINGTSTTVETVTDKKTGEITQRTKYGTKEMAQWWLEHGVNRGVTKRSVMTLVYGSKEFGFRDQVLSDTIQPAIDNGKGDMFLNPNQAAGYMAKLIWNAVSGTVVAAVEAMNWLKSAAKLLAAEVKDPKTGTVLRGRCAVHWVTPDGFPVWQEYKKPIQTRLNLMFLGQFRLQPTINTNKDSEIDAHKQESGIAPNFVHSQDGNHLRMTVVWAHEKYGIESFALIHDSFGTIPADAANLFKAVRETMVSTYESCDVLADFYDQFADQLHESQLDKMPALPAKGNLNLRDILKSDFAFA

SEQ ID NO: 889 - DNA, 2670 bp, synthetic construct
  misc_feature 1..2670: note = Variant of RNA polymerase
  source 1..2670: mol_type = other DNA
atgcaccatcaccatcaccatatgaacacgattaacattgctaagaacgacttctctgacatcgaactggctgctatcccgttcaacactctggctgaccattacggtgagcgtttagctcgcgaacagttggcccttgagcatgagtcttacgagatgggtgaagcacgcttccgcaagatgtttgagcgtcaacttaaagctggtgaggttgcggataacgctgccgccaagcctctcatcactaccctactccctaagatgattgcacgcatcaacgactggtttgaggaagtgaaagctaagcgcggcaagcgcccgacagccttccagttcctgcaagaaatcaagccggaagccgtagcgtacatcaccattaagaccactctggcttgcctaaccagtgcggacaatacaaccgttcaggctgtagcaagcgcaatcggtcgggccattgaggacgaggctcgcttcggtcgtatccgtgaccttgaagctaagcacttcaagaaaaacgttgaggaacaactcaacaagcgcgtagggcacgtctacaagaaagcatttatgcaagttgtcgagcacgacatgctctctaagggtctactcggtggcgaggcgtggtcttcgtggcataaggaagactctattcatgtaggagtacgctgcatcgagatgctcattgagtcaaccggaatggttagcttacaccgccaaaatgctggcgtagtaggtcaagactctgagactatcgaactcgcacctgaatacgctgaggctatcgcaacccgtgcaggtgcgctggctggcatctctccgatgttccaaccttgcgtagttcctcctaagccgtggactggcattactggtggtggctattgggctgcggggcgcaaacccctgcagttagtacgtactcgcagtctggcggcgcttcgccgctatgaagaagtgtcgatgccggaggtcatcaaagcagtcaacattgcgcagaatacagcatggcgtattaacaagaaagttctcgacgtagcgaataccatcacccaatggcagcactgtccagtcgcggatgtgcctgcgatggatcgtggcgaaatgccagctcgtccgttggacatcgataccaacgagattgcacttaaagcgtggaagaaagaagcttccgcgttctaccgcaaagacaaagcacgcgttagccgtcgtctgtcaatggagtttatgttatctcaggcgaacaagtttgcgaattataacgcaatctggtttccgcaaaacatggattggcgtgggcgcgtgtacgctgtcccgatgttcaatcctcagggcaacgatatgacgaaaggcctgctgacctttgcgcaggagaaacccattggtgaagacggcttctattggctcaagattcatggcgcaaatacagctggagtggataaagtaccgtttccacaacgcatcaaatttgttgaggataaccatacgaatattatggaatgcgcgaaagcaccgctggaaaacacttggtgggcggaacaggactcgccgttctgttttctggcgttctgctttgagtatgctggcgtcatcaatagtggtctgtcgtacaactgtagcttgcctctggcatttgatggtagttgctccggcctgcaacatttctcagcgatgttacgcgacgaaattggcggcaaagctgtgaatctcctcccatctgcggaataccaggatatttatcgtatcgtcagcgacaaagttaacgagatgctgaaacaagatctgattaacggtacctctaccaccgtggaaacggtgactgataagaagacaggcgaaattacccaacgcacgaaatacgggaccaaagttatggcacagtggtggttagaacacggtgtgaatcgtggcgtcacgaaacgctcggttatgactttggtgtatgggagcaaagagtttggattccgcgatcaagtgctgagtgacaccattcaaccggcgatcgataacggcaaaggtgacatgtttctgaatccgaatcaggctgctggttacatggcgaaactgatctggaacgcagtgtccgggaccgtagtcgcagcagttgaggcgatgaactggctgaaaagtgcggcgaaattacttgctgctgaagtgaaggatccaaagacgggcacagttctgcgtggccgctgcgcagtacattgggtgactcccgacggcttccctgtgtggcaggaatacaagaagcctattcagacgcgcttgaacctgatgttcctcggtcagttccgcttacagcctaccattaacaccaacaaagatagcgagattgatgcacacaaacaggagtctggtatcgctcctaactttgtacacagccaagacggtaaccaccttcgtatgactgtagtgtgggcacacgagaagtacggaatcgaatcttttgcactgattcacgactccttcggtaccattccggctgacgctgcgaacctgttcaaagcagtgcgcgaaactatggtttcgacatatgagtcttgtgatgtactggctgatttctacgaccagttcgctgaccagttgcacgagtctcaattggacaaaatgccagcacttccggctaaaggtaacttgaacctccgtgacatcttaaaatcggacttcgcgttcgcg

SEQ ID NO: 890 - protein, 890 aa, synthetic construct
  REGION 1..890: note = Variant of RNA polymerase
MHHHHHHMNTINIAKNDFSDIELAAIPFNTLADHYGERLAREQLALEHESYEMGEARFRKMFERQLKAGEVADNAAAKPLITTLLPKMIARINDWFEEVKAKRGKRPTAFQFLQEIKPEAVAYITIKTTLACLTSADNTTVQAVASAIGRAIEDEARFGRIRDLEAKHFKKNVEEQLNKRVGHVYKKAFMQVVEHDMLSKGLLGGEAWSSWHKEDSIHVGVRCIEMLIESTGMVSLHRQNAGVVGQDSETIELAPEYAEAIATRAGALAGISPMFQPCVVPPKPWTGITGGGYWAAGRKPLQLVRTRSLAALRRYEEVSMPEVIKAVNIAQNTAWRINKKVLDVANTITQWQHCPVADVPAMDRGEMPARPLDIDTNEIALKAWKKEASAFYRKDKARVSRRLSMEFMLSQANKFANYNAIWFPQNMDWRGRVYAVPMFNPQGNDMTKGLLTFAQEKPIGEDGFYWLKIHGANTAGVDKVPFPQRIKFVEDNHTNIMECAKAPLENTWWAEQDSPFCFLAFCFEYAGVINSGLSYNCSLPLAFDGSCSGLQHFSAMLRDEIGGKAVNLLPSAEYQDIYRIVSDKVNEMLKQDLINGTSTTVETVTDKKTGEITQRTKYGTKVMAQWWLEHGVNRGVTKRSVMTLVYGSKEFGFRDQVLSDTIQPAIDNGKGDMFLNPNQAAGYMAKLIWNAVSGTVVAAVEAMNWLKSAAKLLAAEVKDPKTGTVLRGRCAVHWVTPDGFPVWQEYKKPIQTRLNLMFLGQFRLQPTINTNKDSEIDAHKQESGIAPNFVHSQDGNHLRMTVVWAHEKYGIESFALIHDSFGTIPADAANLFKAVRETMVSTYESCDVLADFYDQFADQLHESQLDKMPALPAKGNLNLRDILKSDFAFA

SEQ ID NO: 891 - DNA, 2670 bp, synthetic construct
  misc_feature 1..2670: note = Variant of RNA polymerase
  source 1..2670: mol_type = other DNA
atgcaccatcaccatcaccatatgaacacgattaacattgctaagaacgacttctctgacatcgaactggctgctatcccgttcaacactctggctgaccattacggtgagcgtttagctcgcgaacagttggcccttgagcatgagtcttacgagatgggtgaagcacgcttccgcaagatgtttgagcgtcaacttaaagctggtgaggttgcggataacgctgccgccaagcctctcatcactaccctactccctaagatgattgcacgcatcaacgactggtttgaggaagtgaaagctaagcgcggcaagcgcccgacagccttccagttcctgcaagaaatcaagccggaagccgtagcgtacatcaccattaagaccactctggcttgcctaaccagtgcggacaatacaaccgttcaggctgtagcaagcgcaatcggtcgggccattgaggacgaggctcgcttcggtcgtatccgtgaccttgaagctaagcacttcaagaagaacgttgaggaacaactcaacaagcgcgtagggcacgtgtacaagaaagcatttatgcaagttgtcgagcacgacatgctctctaagggtctactcggtggcgaggcgtggtcttcgtggcataaggaagactctattcatgtaggagtacgctgcatcgagatgctcattgagtcaaccggaatggttagcttacaccgccaaaatgctggcgtagtaggtcaagactctgagactatcgaactcgcacctgaatacgctgaggctatcgcaacccgtgcaggtgcgctggctggcatctctccgatgttccaaccttgcgtagttcctcctaagccgtggactggcattactggtggtggctattgggctgcggggcgcaaacccctgcagttagtacgtactcgcagtctggcggcgcttcgccgctatgaagaagtgtcgatgccggaggtcatcaaagcagtcaacattgcgcagaatacagcatggcgtattaacaagaaagttctcgacgtagcgaataccatcacccaatggcagcactgtccagtcgcggatgtgcctgcgatggatcgtggcgaaatgccagctcgtccgttggacatcgataccaacgagattgcacttaaagcgtggaagaaagaagcttccgcgttctaccgcaaagacaaagcacgcgttagccgtcgtctgtcaatggagtttatgttatctcaggcgaacaagtttgcgaatgaggaggcaatctggtttccgcaaaacatggattggcgtgggcgcgtgtacgctgtcccgatgttcaatcctcagggcaacgatatgacgaaaggcctgctgacctttgcgcaggagaaacccattggtgaagacggcttctattggctcaagattcatggcgcaaatacagctggagtggataaagtaccgtttccacaacgcatcaaatttgttgaggataaccatacgaatattatggaatgcgcgaaagcaccgctggaaaacacttggtgggcggaacaggactcgccgttctgttttctggcgttctgctttgagtatgctggcgtcatcaatagtggtctgtcgtacaactgtagcttgcctctggcatttgatggtagttgctccggcctgcaacatttctcagcgatgttacgcgacgaaattggcggcaaagctgtgaatctcctcccatctgcggaataccaggatatttatcgtatcgtcagcgacaaagttaacgagatgctgaaacaagatctgattaacggtacctctaccaccgtggaaacggtgactgataagaagacaggcgaaattacccaacgcacgaaatacgggaccaaagtaatggcacagtggtggttagaacacggtgtgaatcgtggcgtcacgaaacgctcggttatgactttggtgtatgggagcaaagagtttggattccgcgatcaagtgctgagtgacaccattcaaccggcgatcgataacggcaaaggtgacatgtttctgaatccgaatcaggctgctggttacatggcgaaactgatctggaacgcagtgtccgggaccgtagtcgcagcagttgaggcgatgaactggctgaaaagtgcggcgaaattacttgctgctgaagtgaaggatccaaagacgggcacagttctgcgtggccgctgcgcagtacattgggtgactcccgacggcttccctgtgtggcaggaatacaagaagcctattcagacgcgcttgaacctgatgttcctcggtcagttccgcttacagcctaccattaacaccaacaaagatagcgagattgatgcacacaaacaggagtctggtatcgctcctaactttgtacacagccaagacggtaaccaccttcgtatgactgtagtgtgggcacacgagaagtacggaatcgaatcttttgcactgattcacgactccttcggtaccattccggctgacgctgcgaacctgttcaaagcagtgcgcgaaactatggttagcacatatgagtcttgtgatgtactggctgatttctacgaccagttcgctgaccagttgcacgagtctcaattggacaaaatgccagcacttccggctaaaggtaacttgaacctccgtgacatcttaaaatcggacttcgcgttcgcg

SEQ ID NO: 892 - protein, 890 aa, synthetic construct
  REGION 1..890: note = Variant of RNA polymerase
MHHHHHHMNTINIAKNDFSDIELAAIPFNTLADHYGERLAREQLALEHESYEMGEARFRKMFERQLKAGEVADNAAAKPLITTLLPKMIARINDWFEEVKAKRGKRPTAFQFLQEIKPEAVAYITIKTTLACLTSADNTTVQAVASAIGRAIEDEARFGRIRDLEAKHFKKNVEEQLNKRVGHVYKKAFMQVVEHDMLSKGLLGGEAWSSWHKEDSIHVGVRCIEMLIESTGMVSLHRQNAGVVGQDSETIELAPEYAEAIATRAGALAGISPMFQPCVVPPKPWTGITGGGYWAAGRKPLQLVRTRSLAALRRYEEVSMPEVIKAVNIAQNTAWRINKKVLDVANTITQWQHCPVADVPAMDRGEMPARPLDIDTNEIALKAWKKEASAFYRKDKARVSRRLSMEFMLSQANKFANEEAIWFPQNMDWRGRVYAVPMFNPQGNDMTKGLLTFAQEKPIGEDGFYWLKIHGANTAGVDKVPFPQRIKFVEDNHTNIMECAKAPLENTWWAEQDSPFCFLAFCFEYAGVINSGLSYNCSLPLAFDGSCSGLQHFSAMLRDEIGGKAVNLLPSAEYQDIYRIVSDKVNEMLKQDLINGTSTTVETVTDKKTGEITQRTKYGTKVMAQWWLEHGVNRGVTKRSVMTLVYGSKEFGFRDQVLSDTIQPAIDNGKGDMFLNPNQAAGYMAKLIWNAVSGTVVAAVEAMNWLKSAAKLLAAEVKDPKTGTVLRGRCAVHWVTPDGFPVWQEYKKPIQTRLNLMFLGQFRLQPTINTNKDSEIDAHKQESGIAPNFVHSQDGNHLRMTVVWAHEKYGIESFALIHDSFGTIPADAANLFKAVRETMVSTYESCDVLADFYDQFADQLHESQLDKMPALPAKGNLNLRDILKSDFAFA

SEQ ID NO: 893 - DNA, 2670 bp, synthetic construct
  misc_feature 1..2670: note = Variant of RNA polymerase
  source 1..2670: mol_type = other DNA
atgcaccatcaccatcaccatatgaacacgattaacattgctaagaacgacttctctgacatcgaactggctgctatcccgttcaacactctggctgaccattacggtgagcgtttagctcgcgaacagttggcccttgagcatgagtcttacgagatgggtgaagcacgcttccgcaagatgtttgagcgtcaacttaaagctggtgaggttgcggataacgctgccgccaagcctctcatcactaccctactccctaagatgattgcacgcatcaacgactggtttgaggaagtgaaagctaagcgcggcaagcgcccgacagccttccagttcctgcaagaaatcaagccggaagccgtagcgtacatcaccattaagaccactctggcttgcctaaccagtgcggacaatacaaccgttcaggctgtagcaagcgcaatcggtcgggccattgaggacgaggctcgcttcggtcgtatccgtgaccttgaagctaagcacttcaagaagaacgttgaggaacaactcaacaagcgcgtagggcacgtctacaagaaagcatttatgcaagttgtcgagcacgacatgctctctaagggtctactcggtggcgaggcgtggtcttcgtggcataaggaagactctattcatgtaggagtacgctgcatcgagatgctcattgagtcaaccggaatggttagcttacaccgccaaaatgctggcgtagtaggtcaagactctgagactatcgaactcgcacctgaatacgctgaggctatcgcaacccgtgcaggtgcgctggctggcatctctccgatgttccaaccttgcgtagttcctcctaagccgtggactggcattactggtggtggctattgggctgcggggcgcaaacccctgcagttagtacgtactcgcagtctggcggcgcttcgccgctatgaagaagtgtcgatgccggaggtcatcaaagcagtcaacattgcgcagaatacagcatggcgtattaacaagaaagttctcgacgtagcgaataccatcacccaatggcagcactgtccagtcgcggatgtgcctgcgatggatcgtggcgaaatgccagctcgtccgttggacatcgataccaacgagattgcacttaaagcgtggaagaaagaagcttccgcgttctaccgcaaagacaaagcacgcgttagccgtcgtctgtcaatggagtttatgttatctcaggcgaacaagtttgcgaattatgaggcaatctggtttccgcaaaacatggattggcgtgggcgcgtgtacgctgtcccgatgttcaatcctcagggcaacgatatgacgaaaggcctgctgacctttgcgcaggagaaacccattggtgaagacggcttctattggctcaagattcatggcgcaaatacagctggagtggataaagtaccgtttccacaacgcatcaaatttgttgaggataaccatacgaatattatggaatgcgcgaaagcaccgctggaaaacacttggtgggcggaacaggactcgccgttctgttttctggcgttctgctttgagtatgctggcgtcatcaatagtggtctgtcgtacaactgtagcttgcctctggcatttgatggtagttgctccggcctgcaacatttctcagcgatgttacgcgacgaaattggcggcaaagctgtgaatctcctcccatctgcggaataccaggatatttatcgtatcgtcagcgacaaagttaacgagatgctgaaacaagatctgattaacggtacctctaccaccgtggaaacggtgactgataagaagacaggcgaaattacccaacgcacgaaatacgggaccaaagttatggcacagtggtggttagaacacggtgtgaatcgtggcgtcacgaaacgctcggttatgactttggtgtatgggagcaaagagtttggattccgcgatcaagtgctgagtgacaccattcaaccggcgatcgataacggcaaaggtgacatgtttctgaatccgaatcaggctgctggttacatggcgaaactgatctggaacgcagtgtccgggaccgtagtcgcagcagttgaggcgatgaactggctgaaaagtgcggcgaaattacttgctgctgaagtgaaggatcctaagacggatacagttctgcgtggccgctgcgcagtacattgggtgactcccgacggcttccctgtgtggcaggaatacaagaagcctattcagacgcgcttgaacctgatgttcctcggtcagttccgcttacagcctaccattaacaccaacaaagatagcgagattgatgcacacaaacaggagtctggtatcgctcctaactttgtacacagccaagacggtaaccaccttcgtatgactgtagtgtgggcacacgagaagtacggaatcgaatcttttgcactgattcacgactccttcggtaccattccggctgacgctgcgaacctgttcaaagcagtgcgcgaaactatggtttcgacatatgagtcttgtgatgtactggctgatttctacgaccagttcgctgaccagttgcacgagtctcaacgcgacaaaatgccagcacttccggctaaaggtaacttgaacctccgtgacatcttaaaatcggacttcgcgttcgcg

SEQ ID NO: 894 - protein, 890 aa, synthetic construct
  REGION 1..890: note = Variant of RNA polymerase
MHHHHHHMNTINIAKNDFSDIELAAIPFNTLADHYGERLAREQLALEHESYEMGEARFRKMFERQLKAGEVADNAAAKPLITTLLPKMIARINDWFEEVKAKRGKRPTAFQFLQEIKPEAVAYITIKTTLACLTSADNTTVQAVASAIGRAIEDEARFGRIRDLEAKHFKKNVEEQLNKRVGHVYKKAFMQVVEHDMLSKGLLGGEAWSSWHKEDSIHVGVRCIEMLIESTGMVSLHRQNAGVVGQDSETIELAPEYAEAIATRAGALAGISPMFQPCVVPPKPWTGITGGGYWAAGRKPLQLVRTRSLAALRRYEEVSMPEVIKAVNIAQNTAWRINKKVLDVANTITQWQHCPVADVPAMDRGEMPARPLDIDTNEIALKAWKKEASAFYRKDKARVSRRLSMEFMLSQANKFANYEAIWFPQNMDWRGRVYAVPMFNPQGNDMTKGLLTFAQEKPIGEDGFYWLKIHGANTAGVDKVPFPQRIKFVEDNHTNIMECAKAPLENTWWAEQDSPFCFLAFCFEYAGVINSGLSYNCSLPLAFDGSCSGLQHFSAMLRDEIGGKAVNLLPSAEYQDIYRIVSDKVNEMLKQDLINGTSTTVETVTDKKTGEITQRTKYGTKVMAQWWLEHGVNRGVTKRSVMTLVYGSKEFGFRDQVLSDTIQPAIDNGKGDMFLNPNQAAGYMAKLIWNAVSGTVVAAVEAMNWLKSAAKLLAAEVKDPKTDTVLRGRCAVHWVTPDGFPVWQEYKKPIQTRLNLMFLGQFRLQPTINTNKDSEIDAHKQESGIAPNFVHSQDGNHLRMTVVWAHEKYGIESFALIHDSFGTIPADAANLFKAVRETMVSTYESCDVLADFYDQFADQLHESQRDKMPALPAKGNLNLRDILKSDFAFA

SEQ ID NO: 895 - DNA, 2670 bp, synthetic construct
  misc_feature 1..2670: note = Variant of RNA polymerase
  source 1..2670: mol_type = other DNA
atgcaccatcaccatcaccatatgaacacgattaacattgctaagaacgacttctctgacatcgaactggctgctatcccgttcaacactctggctgaccattacggtgagcgtttagctcgcgaacagttggcccttgagcatgagtcttacgagatgggtgaagcacgcttccgcaagatgtttgagcgtcaacttaaagctggtgaggttgcggataacgctgccgccaagcctctcatcactaccctactccctaagatgattgcacgcatcaacgactggtttgaggaagtgaaagctaagcgcggcaagcgcccgacagccttccagttcctgcaagaaatcaagccggaagccgtagcgtacatcaccattaagaccactctggcttgcctaaccagtgcggacaatacaaccgttcaggctgtagcaagcgcaatcggtcgggccattgaggacgaggctcgcttcggtcgtatccgtgaccttgaagctaagcacttcaagaagaacgttgaggaacaactcaacaagcgcgtagggcacgtctacaagaaagcatttatgcaagttgtcgagcacgacatgctctctaagggtctactcggtggcgaggcgtggtcttcgtggcataaggaagactctattcatgtaggagtacgctgcatcgagatgctcattgagtcaaccggaatggttagcttacaccgccaaaatgctggcgtagtaggtcaagactctgagactatcgaactcgcacctgaatacgctgaggctatcgcaacccgtgcaggtgcgctggctggcatctctccgatgttccaaccttgcgtagttcctcctaagccgtggactggcattactggtggtggctattgggctgcggggcgcaaacccctgcagttagtacgtactcgcagtctggcggcgcttcgccgctatgaagaagtgtcgatgccggaggtcatcaaagcagtcaacattgcgcagaatacagcatggcgtattaacaagaaagttctcgacgtagcgaataccatcacccaatggcagcactgtccagtcgcggatgtgcctgcgatggatcgtggcgaaatgccagctcgtccgttggacatcgataccaacgagattgcacttaaagcgtggaagaaagaagcttccgcgttctaccgcaaagacaaagcacgcgttagccgtcgtctgtcaatggagtttatgttatctcaggcgaacaagtttgcgaattatgaggcaatctggtttccgcaaaacatggattggcgtgggcgcgtgtacgctgtcccgatgttcaatcctcagggcaacgatatgacgaaaggcctgctgacctttgcgcaggagaaacccattggtgaagacggcttctattggctcaagattcatggcgcaaatacagctggagtggataaagtaccgtttccacaacgcatcaaatttgttgaggataaccatacgaatattatggaatgcgcgaaagcaccgctggaaaacacttggtgggcggaacaggactcgccgttctgttttctggcgttctgctttgagtatgctggcgtcatcaatagtggtctgtcgtacaactgtagcttgcctctggcatttgatggtagttgctccggcctgcaacatttctcagcgatgttacgcgacgaaattggcggcaaagctgtgaatctcctcccatctgcggaataccaggatatttatcgtatcgtcagcgacaaagttaacgagatgctgaaacaagatctgattaacggtacctctaccaccgtggaaacggtgactgataagaagacaggcgaaattacccaacgcacgaaatacgggaccaaagttatggcacagtggtggttagaacacggtgtgaatcgtggcgtcacgaaacgctcggttatgactttggtgtatgggagcaaagagtttggattccgcgatcaagtgctgagtgacaccattcaaccggcgatcgataacggcaaaggtgacatgtttctgaatccgaatcaggctgctggttacatggcgaaactgatctggaacgcagtgtccgggaccgtagtcgcagcagttgaggcgatgaactggctgaaaagtgcggcgaaattacttgctgctgaagtgaaggatcctaagacggatacagttctgcgtggccgctgcgcagtacattgggtgactcccgacggcttccctgtgtggcaggaatacaagaagcctattcagacgcgcttgaacctgatgttcctcggtcagttccgcttacagcctaccattaacaccaacaaagatagcgagattgatgcacacaaacaggagtctggtatcgctcctaactttgtacacagccaagacggtaaccaccttcgtatgactgtagtgtgggcacacgagaagtacggaatcgaatcttttgcactgattcacgactccttcggtaccattccggctgacgctgcgaacctgttcaaagcagtgcgcgaaactttcgttgacacatatgagtcttgtgatgtactggctgatttctacgaccagttcgctgaccagttgcacgagtctcaacgcgacaaaatgccagcacttccggctaaaggtaacttgaacctccgtgacatcttaaaatcggacttcgcgttcgcg

SEQ ID NO: 896 - protein, 890 aa, synthetic construct
  REGION 1..890: note = Variant of RNA polymerase
MHHHHHHMNTINIAKNDFSDIELAAIPFNTLADHYGERLAREQLALEHESYEMGEARFRKMFERQLKAGEVADNAAAKPLITTLLPKMIARINDWFEEVKAKRGKRPTAFQFLQEIKPEAVAYITIKTTLACLTSADNTTVQAVASAIGRAIEDEARFGRIRDLEAKHFKKNVEEQLNKRVGHVYKKAFMQVVEHDMLSKGLLGGEAWSSWHKEDSIHVGVRCIEMLIESTGMVSLHRQNAGVVGQDSETIELAPEYAEAIATRAGALAGISPMFQPCVVPPKPWTGITGGGYWAAGRKPLQLVRTRSLAALRRYEEVSMPEVIKAVNIAQNTAWRINKKVLDVANTITQWQHCPVADVPAMDRGEMPARPLDIDTNEIALKAWKKEASAFYRKDKARVSRRLSMEFMLSQANKFANYEAIWFPQNMDWRGRVYAVPMFNPQGNDMTKGLLTFAQEKPIGEDGFYWLKIHGANTAGVDKVPFPQRIKFVEDNHTNIMECAKAPLENTWWAEQDSPFCFLAFCFEYAGVINSGLSYNCSLPLAFDGSCSGLQHFSAMLRDEIGGKAVNLLPSAEYQDIYRIVSDKVNEMLKQDLINGTSTTVETVTDKKTGEITQRTKYGTKVMAQWWLEHGVNRGVTKRSVMTLVYGSKEFGFRDQVLSDTIQPAIDNGKGDMFLNPNQAAGYMAKLIWNAVSGTVVAAVEAMNWLKSAAKLLAAEVKDPKTDTVLRGRCAVHWVTPDGFPVWQEYKKPIQTRLNLMFLGQFRLQPTINTNKDSEIDAHKQESGIAPNFVHSQDGNHLRMTVVWAHEKYGIESFALIHDSFGTIPADAANLFKAVRETFVDTYESCDVLADFYDQFADQLHESQRDKMPALPAKGNLNLRDILKSDFAFA

SEQ ID NO: 897 - DNA, 2670 bp, synthetic construct
  misc_feature 1..2670: note = Variant of RNA polymerase
  source 1..2670: mol_type = other DNA
atgcaccatcaccatcaccatatgaacacgattaacattgctaagaacgacttctctgacatcgaactggctgctatcccgttcaacactctggctgaccattacggtgagcgtttagctcgcgaacagttggcccttgagcatgagtcttacgagatgggtgaagcacgcttccgcaagatgtttgagcgtcaacttaaagctggtgaggttgcggataacgctgccgccaagcctctcatcactaccctactccctaagatgattgcacgcatcaacgactggtttgaggaagtgaaagctaagcgcggcaagcgcccgacagccttccagttcctgcaagaaatcaagccggaagccgtagcgtacatcaccattaagaccactctggcttgcctaaccagtgcggacaatacaaccgttcaggctgtagcaagcgcaatcggtcgggccattgaggacgaggctcgcttcggtcgtatccgtgaccttgaagctaagcacttcaagaagaacgttgaggaacaactcaacaagcgcgtagggcacgtctacaagaaagcatttatgcaagttgtcgagcacgacatgctctctaagggtctactcggtggcgaggcgtggtcttcgtggcataaggaagactctattcatgtaggagtacgctgcatcgagatgctcattgagtcaaccggaatggttagcttacaccgccaaaatgctggcgtagtaggtcaagactctgagactatcgaactcgcacctgaatacgctgaggctatcgcaacccgtgcaggtgcgctggctggcatctctccgatgttccaaccttgcgtagttcctcctaagccgtggactggcattactggtggtggctattgggctgcggggcgcaaacccctgcagttagtacgtactcgcagtctggcggcgcttcgccgctatgaagaagtgtcgatgccggaggtcatcaaagcagtcaacattgcgcagaatacagcatggcgtattaacaagaaagttctcgacgtagcgaataccatcacccaatggcagcactgtccagtcgcggatgtgcctgcgatggatcgtggcgaaatgccagctcgtccgttggacatcgataccaacgagattgcacttaaagcgtggaagaaagaagcttccgcgttctaccgcaaagacaaagcacgcgttagccgtcgtctgtcaatggagtttatgttatctcaggcgaacaagtttgcgaattataaagcaatctggtttccgcaaaacatggattggcgtgggcgcgtgtacgctgtcccgatgttcaatcctcagggcaacgatatgacgaaaggcctgctgacctttgcgcaggagaaacccattggtgaagacggcttctattggctcaagattcatggcgcaaatacagctggagtggataaagtaccgtttccacaacgcatcaaatttgttgaggataaccatacgaatattatggaatgcgcgaaagcaccgctggaaaacacttggtgggcggaacaggactcgccgttctgttttctggcgttctgctttgagtatgctggcgtcatcaatagtggtctgtcgtacaactgtagcttgcctctggcatttgatggtagttgctccggcctgcaacatttctcagcgatgttacgcgacgaaattggcggcaaagctgtgaatctcctcccatctgcggaataccaggatatttatcgtatcgtcagcgacaaagttaacgagatgctgaaacaagatctgattaacggtacctctaccaccgtggaaacggtgactgataagaagacaggcgaaattacccaacgcacgaaatacgggaccaaagaaatggcacagtggtggttagaacacggtgtgaatcgtggcgtcacgaaacgctcggttatgactttggtgtatgggagcaaagagtttggattccgcgatcaagtgctgagtgacaccattcaaccggcgatcgataacggcaaaggtgacatgtttctgaatccgaatcaggctgctggttacatggcgaaactgatctggaacgcagtgtccgggaccgtagtcgcagcagttgaggcgatgaactggctgaaaagtgcggcgaaattacttgctgctgaagtgaaggatcctaagacggatacagttctgcgtggccgctgcgcagtacattgggtgactcccgacggcttccctgtgtggcaggaatacaagaagcctattcagacgcgcttgaacctgatgttcctcggtcagttccgcttacagcctaccattaacaccaacaaagatagcgagattgatgcacacaaacaggagtctggtatcgctcctaactttgtacacagccaagacggtaaccaccttcgtatgactgtagtgtgggcacacgagaagtacggaatcgaatcttttgcactgattcacgactccttcggtaccattccggctgacgctgcgaacctgttcaaagcagtgcgcgaaactttcgttagcacatatgagtcttgtgatgtactggctgatttctacgaccagttcgctgaccagttgcacgagtctcaactggacaaaatgccagcacttccggctaaaggtaacttgaacctccgtgacatcttaaaatcggacttcgcgttcgcg

SEQ ID NO: 898 - protein, 890 aa, synthetic construct
  REGION 1..890: note = Variant of RNA polymerase
MHHHHHHMNTINIAKNDFSDIELAAIPFNTLADHYGERLAREQLALEHESYEMGEARFRKMFERQLKAGEVADNAAAKPLITTLLPKMIARINDWFEEVKAKRGKRPTAFQFLQEIKPEAVAYITIKTTLACLTSADNTTVQAVASAIGRAIEDEARFGRIRDLEAKHFKKNVEEQLNKRVGHVYKKAFMQVVEHDMLSKGLLGGEAWSSWHKEDSIHVGVRCIEMLIESTGMVSLHRQNAGVVGQDSETIELAPEYAEAIATRAGALAGISPMFQPCVVPPKPWTGITGGGYWAAGRKPLQLVRTRSLAALRRYEEVSMPEVIKAVNIAQNTAWRINKKVLDVANTITQWQHCPVADVPAMDRGEMPARPLDIDTNEIALKAWKKEASAFYRKDKARVSRRLSMEFMLSQANKFANYKAIWFPQNMDWRGRVYAVPMFNPQGNDMTKGLLTFAQEKPIGEDGFYWLKIHGANTAGVDKVPFPQRIKFVEDNHTNIMECAKAPLENTWWAEQDSPFCFLAFCFEYAGVINSGLSYNCSLPLAFDGSCSGLQHFSAMLRDEIGGKAVNLLPSAEYQDIYRIVSDKVNEMLKQDLINGTSTTVETVTDKKTGEITQRTKYGTKEMAQWWLEHGVNRGVTKRSVMTLVYGSKEFGFRDQVLSDTIQPAIDNGKGDMFLNPNQAAGYMAKLIWNAVSGTVVAAVEAMNWLKSAAKLLAAEVKDPKTDTVLRGRCAVHWVTPDGFPVWQEYKKPIQTRLNLMFLGQFRLQPTINTNKDSEIDAHKQESGIAPNFVHSQDGNHLRMTVVWAHEKYGIESFALIHDSFGTIPADAANLFKAVRETFVSTYESCDVLADFYDQFADQLHESQLDKMPALPAKGNLNLRDILKSDFAFA

SEQ ID NO: 899 - DNA, 2670 bp, synthetic construct
  misc_feature 1..2670: note = Variant of RNA polymerase
  source 1..2670: mol_type = other DNA
atgcaccatcaccatcaccatatgaacacgattaacattgctaagaacgacttctctgacatcgaactggctgctatcccgttcaacactctggctgaccattacggtgagcgtttagctcgcgaacagttggcccttgagcatgagtcttacgagatgggtgaagcacgcttccgcaagatgtttgagcgtcaacttaaagctggtgaggttgcggataacgctgccgccaagcctctcatcactaccctactccctaagatgattgcacgcatcaacgactggtttgaggaagtgaaagctaagcgcggcaagcgcccgacagccttccagttcctgcaagaaatcaagccggaagccgtagcgtacatcaccattaagaccactctggcttgcctaaccagtgcggacaatacaaccgttcaggctgtagcaagcgcaatcggtcgggccattgaggacgaggctcgcttcggtcgtatccgtgaccttgaagctaagcacttcaagaagaacgttgaggaacaactcaacaagcgcgtagggcacgtctacaagaaagcatttatgcaagttgtcgagcacgacatgctctctaagggtctactcggtggcgaggcgtggtcttcgtggcataaggaagactctattcatgtaggagtacgctgcatcgagatgctcattgagtcaaccggaatggttagcttacaccgccaaaatgctggcgtagtaggtcaagactctgagactatcgaactcgcacctgaatacgctgaggctatcgcaacccgtgcaggtgcgctggctggcatctctccgatgttccaaccttgcgtagttcctcctaagccgtggactggcattactggtggtggctattgggctgcggggcgcaaacccctgcagttagtacgtactcgcagtctggcggcgcttcgccgctatgaagaagtgtcgatgccggaggtcatcaaagcagtcaacattgcgcagaatacagcatggcgtattaacaagaaagttctcgacgtagcgaataccatcacccaatggcagcactgtccagtcgcggatgtgcctgcgatggatcgtggcgaaatgccagctcgtccgttggacatcgataccaacgagattgcacttaaagcgtggaagaaagaagcttccgcgttctaccgcaaagacaaagcacgcgttagccgtcgtctgtcaatggagtttatgttatctcaggcgaacaagtttgcgaattataaagcaatctggtttccgcaaaacatggattggcgtgggcgcgtgtacgctgtcccgatgttcaatcctcagggcaacgatatgacgaaaggcctgctgacctttgcgcaggagaaacccattggtgaagacggcttctattggctcaagattcatggcgcaaatacagctggagtggataaagtaccgtttccacaacgcatcaaatttgttgaggataaccatacgaatattatggaatgcgcgaaagcaccgctggaaaacacttggtgggcggaacaggactcgccgttctgttttctggcgttctgctttgagtatgctggcgtcatcaatagtggtctgtcgtacaactgtagcttgcctctggcatttgatggtagttgctccggcctgcaacatttctcagcgatgttacgcgacgaaattggcggcaaagctgtgaatctcctcccatctgcggaataccaggatatttatcgtatcgtcagcgacaaagttaacgagatgctgaaacaagatctgattaacggtacctctaccaccgtggaaacggtgactgataagaagacaggcgaaattacccaacgcacgaaatacgggaccaaagtaatggcacagtggtggttagaacacggtgtgaatcgtggcgtcacgaaacgctcggttatgactttggtgtatgggagcaaagagtttggattccgcgatcaagtgctgagtgacaccattcaaccggcgatcgataacggcaaaggtgacatgtttctgaatccgaatcaggctgctggttacatggcgaaactgatctggaacgcagtgtccgggaccgtagtcgcagcagttgaggcgatgaactggctgaaaagtgcggcgaaattacttgctgctgaagtgaaggatcctaagacggatacagttctgcgtggccgctgcgcagtacattgggtgactcccgacggcttccctgtgtggcaggaatacaagaagcctattcagacgcgcttgaacctgatgttcctcggtcagttccgcttacagcctaccattaacaccaacaaagatagcgagattgatgcacacaaacaggagtctggtatcgctcctaactttgtacacagccaagacggtaaccaccttcgtatgactgtagtgtgggcacacgagaagtacggaatcgaatcttttgcactgattcacgactccttcggtaccattccggctgacgctgcgaacctgttcaaagcagtgcgcgaaactttcgttagcacatatgagtcttgtgatgtactggctgatttctacgaccagttcgctgaccagttgcacgagtctcaattggacaaaatgccagcacttccggctaaaggtaacttgaacctccgtgacatcttaaaatcggacttcgcgttcgcg

SEQ ID NO: 900 - protein, 890 aa, synthetic construct
  REGION 1..890: note = Variant of RNA polymerase
MHHHHHHMNTINIAKNDFSDIELAAIPFNTLADHYGERLAREQLALEHESYEMGEARFRKMFERQLKAGEVADNAAAKPLITTLLPKMIARINDWFEEVKAKRGKRPTAFQFLQEIKPEAVAYITIKTTLACLTSADNTTVQAVASAIGRAIEDEARFGRIRDLEAKHFKKNVEEQLNKRVGHVYKKAFMQVVEHDMLSKGLLGGEAWSSWHKEDSIHVGVRCIEMLIESTGMVSLHRQNAGVVGQDSETIELAPEYAEAIATRAGALAGISPMFQPCVVPPKPWTGITGGGYWAAGRKPLQLVRTRSLAALRRYEEVSMPEVIKAVNIAQNTAWRINKKVLDVANTITQWQHCPVADVPAMDRGEMPARPLDIDTNEIALKAWKKEASAFYRKDKARVSRRLSMEFMLSQANKFANYKAIWFPQNMDWRGRVYAVPMFNPQGNDMTKGLLTFAQEKPIGEDGFYWLKIHGANTAGVDKVPFPQRIKFVEDNHTNIMECAKAPLENTWWAEQDSPFCFLAFCFEYAGVINSGLSYNCSLPLAFDGSCSGLQHFSAMLRDEIGGKAVNLLPSAEYQDIYRIVSDKVNEMLKQDLINGTSTTVETVTDKKTGEITQRTKYGTKVMAQWWLEHGVNRGVTKRSVMTLVYGSKEFGFRDQVLSDTIQPAIDNGKGDMFLNPNQAAGYMAKLIWNAVSGTVVAAVEAMNWLKSAAKLLAAEVKDPKTDTVLRGRCAVHWVTPDGFPVWQEYKKPIQTRLNLMFLGQFRLQPTINTNKDSEIDAHKQESGIAPNFVHSQDGNHLRMTVVWAHEKYGIESFALIHDSFGTIPADAANLFKAVRETFVSTYESCDVLADFYDQFADQLHESQLDKMPALPAKGNLNLRDILKSDFAFA

SEQ ID NO: 901 - DNA, 2670 bp, synthetic construct
  misc_feature 1..2670: note = Variant of RNA polymerase
  source 1..2670: mol_type = other DNA
atgcaccatcaccatcaccatatgaacacgattaacattgctaagaacgacttctctgacatcgaactggctgctatcccgttcaacactctggctgaccattacggtgagcgtttagctcgcgaacagttggcccttgagcatgagtcttacgagatgggtgaagcacgcttccgcaagatgtttgagcgtcaacttaaagctggtgaggttgcggataacgctgccgccaagcctctcatcactaccctactccctaagatgattgcacgcatcaacgactggtttgaggaagtgaaagctaagcgcggcaagcgcccgacagccttccagttcctgcaagaaatcaagccggaagccgtagcgtacatcaccattaagaccactctggcttgcctaaccagtgcggacaatacaaccgttcaggctgtagcaagcgcaatcggtcgggccattgaggacgaggctcgcttcggtcgtatccgtgaccttgaagctaagcacttcaagggcaacgttgaggaacaactcaacaagcgcgtagggcacgtgtacaagaaagcatttatgcaagttgtcgagcacgacatgctctctaagggtctactcggtggcgaggcgtggtcttcgtggcataaggaagactctattcatgtaggagtacgctgcatcgagatgctcattgagtcaaccggaatggttagcttacaccgccaaaatgctggcgtagtaggtcaagactctgagactatcgaactcgcacctgaatacgctgaggctatcgcaacccgtgcaggtgcgctggctggcatctctccgatgttccaaccttgcgtagttcctcctaagccgtggactggcattactggtggtggctattgggctgcggggcgcaaacccctgcagttagtacgtactcgcagtctggcggcgcttcgccgctatgaagaagtgtcgatgccggaggtcatcaaagcagtcaacattgcgcagaatacagcatggcgtattaacaagaaagttctcgacgtagcgaataccatcacccaatggcagcactgtccagtcgcggatgtgcctgcgatggatcgtggcgaaatgccagctcgtccgttggacatcgataccaacgagattgcacttaaagcgtggaagaaagaagcttccgcgttctaccgcaaagacaaagcacgcgttagccgtcgtctgtcaatggagtttatgttatctcaggcgaacaagtttgcgaattataaggcaatctggtttccgcaaaacatggattggcgtgggcgcgtgtacgctgtcccgatgttcaatcctcagggcaacgatatgacgaaaggcctgctgacctttgcgcaggagaaacccattggtgaagacggcttctattggctcaagattcatggcgcaaatacagctggagtggataaagtaccgtttccacaacgcatcaaatttgttgaggataaccatacgaatattatggaatgcgcgaaagcaccgctggaaaacacttggtgggcggaacaggactcgccgttctgttttctggcgttctgctttgagtatgctggcgtcatcaatagtggtctgtcgtacaactgtagcttgcctctggcatttgatggtagttgctccggcctgcaacatttctcagcgatgttacgcgacgaaattggcggcaaagctgtgaatctcctcccatctgcggaataccaggatatttatcgtatcgtcagcgacaaagttaacgagatgctgaaacaagatctgattaacggtacctctaccaccgtggaaacggtgactgataagaagacaggcgaaattacccaacgcacgaaatacgggaccaaagtaatggcacagtggtggttagaacacggtgtgaatcgtggcgtcacgaaacgctcggttatgactttggtgtatgggagcaaagagtttggattccgcgatcaagtgctgagtgacaccattcaaccggcgatcgataacggcaaaggtgacatgtttctgaatccgaatcaggctgctggttacatggcgaaactgatctggaacgcagtgtccgggaccgtagtcgcagcagttgaggcgatgaactggctgaaaagtgcggcgaaattacttgctgctgaagtgaaggatcctaagacggatacagttctgcgtggccgctgcgcagtacattgggtgactcccgacggcttccctgtgtggcaggaatacaagaagcctattcagacgcgcttgaacctgatgttcctcggtcagttccgcttacagcctaccattaacaccaacaaagatagcgagattgatgcacacaaacaggagtctggtatcgctcctaactttgtacacagccaagacggtaaccaccttcgtatgactgtagtgtgggcacacgagaagtacggaatcgaatcttttgcactgattcacgactccttcggtaccattccggctgacgctgcgaacctgttcaaagcagtgcgcgaaactttcgttgacacatatgagtcttgtgatgtactggctgatttctacgaccagttcgctgaccagttgcacgagtctcaactggacaaaatgccagcacttccggctaaaggtaacttgaacctccgtgacatcttaaaatcggacttcgcgttcgcg

SEQ ID NO: 902 - protein, 890 aa, synthetic construct
  REGION 1..890: note = Variant of RNA polymerase
MHHHHHHMNTINIAKNDFSDIELAAIPFNTLADHYGERLAREQLALEHESYEMGEARFRKMFERQLKAGEVADNAAAKPLITTLLPKMIARINDWFEEVKAKRGKRPTAFQFLQEIKPEAVAYITIKTTLACLTSADNTTVQAVASAIGRAIEDEARFGRIRDLEAKHFKGNVEEQLNKRVGHVYKKAFMQVVEHDMLSKGLLGGEAWSSWHKEDSIHVGVRCIEMLIESTGMVSLHRQNAGVVGQDSETIELAPEYAEAIATRAGALAGISPMFQPCVVPPKPWTGITGGGYWAAGRKPLQLVRTRSLAALRRYEEVSMPEVIKAVNIAQNTAWRINKKVLDVANTITQWQHCPVADVPAMDRGEMPARPLDIDTNEIALKAWKKEASAFYRKDKARVSRRLSMEFMLSQANKFANYKAIWFPQNMDWRGRVYAVPMFNPQGNDMTKGLLTFAQEKPIGEDGFYWLKIHGANTAGVDKVPFPQRIKFVEDNHTNIMECAKAPLENTWWAEQDSPFCFLAFCFEYAGVINSGLSYNCSLPLAFDGSCSGLQHFSAMLRDEIGGKAVNLLPSAEYQDIYRIVSDKVNEMLKQDLINGTSTTVETVTDKKTGEITQRTKYGTKVMAQWWLEHGVNRGVTKRSVMTLVYGSKEFGFRDQVLSDTIQPAIDNGKGDMFLNPNQAAGYMAKLIWNAVSGTVVAAVEAMNWLKSAAKLLAAEVKDPKTDTVLRGRCAVHWVTPDGFPVWQEYKKPIQTRLNLMFLGQFRLQPTINTNKDSEIDAHKQESGIAPNFVHSQDGNHLRMTVVWAHEKYGIESFALIHDSFGTIPADAANLFKAVRETFVDTYESCDVLADFYDQFADQLHESQLDKMPALPAKGNLNLRDILKSDFAFA

SEQ ID NO: 903 - DNA, 2670 bp, synthetic construct
  misc_feature 1..2670: note = Variant of RNA polymerase
  source 1..2670: mol_type = other DNA
atgcaccatcaccatcaccatatgaacacgattaacattgctaagaacgacttctctgacatcgaactggctgctatcccgttcaacactctggctgaccattacggtgagcgtttagctcgcgaacagttggcccttgagcatgagtcttacgagatgggtgaagcacgcttccgcaagatgtttgagcgtcaacttaaagctggtgaggttgcggataacgctgccgccaagcctctcatcactaccctactccctaagatgattgcacgcatcaacgactggtttgaggaagtgaaagctaagcgcggcaagcgcccgacagccttccagttcctgcaagaaatcaagccggaagccgtagcgtacatcaccattaagaccactctggcttgcctaaccagtgcggacaatacaaccgttcaggctgtagcaagcgcaatcggtcgggccattgaggacgaggctcgcttcggtcgtatccgtgaccttgaagctaagcacttcaagggcaacgttgaggaacaactcaacaagcgcgtagggcacgtctacaagaaagcatttatgcaagttgtcgagcacgacatgctctctaagggtctactcggtggcgaggcgtggtcttcgtggcataaggaagactctattcatgtaggagtacgctgcatcgagatgctcattgagtcaaccggaatggttagcttacaccgccaaaatgctggcgtagtaggtcaagactctgagactatcgaactcgcacctgaatacgctgaggctatcgcaacccgtgcaggtgcgctggctggcatctctccgatgttccaaccttgcgtagttcctcctaagccgtggactggcattactggtggtggctattgggctgcggggcgcaaacccctgcagttagtacgtactcgcagtctggcggcgcttcgccgctatgaagaagtgtcgatgccggaggtcatcaaagcagtcaacattgcgcagaatacagcatggcgtattaacaagaaagttctcgacgtagcgaataccatcacccaatggcagcactgtccagtcgcggatgtgcctgcgatggatcgtggcgaaatgccagctcgtccgttggacatcgataccaacgagattgcacttaaagcgtggaagaaagaagcttccgcgttctaccgcaaagacaaagcacgcgttagccgtcgtctgtcaatggagtttatgttatctcaggcgaacaagtttgcgaattatatggcaatctggtttccgcaaaacatggattggcgtgggcgcgtgtacgctgtcccgatgttcaatcctcagggcaacgatatgacgaaaggcctgctgacctttgcgcaggagaaacccattggtgaagacggcttctattggctcaagattcatggcgcaaatacagctggagtggataaagtaccgtttccacaacgcatcaaatttgttgaggataaccatacgaatattatggaatgcgcgaaagcaccgctggaaaacacttggtgggcggaacaggactcgccgttctgttttctggcgttctgctttgagtatgctggcgtcatcaatagtggtctgtcgtacaactgtagcttgcctctggcatttgatggtagttgctccggcctgcaacatttctcagcgatgttacgcgacgaaattggcggcaaagctgtgaatctcctcccatctgcggaataccaggatatttatcgtatcgtcagcgacaaagttaacgagatgctgaaacaagatctgattaacggtacctctaccaccgtggaaacggtgactgataagaagacaggcgaaattacccaacgcacgaaatacgggaccaaagtaatggcacagtggtggttagaacacggtgtgaatcgtggcgtcacgaaacgctcggttatgactttggtgtatgggagcaaagagtttggattccgcgatcaagtgctgagtgacaccattcaaccggcgatcgataacggcaaaggtgacatgtttctgaatccgaatcaggctgctggttacatggcgaaactgatctggaacgcagtgtccgggaccgtagtcgcagcagttgaggcgatgaactggctgaaaagtgcggcgaaattacttgctgctgaagtgaaggatccaaagacggacacagttctgcgtggccgctgcgcagtacattgggtgactcccgacggcttccctgtgtggcaggaatacaagaagcctattcagacgcgcttgaacctgatgttcctcggtcagttccgcttacagcctaccattaacaccaacaaagatagcgagattgatgcacacaaacaggagtctggtatcgctcctaactttgtacacagccaagacggtaaccaccttcgtatgactgtagtgtgggcacacgagaagtacggaatcgaatcttttgcactgattcacgactccttcggtaccattccggctgacgctgcgaacctgttcaaagcagtgcgcgaaactttcgttgacacatatgagtcttgtgatgtactggctgatttctacgaccagttcgctgaccagttgcacgagtctcaattggacaaaatgccagcacttccggctaaaggtaacttgaacctccgtgacatcttaaaatcggacttcgcgttcgcg

SEQ ID NO: 904 - protein, 890 aa, synthetic construct
  REGION 1..890: note = Variant of RNA polymerase
MHHHHHHMNTINIAKNDFSDIELAAIPFNTLADHYGERLAREQLALEHESYEMGEARFRKMFERQLKAGEVADNAAAKPLITTLLPKMIARINDWFEEVKAKRGKRPTAFQFLQEIKPEAVAYITIKTTLACLTSADNTTVQAVASAIGRAIEDEARFGRIRDLEAKHFKGNVEEQLNKRVGHVYKKAFMQVVEHDMLSKGLLGGEAWSSWHKEDSIHVGVRCIEMLIESTGMVSLHRQNAGVVGQDSETIELAPEYAEAIATRAGALAGISPMFQPCVVPPKPWTGITGGGYWAAGRKPLQLVRTRSLAALRRYEEVSMPEVIKAVNIAQNTAWRINKKVLDVANTITQWQHCPVADVPAMDRGEMPARPLDIDTNEIALKAWKKEASAFYRKDKARVSRRLSMEFMLSQANKFANYMAIWFPQNMDWRGRVYAVPMFNPQGNDMTKGLLTFAQEKPIGEDGFYWLKIHGANTAGVDKVPFPQRIKFVEDNHTNIMECAKAPLENTWWAEQDSPFCFLAFCFEYAGVINSGLSYNCSLPLAFDGSCSGLQHFSAMLRDEIGGKAVNLLPSAEYQDIYRIVSDKVNEMLKQDLINGTSTTVETVTDKKTGEITQRTKYGTKVMAQWWLEHGVNRGVTKRSVMTLVYGSKEFGFRDQVLSDTIQPAIDNGKGDMFLNPNQAAGYMAKLIWNAVSGTVVAAVEAMNWLKSAAKLLAAEVKDPKTDTVLRGRCAVHWVTPDGFPVWQEYKKPIQTRLNLMFLGQFRLQPTINTNKDSEIDAHKQESGIAPNFVHSQDGNHLRMTVVWAHEKYGIESFALIHDSFGTIPADAANLFKAVRETFVDTYESCDVLADFYDQFADQLHESQLDKMPALPAKGNLNLRDILKSDFAFA

SEQ ID NO: 905 - DNA, 2670 bp, synthetic construct
  misc_feature 1..2670: note = Variant of RNA polymerase
  source 1..2670: mol_type = other DNA
atgcaccatcaccatcaccatatgaacacgattaacattgctaagaacgacttctctgacatcgaactggctgctatcccgttcaacactctggctgaccattacggtgagcgtttagctcgcgaacagttggcccttgagcatgagtcttacgagatgggtgaagcacgcttccgcaagatgtttgagcgtcaacttaaagctggtgaggttgcggataacgctgccgccaagcctctcatcactaccctactccctaagatgattgcacgcatcaacgactggtttgaggaagtgaaagctaagcgcggcaagcgcccgacagccttccagttcctgcaagaaatcaagccggaagccgtagcgtacatcaccattaagaccactctggcttgcctaaccagtgcggacaatacaaccgttcaggctgtagcaagcgcaatcggtcgggccattgaggacgaggctcgcttcggtcgtatccgtgaccttgaagctaagcacttcaagaagaacgttgaggaacaactcaacaagcgcgtagggcacgtctacaagaaagcatttatgcaagttgtcgagcacgacatgctctctaagggtctactcggtggcgaggcgtggtcttcgtggcataaggaagactctattcatgtaggagtacgctgcatcgagatgctcattgagtcaaccggaatggttagcttacaccgccaaaatgctggcgtagtaggtcaagactctgagactatcgaactcgcacctgaatacgctgaggctatcgcaacccgtgcaggtgcgctggctggcatctctccgatgttccaaccttgcgtagttcctcctaagccgtggactggcattactggtggtggctattgggctgcggggcgcaaacccctgcagttagtacgtactcgcagtctggcggcgcttcgccgctatgaagaagtgtcgatgccggaggtcatcaaagcagtcaacattgcgcagaatacagcatggcgtattaacaagaaagttctcgacgtagcgaataccatcacccaatggcagcactgtccagtcgcggatgtgcctgcgatggatcgtggcgaaatgccagctcgtccgttggacatcgataccaacgagattgcacttaaagcgtggaagaaagaagcttccgcgttctaccgcaaagacaaagcacgcgttagccgtcgtctgtcaatggagtttatgttatctcaggcgaacaagtttgcgaattataacgcaatctggtttccgcaaaacatggattggcgtgggcgcgtgtacgctgtcccgatgttcaatcctcagggcaacgatatgacgaaaggcctgctgacctttgcgcaggagaaacccattggtgaagacggcttctattggctcaagattcatggcgcaaatacagctggagtggataaagtaccgtttccacaacgcatcaaatttgttgaggataaccatacgaatattatggaatgcgcgaaagcaccgctggaaaacacttggtgggcggaacaggactcgccgttctgttttctggcgttctgctttgagtatgctggcgtcatcaatagtggtctgtcgtacaactgtagcttgcctctggcatttgatggtagttgctccggcctgcaacatttctcagcgatgttacgcgacgaaattggcggcaaagctgtgaatctcctcccatctgcggaataccaggatatttatcgtatcgtcagcgacaaagttaacgagatgctgaaacaagatctgattaacggtacctctaccaccgtggaaacggtgactgataagaagacaggcgaaattacccaacgcacgaaatacgggaccaaagttatggcacagtggtggttagaacacggtgtgaatcgtggcgtcacgaaacgctcggttatgactttggtgtatgggagcaaagagtttggattccgcgatcaagtgctgagtgacaccattcaaccggcgatcgataacggcaaaggtgacatgtttctgaatccgaatcaggctgctggttacatggcgaaactgatctggaacgcagtgtccgggaccgtagtcgcagcagttgaggcgatgaactggctgaaaagtgcggcgaaattacttgctgctgaagtgaaggatccaaagacggacacagttctgcgtggccgctgcgcagtacattgggtgactcccgacggcttccctgtgtggcaggaatacaagaagcctattcagacgcgcttgaacctgatgttcctcggtcagttccgcttacagcctaccattaacaccaacaaagatagcgagattgatgcacacaaacaggagtctggtatcgctcctaactttgtacacagccaagacggtaaccaccttcgtatgactgtagtgtgggcacacgagaagtacggaatcgaatcttttgcactgattcacgactccttcggtaccattccggctgacgctgcgaacctgttcaaagcagtgcgcgaaactttcgttagcacatatgagtcttgtgatgtactggctgatttctacgaccagttcgctgaccagttgcacgagtctcaacgcgacaaaatgccagcacttccggctaaaggtaacttgaacctccgtgacatcttaaaatcggacttcgcgttcgcg

SEQ ID NO: 906 - protein, 890 aa, synthetic construct
  REGION 1..890: note = Variant of RNA polymerase
MHHHHHHMNTINIAKNDFSDIELAAIPFNTLADHYGERLAREQLALEHESYEMGEARFRKMFERQLKAGEVADNAAAKPLITTLLPKMIARINDWFEEVKAKRGKRPTAFQFLQEIKPEAVAYITIKTTLACLTSADNTTVQAVASAIGRAIEDEARFGRIRDLEAKHFKKNVEEQLNKRVGHVYKKAFMQVVEHDMLSKGLLGGEAWSSWHKEDSIHVGVRCIEMLIESTGMVSLHRQNAGVVGQDSETIELAPEYAEAIATRAGALAGISPMFQPCVVPPKPWTGITGGGYWAAGRKPLQLVRTRSLAALRRYEEVSMPEVIKAVNIAQNTAWRINKKVLDVANTITQWQHCPVADVPAMDRGEMPARPLDIDTNEIALKAWKKEASAFYRKDKARVSRRLSMEFMLSQANKFANYNAIWFPQNMDWRGRVYAVPMFNPQGNDMTKGLLTFAQEKPIGEDGFYWLKIHGANTAGVDKVPFPQRIKFVEDNHTNIMECAKAPLENTWWAEQDSPFCFLAFCFEYAGVINSGLSYNCSLPLAFDGSCSGLQHFSAMLRDEIGGKAVNLLPSAEYQDIYRIVSDKVNEMLKQDLINGTSTTVETVTDKKTGEITQRTKYGTKVMAQWWLEHGVNRGVTKRSVMTLVYGSKEFGFRDQVLSDTIQPAIDNGKGDMFLNPNQAAGYMAKLIWNAVSGTVVAAVEAMNWLKSAAKLLAAEVKDPKTDTVLRGRCAVHWVTPDGFPVWQEYKKPIQTRLNLMFLGQFRLQPTINTNKDSEIDAHKQESGIAPNFVHSQDGNHLRMTVVWAHEKYGIESFALIHDSFGTIPADAANLFKAVRETFVSTYESCDVLADFYDQFADQLHESQRDKMPALPAKGNLNLRDILKSDFAFA

SEQ ID NO: 907 - DNA, 2670 bp, synthetic construct
  misc_feature 1..2670: note = Variant of RNA polymerase
  source 1..2670: mol_type = other DNA
atgcaccatcaccatcaccatatgaacacgattaacattgctaagaacgacttctctgacatcgaactggctgctatcccgttcaacactctggctgaccattacggtgagcgtttagctcgcgaacagttggcccttgagcatgagtcttacgagatgggtgaagcacgcttccgcaagatgtttgagcgtcaacttaaagctggtgaggttgcggataacgctgccgccaagcctctcatcactaccctactccctaagatgattgcacgcatcaacgactggtttgaggaagtgaaagctaagcgcggcaagcgcccgacagccttccagttcctgcaagaaatcaagccggaagccgtagcgtacatcaccattaagaccactctggcttgcctaaccagtgcggacaatacaaccgttcaggctgtagcaagcgcaatcggtcgggccattgaggacgaggctcgcttcggtcgtatccgtgaccttgaagctaagcacttcaagaagaacgttgaggaacaactcaacaagcgcgtagggcacccgtacaagaaagcatttatgcaagttgtcgagcacgacatgctctctaagggtctactcggtggcgaggcgtggtcttcgtggcataaggaagactctattcatgtaggagtacgctgcatcgagatgctcattgagtcaaccggaatggttagcttacaccgccaaaatgctggcgtagtaggtcaagactctgagactatcgaactcgcacctgaatacgctgaggctatcgcaacccgtgcaggtgcgctggctggcatctctccgatgttccaaccttgcgtagttcctcctaagccgtggactggcattactggtggtggctattgggctgcggggcgcaaacccctgcagttagtacgtactcgcagtctggcggcgcttcgccgctatgaagaagtgtcgatgccggaggtcatcaaagcagtcaacattgcgcagaatacagcatggcgtattaacaagaaagttctcgacgtagcgaataccatcacccaatggcagcactgtccagtcgcggatgtgcctgcgatggatcgtggcgaaatgccagctcgtccgttggacatcgataccaacgagattgcacttaaagcgtggaagaaagaagcttccgcgttctaccgcaaagacaaagcacgcgttagccgtcgtctgtcaatggagtttatgttatctcaggcgaacaagtttgcgaatgagaaggcaatctggtttccgcaaaacatggattggcgtgggcgcgtgtacgctgtcccgatgttcaatcctcagggcaacgatatgacgaaaggcctgctgacctttgcgcaggagaaacccattggtgaagacggcttctattggctcaagattcatggcgcaaatacagctggagtggataaagtaccgtttccacaacgcatcaaatttgttgaggataaccatacgaatattatggaatgcgcgaaagcaccgctggaaaacacttggtgggcggaacaggactcgccgttctgttttctggcgttctgctttgagtatgctggcgtcatcaatagtggtctgtcgtacaactgtagcttgcctctggcatttgatggtagttgctccggcctgcaacatttctcagcgatgttacgcgacgaaattggcggcaaagctgtgaatctcctcccatctgcggaataccaggatatttatcgtatcgtcagcgacaaagttaacgagatgctgaaacaagatctgattaacggtacctctaccaccgtggaaacggtgactgataagaagacaggcgaaattacccaacgcacgaaatacgggaccaaagaaatggcacagtggtggttagaacacggtgtgaatcgtggcgtcacgaaacgctcggttatgactttggtgtatgggagcaaagagtttggattccgcgatcaagtgctgagtgacaccattcaaccggcgatcgataacggcaaaggtgacatgtttctgaatccgaatcaggctgctggttacatggcgaaactgatctggaacgcagtgtccgggaccgtagtcgcagcagttgaggcgatgaactggctgaaaagtgcggcgaaattacttgctgctgaagtgaaggatcctaagacggatacagttctgcgtggccgctgcgcagtacattgggtgactcccgacggcttccctgtgtggcaggaatacaagaagcctattcagacgcgcttgaacctgatgttcctcggtcagttccgcttacagcctaccattaacaccaacaaagatagcgagattgatgcacacaaacaggagtctggtatcgctcctaactttgtacacagccaagacggtaaccaccttcgtatgactgtagtgtgggcacacgagaagtacggaatcgaatcttttgcactgattcacgactccttcggtaccattccggctgacgctgcgaacctgttcaaagcagtgcgcgaaactttcgttagcacatatgagtcttgtgatgtactggctgatttctacgaccagttcgctgaccagttgcacgagtctcaacgcgacaaaatgccagcacttccggctaaaggtaacttgaacctccgtgacatcttaaaatcggacttcgcgttcgcg

SEQ ID NO: 908 - protein, 890 aa, synthetic construct
  REGION 1..890: note = Variant of RNA polymerase
MHHHHHHMNTINIAKNDFSDIELAAIPFNTLADHYGERLAREQLALEHESYEMGEARFRKMFERQLKAGEVADNAAAKPLITTLLPKMIARINDWFEEVKAKRGKRPTAFQFLQEIKPEAVAYITIKTTLACLTSADNTTVQAVASAIGRAIEDEARFGRIRDLEAKHFKKNVEEQLNKRVGHPYKKAFMQVVEHDMLSKGLLGGEAWSSWHKEDSIHVGVRCIEMLIESTGMVSLHRQNAGVVGQDSETIELAPEYAEAIATRAGALAGISPMFQPCVVPPKPWTGITGGGYWAAGRKPLQLVRTRSLAALRRYEEVSMPEVIKAVNIAQNTAWRINKKVLDVANTITQWQHCPVADVPAMDRGEMPARPLDIDTNEIALKAWKKEASAFYRKDKARVSRRLSMEFMLSQANKFANEKAIWFPQNMDWRGRVYAVPMFNPQGNDMTKGLLTFAQEKPIGEDGFYWLKIHGANTAGVDKVPFPQRIKFVEDNHTNIMECAKAPLENTWWAEQDSPFCFLAFCFEYAGVINSGLSYNCSLPLAFDGSCSGLQHFSAMLRDEIGGKAVNLLPSAEYQDIYRIVSDKVNEMLKQDLINGTSTTVETVTDKKTGEITQRTKYGTKEMAQWWLEHGVNRGVTKRSVMTLVYGSKEFGFRDQVLSDTIQPAIDNGKGDMFLNPNQAAGYMAKLIWNAVSGTVVAAVEAMNWLKSAAKLLAAEVKDPKTDTVLRGRCAVHWVTPDGFPVWQEYKKPIQTRLNLMFLGQFRLQPTINTNKDSEIDAHKQESGIAPNFVHSQDGNHLRMTVVWAHEKYGIESFALIHDSFGTIPADAANLFKAVRETFVSTYESCDVLADFYDQFADQLHESQRDKMPALPAKGNLNLRDILKSDFAFA

SEQ ID NO: 909 - DNA, 2670 bp, synthetic construct
  misc_feature 1..2670: note = Variant of RNA polymerase
  source 1..2670: mol_type = other DNA
atgcaccatcaccatcaccatatgaacacgattaacattgctaagaacgacttctctgacatcgaactggctgctatcccgttcaacactctggctgaccattacggtgagcgtttagctcgcgaacagttggcccttgagcatgagtcttacgagatgggtgaagcacgcttccgcaagatgtttgagcgtcaacttaaagctggtgaggttgcggataacgctgccgccaagcctctcatcactaccctactccctaagatgattgcacgcatcaacgactggtttgaggaagtgaaagctaagcgcggcaagcgcccgacagccttccagttcctgcaagaaatcaagccggaagccgtagcgtacatcaccattaagaccactctggcttgcctaaccagtgcggacaatacaaccgttcaggctgtagcaagcgcaatcggtcgggccattgaggacgaggctcgcttcggtcgtatccgtgaccttgaagctaagcacttcaagaagaacgttgaggaacaactcaacaagcgcgtagggcacgtgtacaagaaagcatttatgcaagttgtcgagcacgacatgctctctaagggtctactcggtggcgaggcgtggtcttcgtggcataaggaagactctattcatgtaggagtacgctgcatcgagatgctcattgagtcaaccggaatggttagcttacaccgccaaaatgctggcgtagtaggtcaagactctgagactatcgaactcgcacctgaatacgctgaggctatcgcaacccgtgcaggtgcgctggctggcatctctccgatgttccaaccttgcgtagttcctcctaagccgtggactggcattactggtggtggctattgggctgcggggcgcaaacccctgcagttagtacgtactcgcagtctggcggcgcttcgccgctatgaagaagtgtcgatgccggaggtcatcaaagcagtcaacattgcgcagaatacagcatggcgtattaacaagaaagttctcgacgtagcgaataccatcacccaatggcagcactgtccagtcgcggatgtgcctgcgatggatcgtggcgaaatgccagctcgtccgttggacatcgataccaacgagattgcacttaaagcgtggaagaaagaagcttccgcgttctaccgcaaagacaaagcacgcgttagccgtcgtctgtcaatggagtttatgttatctcaggcgaacaagtttgcgaattataacgcaatctggtttccgcaaaacatggattggcgtgggcgcgtgtacgctgtcccgatgttcaatcctcagggcaacgatatgacgaaaggcctgctgacctttgcgcaggagaaacccattggtgaagacggcttctattggctcaagattcatggcgcaaatacagctggagtggataaagtaccgtttccacaacgcatcaaatttgttgaggataaccatacgaatattatggaatgcgcgaaagcaccgctggaaaacacttggtgggcggaacaggactcgccgttctgttttctggcgttctgctttgagtatgctggcgtcatcaatagtggtctgtcgtacaactgtagcttgcctctggcatttgatggtagttgctccggcctgcaacatttctcagcgatgttacgcgacgaaattggcggcaaagctgtgaatctcctcccatctgcggaataccaggatatttatcgtatcgtcagcgacaaagttaacgagatgctgaaacaagatctgattaacggtacctctaccaccgtggaaacggtgactgataagaagacaggcgaaattacccaacgcacgaaatacgggaccaaagaaatggcacagtggtggttagaacacggtgtgaatcgtggcgtcacgaaacgctcggttatgactttggtgtatgggagcaaagagtttggattccgcgatcaagtgctgagtgacaccattcaaccggcgatcgataacggcaaaggtgacatgtttctgaatccgaatcaggctgctggttacatggcgaaactgatctggaacgcagtgtccgggaccgtagtcgcagcagttgaggcgatgaactggctgaaaagtgcggcgaaattacttgctgctgaagtgaaggatcctaagacggatacagttctgcgtggccgctgcgcagtacattgggtgactcccgacggcttccctgtgtggcaggaatacaagaagcctattcagacgcgcttgaacctgatgttcctcggtcagttccgcttacagcctaccattaacaccaacaaagatagcgagattgatgcacacaaacaggagtctggtatcgctcctaactttgtacacagccaagacggtaaccaccttcgtatgactgtagtgtgggcacacgagaagtacggaatcgaatcttttgcactgattcacgactccttcggtaccattccggctgacgctgcgaacctgttcaaagcagtgcgcgaaactttcgttgacacatatgagtcttgtgatgtactggctgatttctacgaccagttcgctgaccagttgcacgagtctcaactggacaaaatgccagcacttccggctaaaggtaacttgaacctccgtgacatcttaaaatcggacttcgcgttcgcg

SEQ ID NO: 910 - protein, 890 aa, synthetic construct
  REGION 1..890: note = Variant of RNA polymerase
MHHHHHHMNTINIAKNDFSDIELAAIPFNTLADHYGERLAREQLALEHESYEMGEARFRKMFERQLKAGEVADNAAAKPLITTLLPKMIARINDWFEEVKAKRGKRPTAFQFLQEIKPEAVAYITIKTTLACLTSADNTTVQAVASAIGRAIEDEARFGRIRDLEAKHFKKNVEEQLNKRVGHVYKKAFMQVVEHDMLSKGLLGGEAWSSWHKEDSIHVGVRCIEMLIESTGMVSLHRQNAGVVGQDSETIELAPEYAEAIATRAGALAGISPMFQPCVVPPKPWTGITGGGYWAAGRKPLQLVRTRSLAALRRYEEVSMPEVIKAVNIAQNTAWRINKKVLDVANTITQWQHCPVADVPAMDRGEMPARPLDIDTNEIALKAWKKEASAFYRKDKARVSRRLSMEFMLSQANKFANYNAIWFPQNMDWRGRVYAVPMFNPQGNDMTKGLLTFAQEKPIGEDGFYWLKIHGANTAGVDKVPFPQRIKFVEDNHTNIMECAKAPLENTWWAEQDSPFCFLAFCFEYAGVINSGLSYNCSLPLAFDGSCSGLQHFSAMLRDEIGGKAVNLLPSAEYQDIYRIVSDKVNEMLKQDLINGTSTTVETVTDKKTGEITQRTKYGTKEMAQWWLEHGVNRGVTKRSVMTLVYGSKEFGFRDQVLSDTIQPAIDNGKGDMFLNPNQAAGYMAKLIWNAVSGTVVAAVEAMNWLKSAAKLLAAEVKDPKTDTVLRGRCAVHWVTPDGFPVWQEYKKPIQTRLNLMFLGQFRLQPTINTNKDSEIDAHKQESGIAPNFVHSQDGNHLRMTVVWAHEKYGIESFALIHDSFGTIPADAANLFKAVRETFVDTYESCDVLADFYDQFADQLHESQLDKMPALPAKGNLNLRDILKSDFAFA

SEQ ID NO: 911 - DNA, 2670 bp, synthetic construct
  misc_feature 1..2670: note = Variant of RNA polymerase
  source 1..2670: mol_type = other DNA
atgcaccatcaccatcaccatatgaacacgattaacattgctaagaacgacttctctgacatcgaactggctgctatcccgttcaacactctggctgaccattacggtgagcgtttagctcgcgaacagttggcccttgagcatgagtcttacgagatgggtgaagcacgcttccgcaagatgtttgagcgtcaacttaaagctggtgaggttgcggataacgctgccgccaagcctctcatcactaccctactccctaagatgattgcacgcatcaacgactggtttgaggaagtgaaagctaagcgcggcaagcgcccgacagccttccagttcctgcaagaaatcaagccggaagccgtagcgtacatcaccattaagaccactctggcttgcctaaccagtgcggacaatacaaccgttcaggctgtagcaagcgcaatcggtcgggccattgaggacgaggctcgcttcggtcgtatccgtgaccttgaagctaagcacttcaagaaaaacgttgaggaacaactcaacaagcgcgtagggcacccgtacaagaaagcatttatgcaagttgtcgagcacgacatgctctctaagggtctactcggtggcgaggcgtggtcttcgtggcataaggaagactctattcatgtaggagtacgctgcatcgagatgctcattgagtcaaccggaatggttagcttacaccgccaaaatgctggcgtagtaggtcaagactctgagactatcgaactcgcacctgaatacgctgaggctatcgcaacccgtgcaggtgcgctggctggcatctctccgatgttccaaccttgcgtagttcctcctaagccgtggactggcattactggtggtggctattgggctgcggggcgcaaacccctgcagttagtacgtactcgcagtctggcggcgcttcgccgctatgaagaagtgtcgatgccggaggtcatcaaagcagtcaacattgcgcagaatacagcatggcgtattaacaagaaagttctcgacgtagcgaataccatcacccaatggcagcactgtccagtcgcggatgtgcctgcgatggatcgtggcgaaatgccagctcgtccgttggacatcgataccaacgagattgcacttaaagcgtggaagaaagaagcttccgcgttctaccgcaaagacaaagcacgcgttagccgtcgtctgtcaatggagtttatgttatctcaggcgaacaagtttgcgaatgagaacgcaatctggtttccgcaaaacatggattggcgtgggcgcgtgtacgctgtcccgatgttcaatcctcagggcaacgatatgacgaaaggcctgctgacctttgcgcaggagaaacccattggtgaagacggcttctattggctcaagattcatggcgcaaatacagctggagtggataaagtaccgtttccacaacgcatcaaatttgttgaggataaccatacgaatattatggaatgcgcgaaagcaccgctggaaaacacttggtgggcggaacaggactcgccgttctgttttctggcgttctgctttgagtatgctggcgtcatcaatagtggtctgtcgtacaactgtagcttgcctctggcatttgatggtagttgctccggcctgcaacatttctcagcgatgttacgcgacgaaattggcggcaaagctgtgaatctcctcccatctgcggaataccaggatatttatcgtatcgtcagcgacaaagttaacgagatgctgaaacaagatctgattaacggtacctctaccaccgtggaaacggtgactgataagaagacaggcgaaattacccaacgcacgaaatacgggaccaaagaaatggcacagtggtggttagaacacggtgtgaatcgtggcgtcacgaaacgctcggttatgactttggtgtatgggagcaaagagtttggattccgcgatcaagtgctgagtgacaccattcaaccggcgatcgataacggcaaaggtgacatgtttctgaatccgaatcaggctgctggttacatggcgaaactgatctggaacgcagtgtccgggaccgtagtcgcagcagttgaggcgatgaactggctgaaaagtgcggcgaaattacttgctgctgaagtgaaggatccaaagacggacacagttctgcgtggccgctgcgcagtacattgggtgactcccgacggcttccctgtgtggcaggaatacaagaagcctattcagacgcgcttgaacctgatgttcctcggtcagttccgcttacagcctaccattaacaccaacaaagatagcgagattgatgcacacaaacaggagtctggtatcgctcctaactttgtacacagccaagacggtaaccaccttcgtatgactgtagtgtgggcacacgagaagtacggaatcgaatcttttgcactgattcacgactccttcggtaccattccggctgacgctgcgaacctgttcaaagcagtgcgcgaaactttcgttagcacatatgagtcttgtgatgtactggctgatttctacgaccagttcgctgaccagttgcacgagtctcaacgcgacaaaatgccagcacttccggctaaaggtaacttgaacctccgtgacatcttaaaatcggacttcgcgttcgcg

SEQ ID NO: 912 - protein, 890 aa, synthetic construct
  REGION 1..890: note = Variant of RNA polymerase
MHHHHHHMNTINIAKNDFSDIELAAIPFNTLADHYGERLAREQLALEHESYEMGEARFRKMFERQLKAGEVADNAAAKPLITTLLPKMIARINDWFEEVKAKRGKRPTAFQFLQEIKPEAVAYITIKTTLACLTSADNTTVQAVASAIGRAIEDEARFGRIRDLEAKHFKKNVEEQLNKRVGHPYKKAFMQVVEHDMLSKGLLGGEAWSSWHKEDSIHVGVRCIEMLIESTGMVSLHRQNAGVVGQDSETIELAPEYAEAIATRAGALAGISPMFQPCVVPPKPWTGITGGGYWAAGRKPLQLVRTRSLAALRRYEEVSMPEVIKAVNIAQNTAWRINKKVLDVANTITQWQHCPVADVPAMDRGEMPARPLDIDTNEIALKAWKKEASAFYRKDKARVSRRLSMEFMLSQANKFANENAIWFPQNMDWRGRVYAVPMFNPQGNDMTKGLLTFAQEKPIGEDGFYWLKIHGANTAGVDKVPFPQRIKFVEDNHTNIMECAKAPLENTWWAEQDSPFCFLAFCFEYAGVINSGLSYNCSLPLAFDGSCSGLQHFSAMLRDEIGGKAVNLLPSAEYQDIYRIVSDKVNEMLKQDLINGTSTTVETVTDKKTGEITQRTKYGTKEMAQWWLEHGVNRGVTKRSVMTLVYGSKEFGFRDQVLSDTIQPAIDNGKGDMFLNPNQAAGYMAKLIWNAVSGTVVAAVEAMNWLKSAAKLLAAEVKDPKTDTVLRGRCAVHWVTPDGFPVWQEYKKPIQTRLNLMFLGQFRLQPTINTNKDSEIDAHKQESGIAPNFVHSQDGNHLRMTVVWAHEKYGIESFALIHDSFGTIPADAANLFKAVRETFVSTYESCDVLADFYDQFADQLHESQRDKMPALPAKGNLNLRDILKSDFAFA

SEQ ID NO: 913 - DNA, 2670 bp, synthetic construct
  misc_feature 1..2670: note = Variant of RNA polymerase
  source 1..2670: mol_type = other DNA
atgcaccatcaccatcaccatatgaacacgattaacattgctaagaacgacttctctgacatcgaactggctgctatcccgttcaacactctggctgaccattacggtgagcgtttagctcgcgaacagttggcccttgagcatgagtcttacgagatgggtgaagcacgcttccgcaagatgtttgagcgtcaacttaaagctggtgaggttgcggataacgctgccgccaagcctctcatcactaccctactccctaagatgattgcacgcatcaacgactggtttgaggaagtgaaagctaagcgcggcaagcgcccgacagccttccagttcctgcaagaaatcaagccggaagccgtagcgtacatcaccattaagaccactctggcttgcctaaccagtgcggacaatacaaccgttcaggctgtagcaagcgcaatcggtcgggccattgaggacgaggctcgcttcggtcgtatccgtgaccttgaagctaagcacttcaagaagaacgttgaggaacaactcaacaagcgcgtagggcacgtctacaagaaagcatttatgcaagttgtcgagcacgacatgctctctaagggtctactcggtggcgaggcgtggtcttcgtggcataaggaagactctattcatgtaggagtacgctgcatcgagatgctcattgagtcaaccggaatggttagcttacaccgccaaaatgctggcgtagtaggtcaagactctgagactatcgaactcgcacctgaatacgctgaggctatcgcaacccgtgcaggtgcgctggctggcatctctccgatgttccaaccttgcgtagttcctcctaagccgtggactggcattactggtggtggctattgggctgcggggcgcaaacccctgcagttagtacgtactcgcagtctggcggcgcttcgccgctatgaagaagtgtcgatgccggaggtcatcaaagcagtcaacattgcgcagaatacagcatggcgtattaacaagaaagttctcgacgtagcgaataccatcacccaatggcagcactgtccagtcgcggatgtgcctgcgatggatcgtggcgaaatgccagctcgtccgttggacatcgataccaacgagattgcacttaaagcgtggaagaaagaagcttccgcgttctaccgcaaagacaaagcacgcgttagccgtcgtctgtcaatggagtttatgttatctcaggcgaacaagtttgcgaattatgaggcaatctggtttccgcaaaacatggattggcgtgggcgcgtgtacgctgtcccgatgttcaatcctcagggcaacgatatgacgaaaggcctgctgacctttgcgcaggagaaacccattggtgaagacggcttctattggctcaagattcatggcgcaaatacagctggagtggataaagtaccgtttccacaacgcatcaaatttgttgaggataaccatacgaatattatggaatgcgcgaaagcaccgctggaaaacacttggtgggcggaacaggactcgccgttctgttttctggcgttctgctttgagtatgctggcgtcatcaatagtggtctgtcgtacaactgtagcttgcctctggcatttgatggtagttgctccggcctgcaacatttctcagcgatgttacgcgacgaaattggcggcaaagctgtgaatctcctcccatctgcggaataccaggatatttatcgtatcgtcagcgacaaagttaacgagatgctgaaacaagatctgattaacggtacctctaccaccgtggaaacggtgactgataagaagacaggcgaaattacccaacgcacgaaatacgggaccaaagtaatggcacagtggtggttagaacacggtgtgaatcgtggcgtcacgaaacgctcggttatgactttggtgtatgggagcaaagagtttggattccgcgatcaagtgctgagtgacaccattcaaccggcgatcgataacggcaaaggtgacatgtttctgaatccgaatcaggctgctggttacatggcgaaactgatctggaacgcagtgtccgggaccgtagtcgcagcagttgaggcgatgaactggctgaaaagtgcggcgaaattacttgctgctgaagtgaaggatcctaagacggatacagttctgcgtggccgctgcgcagtacattgggtgactcccgacggcttccctgtgtggcaggaatacaagaagcctattcagacgcgcttgaacctgatgttcctcggtcagttccgcttacagcctaccattaacaccaacaaagatagcgagattgatgcacacaaacaggagtctggtatcgctcctaactttgtacacagccaagacggtaaccaccttcgtatgactgtagtgtgggcacacgagaagtacggaatcgaatcttttgcactgattcacgactccttcggtaccattccggctgacgctgcgaacctgttcaaagcagtgcgcgaaactttcgttagcacatatgagtcttgtgatgtactggctgatttctacgaccagttcgctgaccagttgcacgagtctcaactggacaaaatgccagcacttccggctaaaggtaacttgaacctccgtgacatcttaaaatcggacttcgcgttcgcg

SEQ ID NO: 914 - protein, 890 aa, synthetic construct
  REGION 1..890: note = Variant of RNA polymerase
MHHHHHHMNTINIAKNDFSDIELAAIPFNTLADHYGERLAREQLALEHESYEMGEARFRKMFERQLKAGEVADNAAAKPLITTLLPKMIARINDWFEEVKAKRGKRPTAFQFLQEIKPEAVAYITIKTTLACLTSADNTTVQAVASAIGRAIEDEARFGRIRDLEAKHFKKNVEEQLNKRVGHVYKKAFMQVVEHDMLSKGLLGGEAWSSWHKEDSIHVGVRCIEMLIESTGMVSLHRQNAGVVGQDSETIELAPEYAEAIATRAGALAGISPMFQPCVVPPKPWTGITGGGYWAAGRKPLQLVRTRSLAALRRYEEVSMPEVIKAVNIAQNTAWRINKKVLDVANTITQWQHCPVADVPAMDRGEMPARPLDIDTNEIALKAWKKEASAFYRKDKARVSRRLSMEFMLSQANKFANYEAIWFPQNMDWRGRVYAVPMFNPQGNDMTKGLLTFAQEKPIGEDGFYWLKIHGANTAGVDKVPFPQRIKFVEDNHTNIMECAKAPLENTWWAEQDSPFCFLAFCFEYAGVINSGLSYNCSLPLAFDGSCSGLQHFSAMLRDEIGGKAVNLLPSAEYQDIYRIVSDKVNEMLKQDLINGTSTTVETVTDKKTGEITQRTKYGTKVMAQWWLEHGVNRGVTKRSVMTLVYGSKEFGFRDQVLSDTIQPAIDNGKGDMFLNPNQAAGYMAKLIWNAVSGTVVAAVEAMNWLKSAAKLLAAEVKDPKTDTVLRGRCAVHWVTPDGFPVWQEYKKPIQTRLNLMFLGQFRLQPTINTNKDSEIDAHKQESGIAPNFVHSQDGNHLRMTVVWAHEKYGIESFALIHDSFGTIPADAANLFKAVRETFVSTYESCDVLADFYDQFADQLHESQLDKMPALPAKGNLNLRDILKSDFAFA

SEQ ID NO: 915 - DNA, 2670 bp, synthetic construct
  misc_feature 1..2670: note = Variant of RNA polymerase
  source 1..2670: mol_type = other DNA
atgcaccatcaccatcaccatatgaacacgattaacattgctaagaacgacttctctgacatcgaactggctgctatcccgttcaacactctggctgaccattacggtgagcgtttagctcgcgaacagttggcccttgagcatgagtcttacgagatgggtgaagcacgcttccgcaagatgtttgagcgtcaacttaaagctggtgaggttgcggataacgctgccgccaagcctctcatcactaccctactccctaagatgattgcacgcatcaacgactggtttgaggaagtgaaagctaagcgcggcaagcgcccgacagccttccagttcctgcaagaaatcaagccggaagccgtagcgtacatcaccattaagaccactctggcttgcctaaccagtgcggacaatacaaccgttcaggctgtagcaagcgcaatcggtcgggccattgaggacgaggctcgcttcggtcgtatccgtgaccttgaagctaagcacttcaagaagaacgttgaggaacaactcaacaagcgcgtagggcacccgtacaagaaagcatttatgcaagttgtcgagcacgacatgctctctaagggtctactcggtggcgaggcgtggtcttcgtggcataaggaagactctattcatgtaggagtacgctgcatcgagatgctcattgagtcaaccggaatggttagcttacaccgccaaaatgctggcgtagtaggtcaagactctgagactatcgaactcgcacctgaatacgctgaggctatcgcaacccgtgcaggtgcgctggctggcatctctccgatgttccaaccttgcgtagttcctcctaagccgtggactggcattactggtggtggctattgggctgcggggcgcaaacccctgcagttagtacgtactcgcagtctggcggcgcttcgccgctatgaagaagtgtcgatgccggaggtcatcaaagcagtcaacattgcgcagaatacagcatggcgtattaacaagaaagttctcgacgtagcgaataccatcacccaatggcagcactgtccagtcgcggatgtgcctgcgatggatcgtggcgaaatgccagctcgtccgttggacatcgataccaacgagattgcacttaaagcgtggaagaaagaagcttccgcgttctaccgcaaagacaaagcacgcgttagccgtcgtctgtcaatggagtttatgttatctcaggcgaacaagtttgcgaattataacgcaatctggtttccgcaaaacatggattggcgtgggcgcgtgtacgctgtcccgatgttcaatcctcagggcaacgatatgacgaaaggcctgctgacctttgcgcaggagaaacccattggtgaagacggcttctattggctcaagattcatggcgcaaatacagctggagtggataaagtaccgtttccacaacgcatcaaatttgttgaggataaccatacgaatattatggaatgcgcgaaagcaccgctggaaaacacttggtgggcggaacaggactcgccgttctgttttctggcgttctgctttgagtatgctggcgtcatcaatagtggtctgtcgtacaactgtagcttgcctctggcatttgatggtagttgctccggcctgcaacatttctcagcgatgttacgcgacgaaattggcggcaaagctgtgaatctcctcccatctgcggaataccaggatatttatcgtatcgtcagcgacaaagttaacgagatgctgaaacaagatctgattaacggtacctctaccaccgtggaaacggtgactgataagaagacaggcgaaattacccaacgcacgaaatacgggaccaaagaaatggcacagtggtggttagaacacggtgtgaatcgtggcgtcacgaaacgctcggttatgactttggtgtatgggagcaaagagtttggattccgcgatcaagtgctgagtgacaccattcaaccggcgatcgataacggcaaaggtgacatgtttctgaatccgaatcaggctgctggttacatggcgaaactgatctggaacgcagtgtccgggaccgtagtcgcagcagttgaggcgatgaactggctgaaaagtgcggcgaaattacttgctgctgaagtgaaggatccaaagacgggcacagttctgcgtggccgctgcgcagtacattgggtgactcccgacggcttccctgtgtggcaggaatacaagaagcctattcagacgcgcttgaacctgatgttcctcggtcagttccgcttacagcctaccattaacaccaacaaagatagcgagattgatgcacacaaacaggagtctggtatcgctcctaactttgtacacagccaagacggtaaccaccttcgtatgactgtagtgtgggcacacgagaagtacggaatcgaatcttttgcactgattcacgactccttcggtaccattccggctgacgctgcgaacctgttcaaagcagtgcgcgaaactatggttagcacatatgagtcttgtgatgtactggctgatttctacgaccagttcgctgaccagttgcacgagtctcaactggacaaaatgccagcacttccggctaaaggtaacttgaacctccgtgacatcttaaaatcggacttcgcgttcgcg

SEQ ID NO: 916 - protein, 890 aa, synthetic construct
  REGION 1..890: note = Variant of RNA polymerase
MHHHHHHMNTINIAKNDFSDIELAAIPFNTLADHYGERLAREQLALEHESYEMGEARFRKMFERQLKAGEVADNAAAKPLITTLLPKMIARINDWFEEVKAKRGKRPTAFQFLQEIKPEAVAYITIKTTLACLTSADNTTVQAVASAIGRAIEDEARFGRIRDLEAKHFKKNVEEQLNKRVGHPYKKAFMQVVEHDMLSKGLLGGEAWSSWHKEDSIHVGVRCIEMLIESTGMVSLHRQNAGVVGQDSETIELAPEYAEAIATRAGALAGISPMFQPCVVPPKPWTGITGGGYWAAGRKPLQLVRTRSLAALRRYEEVSMPEVIKAVNIAQNTAWRINKKVLDVANTITQWQHCPVADVPAMDRGEMPARPLDIDTNEIALKAWKKEASAFYRKDKARVSRRLSMEFMLSQANKFANYNAIWFPQNMDWRGRVYAVPMFNPQGNDMTKGLLTFAQEKPIGEDGFYWLKIHGANTAGVDKVPFPQRIKFVEDNHTNIMECAKAPLENTWWAEQDSPFCFLAFCFEYAGVINSGLSYNCSLPLAFDGSCSGLQHFSAMLRDEIGGKAVNLLPSAEYQDIYRIVSDKVNEMLKQDLINGTSTTVETVTDKKTGEITQRTKYGTKEMAQWWLEHGVNRGVTKRSVMTLVYGSKEFGFRDQVLSDTIQPAIDNGKGDMFLNPNQAAGYMAKLIWNAVSGTVVAAVEAMNWLKSAAKLLAAEVKDPKTGTVLRGRCAVHWVTPDGFPVWQEYKKPIQTRLNLMFLGQFRLQPTINTNKDSEIDAHKQESGIAPNFVHSQDGNHLRMTVVWAHEKYGIESFALIHDSFGTIPADAANLFKAVRETMVSTYESCDVLADFYDQFADQLHESQLDKMPALPAKGNLNLRDILKSDFAFA

SEQ ID NO: 917 - DNA, 2670 bp, synthetic construct
  misc_feature 1..2670: note = Variant of RNA polymerase
  source 1..2670: mol_type = other DNA
atgcaccatcaccatcaccatatgaacacgattaacattgctaagaacgacttctctgacatcgaactggctgctatcccgttcaacactctggctgaccattacggtgagcgtttagctcgcgaacagttggcccttgagcatgagtcttacgagatgggtgaagcacgcttccgcaagatgtttgagcgtcaacttaaagctggtgaggttgcggataacgctgccgccaagcctctcatcactaccctactccctaagatgattgcacgcatcaacgactggtttgaggaagtgaaagctaagcgcggcaagcgcccgacagccttccagttcctgcaagaaatcaagccggaagccgtagcgtacatcaccattaagaccactctggcttgcctaaccagtgcggacaatacaaccgttcaggctgtagcaagcgcaatcggtcgggccattgaggacgaggctcgcttcggtcgtatccgtgaccttgaagctaagcacttcaagaaaaacgttgaggaacaactcaacaagcgcgtagggcacgtgtacaagaaagcatttatgcaagttgtcgagcacgacatgctctctaagggtctactcggtggcgaggcgtggtcttcgtggcataaggaagactctattcatgtaggagtacgctgcatcgagatgctcattgagtcaaccggaatggttagcttacaccgccaaaatgctggcgtagtaggtcaagactctgagactatcgaactcgcacctgaatacgctgaggctatcgcaacccgtgcaggtgcgctggctggcatctctccgatgttccaaccttgcgtagttcctcctaagccgtggactggcattactggtggtggctattgggctgcggggcgcaaacccctgcagttagtacgtactcgcagtctggcggcgcttcgccgctatgaagaagtgtcgatgccggaggtcatcaaagcagtcaacattgcgcagaatacagcatggcgtattaacaagaaagttctcgacgtagcgaataccatcacccaatggcagcactgtccagtcgcggatgtgcctgcgatggatcgtggcgaaatgccagctcgtccgttggacatcgataccaacgagattgcacttaaagcgtggaagaaagaagcttccgcgttctaccgcaaagacaaagcacgcgttagccgtcgtctgtcaatggagtttatgttatctcaggcgaacaagtttgcgaatgaggaggcaatctggtttccgcaaaacatggattggcgtgggcgcgtgtacgctgtcccgatgttcaatcctcagggcaacgatatgacgaaaggcctgctgacctttgcgcaggagaaacccattggtgaagacggcttctattggctcaagattcatggcgcaaatacagctggagtggataaagtaccgtttccacaacgcatcaaatttgttgaggataaccatacgaatattatggaatgcgcgaaagcaccgctggaaaacacttggtgggcggaacaggactcgccgttctgttttctggcgttctgctttgagtatgctggcgtcatcaatagtggtctgtcgtacaactgtagcttgcctctggcatttgatggtagttgctccggcctgcaacatttctcagcgatgttacgcgacgaaattggcggcaaagctgtgaatctcctcccatctgcggaataccaggatatttatcgtatcgtcagcgacaaagttaacgagatgctgaaacaagatctgattaacggtacctctaccaccgtggaaacggtgactgataagaagacaggcgaaattacccaacgcacgaaatacgggaccaaagaaatggcacagtggtggttagaacacggtgtgaatcgtggcgtcacgaaacgctcggttatgactttggtgtatgggagcaaagagtttggattccgcgatcaagtgctgagtgacaccattcaaccggcgatcgataacggcaaaggtgacatgtttctgaatccgaatcaggctgctggttacatggcgaaactgatctggaacgcagtgtccgggaccgtagtcgcagcagttgaggcgatgaactggctgaaaagtgcggcgaaattacttgctgctgaagtgaaggatcctaagacggatacagttctgcgtggccgctgcgcagtacattgggtgactcccgacggcttccctgtgtggcaggaatacaagaagcctattcagacgcgcttgaacctgatgttcctcggtcagttccgcttacagcctaccattaacaccaacaaagatagcgagattgatgcacacaaacaggagtctggtatcgctcctaactttgtacacagccaagacggtaaccaccttcgtatgactgtagtgtgggcacacgagaagtacggaatcgaatcttttgcactgattcacgactccttcggtaccattccggctgacgctgcgaacctgttcaaagcagtgcgcgaaactatggttagcacatatgagtcttgtgatgtactggctgatttctacgaccagttcgctgaccagttgcacgagtctcaactggacaaaatgccagcacttccggctaaaggtaacttgaacctccgtgacatcttaaaatcggacttcgcgttcgcg

SEQ ID NO: 918 - protein, 890 aa, synthetic construct
  REGION 1..890: note = Variant of RNA polymerase
MHHHHHHMNTINIAKNDFSDIELAAIPFNTLADHYGERLAREQLALEHESYEMGEARFRKMFERQLKAGEVADNAAAKPLITTLLPKMIARINDWFEEVKAKRGKRPTAFQFLQEIKPEAVAYITIKTTLACLTSADNTTVQAVASAIGRAIEDEARFGRIRDLEAKHFKKNVEEQLNKRVGHVYKKAFMQVVEHDMLSKGLLGGEAWSSWHKEDSIHVGVRCIEMLIESTGMVSLHRQNAGVVGQDSETIELAPEYAEAIATRAGALAGISPMFQPCVVPPKPWTGITGGGYWAAGRKPLQLVRTRSLAALRRYEEVSMPEVIKAVNIAQNTAWRINKKVLDVANTITQWQHCPVADVPAMDRGEMPARPLDIDTNEIALKAWKKEASAFYRKDKARVSRRLSMEFMLSQANKFANEEAIWFPQNMDWRGRVYAVPMFNPQGNDMTKGLLTFAQEKPIGEDGFYWLKIHGANTAGVDKVPFPQRIKFVEDNHTNIMECAKAPLENTWWAEQDSPFCFLAFCFEYAGVINSGLSYNCSLPLAFDGSCSGLQHFSAMLRDEIGGKAVNLLPSAEYQDIYRIVSDKVNEMLKQDLINGTSTTVETVTDKKTGEITQRTKYGTKEMAQWWLEHGVNRGVTKRSVMTLVYGSKEFGFRDQVLSDTIQPAIDNGKGDMFLNPNQAAGYMAKLIWNAVSGTVVAAVEAMNWLKSAAKLLAAEVKDPKTDTVLRGRCAVHWVTPDGFPVWQEYKKPIQTRLNLMFLGQFRLQPTINTNKDSEIDAHKQESGIAPNFVHSQDGNHLRMTVVWAHEKYGIESFALIHDSFGTIPADAANLFKAVRETMVSTYESCDVLADFYDQFADQLHESQLDKMPALPAKGNLNLRDILKSDFAFA

SEQ ID NO: 919 - DNA, 2670 bp, synthetic construct
  misc_feature 1..2670: note = Variant of RNA polymerase
  source 1..2670: mol_type = other DNA
atgcaccatcaccatcaccatatgaacacgattaacattgctaagaacgacttctctgacatcgaactggctgctatcccgttcaacactctggctgaccattacggtgagcgtttagctcgcgaacagttggcccttgagcatgagtcttacgagatgggtgaagcacgcttccgcaagatgtttgagcgtcaacttaaagctggtgaggttgcggataacgctgccgccaagcctctcatcactaccctactccctaagatgattgcacgcatcaacgactggtttgaggaagtgaaagctaagcgcggcaagcgcccgacagccttccagttcctgcaagaaatcaagccggaagccgtagcgtacatcaccattaagaccactctggcttgcctaaccagtgcggacaatacaaccgttcaggctgtagcaagcgcaatcggtcgggccattgaggacgaggctcgcttcggtcgtatccgtgaccttgaagctaagcacttcaagaagaacgttgaggaacaactcaacaaggaggtagggcacgtctacaagaaagcatttatgcaagttgtcgagcacgacatgctctctaagggtctactcggtggcgaggcgtggtcttcgtggcataaggaagactctattcatgtaggagtacgctgcatcgagatgctcattgagtcaaccggaatggttagcttacaccgccaaaatgctggcgtagtaggtcaagactctgagactatcgaactcgcacctgaatacgctgaggctatcgcaacccgtgcaggtgcgctggctggcatctctccgatgttccaaccttgcgtagttcctcctaagccgtggactggcattactggtggtggctattgggctgcggggcgcaaacccctgcagttagtacgtactcgcagtctggcggcgcttcgccgctatgaagaagtgtcgatgccggaggtcatcaaagcagtcaacattgcgcagaatacagcatggcgtattaacaagaaagttctcgacgtagcgaataccatcacccaatggcagcactgtccagtcgcggatgtgcctgcgatggatcgtggcgaaatgccagctcgtccgttggacatcgataccaacgagattgcacttaaagcgtggaagaaagaagcttccgcgttctaccgcaaagacaaagcacgcgttagccgtcgtctgtcaatggagtttatgttatctcaggcgaacaagtttgcgaattataaagcaatctggtttccgcaaaacatggattggcgtgggcgcgtgtacgctgtcccgatgttcaatcctcagggcaacgatatgacgaaaggcctgctgacctttgcgcaggagaaacccattggtgaagacggcttctattggctcaagattcatggcgcaaatacagctggagtggataaagtaccgtttccacaacgcatcaaatttgttgaggataaccatacgaatattatggaatgcgcgaaagcaccgctggaaaacacttggtgggcggaacaggactcgccgttctgttttctggcgttctgctttgagtatgctggcgtcatcaatagtggtctgtcgtacaactgtagcttgcctctggcatttgatggtagttgctccggcctgcaacatttctcagcgatgttacgcgacgaaattggcggcaaagctgtgaatctcctcccatctgcggaataccaggatatttatcgtatcgtcagcgacaaagttaacgagatgctgaaacaagatctgattaacggtacctctaccaccgtggaaacggtgactgataagaagacaggcgaaattacccaacgcacgaaatacgggaccaaagttatggcacagtggtggttagaacacggtgtgaatcgtggcgtcacgaaacgctcggttatgactttggtgtatgggagcaaagagtttggattccgcgatcaagtgctgagtgacaccattcaaccggcgatcgataacggcaaaggtgacatgtttctgaatccgaatcaggctgctggttacatggcgaaactgatctggaacgcagtgtccgggaccgtagtcgcagcagttgaggcgatgaactggctgaaaagtgcggcgaaattacttgctgctgaagtgaaggatcctaagacggatacagttctgcgtggccgctgcgcagtacattgggtgactcccgacggcttccctgtgtggcaggaatacaagaagcctattcagacgcgcttgaacctgatgttcctcggtcagttccgcttacagcctaccattaacaccaacaaagatagcgagattgatgcacacaaacaggagtctggtatcgctcctaactttgtacacagccaagacggtaaccaccttcgtatgactgtagtgtgggcacacgagaagtacggaatcgaatcttttgcactgattcacgactccttcggtaccattccggctgacgctgcgaacctgttcaaagcagtgcgcgaaactatggtttcgacatatgagtcttgtgatgtactggctgatttctacgaccagttcgctgaccagttgcacgagtctcaattggacaaaatgccagcacttccggctaaaggtaacttgaacctccgtgacatcttaaaatcggacttcgcgttcgcg

SEQ ID NO: 920 - protein, 890 aa, synthetic construct
  REGION 1..890: note = Variant of RNA polymerase
MHHHHHHMNTINIAKNDFSDIELAAIPFNTLADHYGERLAREQLALEHESYEMGEARFRKMFERQLKAGEVADNAAAKPLITTLLPKMIARINDWFEEVKAKRGKRPTAFQFLQEIKPEAVAYITIKTTLACLTSADNTTVQAVASAIGRAIEDEARFGRIRDLEAKHFKKNVEEQLNKEVGHVYKKAFMQVVEHDMLSKGLLGGEAWSSWHKEDSIHVGVRCIEMLIESTGMVSLHRQNAGVVGQDSETIELAPEYAEAIATRAGALAGISPMFQPCVVPPKPWTGITGGGYWAAGRKPLQLVRTRSLAALRRYEEVSMPEVIKAVNIAQNTAWRINKKVLDVANTITQWQHCPVADVPAMDRGEMPARPLDIDTNEIALKAWKKEASAFYRKDKARVSRRLSMEFMLSQANKFANYKAIWFPQNMDWRGRVYAVPMFNPQGNDMTKGLLTFAQEKPIGEDGFYWLKIHGANTAGVDKVPFPQRIKFVEDNHTNIMECAKAPLENTWWAEQDSPFCFLAFCFEYAGVINSGLSYNCSLPLAFDGSCSGLQHFSAMLRDEIGGKAVNLLPSAEYQDIYRIVSDKVNEMLKQDLINGTSTTVETVTDKKTGEITQRTKYGTKVMAQWWLEHGVNRGVTKRSVMTLVYGSKEFGFRDQVLSDTIQPAIDNGKGDMFLNPNQAAGYMAKLIWNAVSGTVVAAVEAMNWLKSAAKLLAAEVKDPKTDTVLRGRCAVHWVTPDGFPVWQEYKKPIQTRLNLMFLGQFRLQPTINTNKDSEIDAHKQESGIAPNFVHSQDGNHLRMTVVWAHEKYGIESFALIHDSFGTIPADAANLFKAVRETMVSTYESCDVLADFYDQFADQLHESQLDKMPALPAKGNLNLRDILKSDFAFA

SEQ ID NO: 921 - DNA, 2670 bp, synthetic construct
  misc_feature 1..2670: note = Variant of RNA polymerase
  source 1..2670: mol_type = other DNA
atgcaccatcaccatcaccatatgaacacgattaacattgctaagaacgacttctctgacatcgaactggctgctatcccgttcaacactctggctgaccattacggtgagcgtttagctcgcgaacagttggcccttgagcatgagtcttacgagatgggtgaagcacgcttccgcaagatgtttgagcgtcaacttaaagctggtgaggttgcggataacgctgccgccaagcctctcatcactaccctactccctaagatgattgcacgcatcaacgactggtttgaggaagtgaaagctaagcgcggcaagcgcccgacagccttccagttcctgcaagaaatcaagccggaagccgtagcgtacatcaccattaagaccactctggcttgcctaaccagtgcggacaatacaaccgttcaggctgtagcaagcgcaatcggtcgggccattgaggacgaggctcgcttcggtcgtatccgtgaccttgaagctaagcacttcaagaagaacgttgaggaacaactcaacaagcgcgtagggcacgtcaataagaaagcatttatgcaagttgtcgagcacgacatgctctctaagggtctactcggtggcgaggcgtggtcttcgtggcataaggaagactctattcatgtaggagtacgctgcatcgagatgctcattgagtcaaccggaatggttagcttacaccgccaaaatgctggcgtagtaggtcaagactctgagactatcgaactcgcacctgaatacgctgaggctatcgcaacccgtgcaggtgcgctggctggcatctctccgatgttccaaccttgcgtagttcctcctaagccgtggactggcattactggtggtggctattgggctgcggggcgcaaacccctgcagttagtacgtactcgcagtctggcggcgcttcgccgctatgaagaagtgtcgatgccggaggtcatcaaagcagtcaacattgcgcagaatacagcatggcgtattaacaagaaagttctcgacgtagcgaataccatcacccaatggcagcactgtccagtcgcggatgtgcctgcgatggatcgtggcgaaatgccagctcgtccgttggacatcgataccaacgagattgcacttaaagcgtggaagaaagaagcttccgcgttctaccgcaaagacaaagcacgcgttagccgtcgtctgtcaatggagtttatgttatctcaggcgaacaagtttgcgaattataaagcaatctggtttccgcaaaacatggattggcgtgggcgcgtgtacgctgtcccgatgttcaatcctcagggcaacgatatgacgaaaggcctgctgacctttgcgcaggagaaacccattggtgaagacggcttctattggctcaagattcatggcgcaaatacagctggagtggataaagtaccgtttccacaacgcatcaaatttgttgaggataaccatacgaatattatggaatgcgcgaaagcaccgctggaaaacacttggtgggcggaacaggactcgccgttctgttttctggcgttctgctttgagtatgctggcgtcatcaatagtggtctgtcgtacaactgtagcttgcctctggcatttgatggtagttgctccggcctgcaacatttctcagcgatgttacgcgacgaaattggcggcaaagctgtgaatctcctcccatctgcggaataccaggatatttatcgtatcgtcagcgacaaagttaacgagatgctgaaacaagatctgattaacggtacctctaccaccgtggaaacggtgactgataagaagacaggcgaaattacccaacgcacgaaatacgggaccaaagttatggcacagtggtggttagaacacggtgtgaatcgtggcgtcacgaaacgctcggttatgactttggtgtatgggagcaaagagtttggattccgcgatcaagtgctgagtgacaccattcaaccggcgatcgataacggcaaaggtgacatgtttctgaatccgaatcaggctgctggttacatggcgaaactgatctggaacgcagtgtccgggaccgtagtcgcagcagttgaggcgatgaactggctgaaaagtgcggcgaaattacttgctgctgaagtgaaggatcctaagacggatacagttctgcgtggccgctgcgcagtacattgggtgactcccgacggcttccctgtgtggcaggaatacaagaagcctattcagacgcgcttgaacctgatgttcctcggtcagttccgcttacagcctaccattaacaccaacaaagatagcgagattgatgcacacaaacaggagtctggtatcgctcctaactttgtacacagccaagacggtaaccaccttcgtatgactgtagtgtgggcacacgagaagtacggaatcgaatcttttgcactgattcacgactccttcggtaccattccggctgacgctgcgaacctgttcaaagcagtgcgcgaaactatggtttcgacatatgagtcttgtgatgtactggctgatttctacgaccagttcgctgaccagttgcacgagtctcaattggacaaaatgccagcacttccggctaaaggtaacttgaacctccgtgacatcttaaaatcggacttcgcgttcgcg

SEQ ID NO: 922 - protein, 890 aa, synthetic construct
  REGION 1..890: note = Variant of RNA polymerase
MHHHHHHMNTINIAKNDFSDIELAAIPFNTLADHYGERLAREQLALEHESYEMGEARFRKMFERQLKAGEVADNAAAKPLITTLLPKMIARINDWFEEVKAKRGKRPTAFQFLQEIKPEAVAYITIKTTLACLTSADNTTVQAVASAIGRAIEDEARFGRIRDLEAKHFKKNVEEQLNKRVGHVNKKAFMQVVEHDMLSKGLLGGEAWSSWHKEDSIHVGVRCIEMLIESTGMVSLHRQNAGVVGQDSETIELAPEYAEAIATRAGALAGISPMFQPCVVPPKPWTGITGGGYWAAGRKPLQLVRTRSLAALRRYEEVSMPEVIKAVNIAQNTAWRINKKVLDVANTITQWQHCPVADVPAMDRGEMPARPLDIDTNEIALKAWKKEASAFYRKDKARVSRRLSMEFMLSQANKFANYKAIWFPQNMDWRGRVYAVPMFNPQGNDMTKGLLTFAQEKPIGEDGFYWLKIHGANTAGVDKVPFPQRIKFVEDNHTNIMECAKAPLENTWWAEQDSPFCFLAFCFEYAGVINSGLSYNCSLPLAFDGSCSGLQHFSAMLRDEIGGKAVNLLPSAEYQDIYRIVSDKVNEMLKQDLINGTSTTVETVTDKKTGEITQRTKYGTKVMAQWWLEHGVNRGVTKRSVMTLVYGSKEFGFRDQVLSDTIQPAIDNGKGDMFLNPNQAAGYMAKLIWNAVSGTVVAAVEAMNWLKSAAKLLAAEVKDPKTDTVLRGRCAVHWVTPDGFPVWQEYKKPIQTRLNLMFLGQFRLQPTINTNKDSEIDAHKQESGIAPNFVHSQDGNHLRMTVVWAHEKYGIESFALIHDSFGTIPADAANLFKAVRETMVSTYESCDVLADFYDQFADQLHESQLDKMPALPAKGNLNLRDILKSDFAFA

SEQ ID NO: 923 - DNA, 2670 bp, synthetic construct
  misc_feature 1..2670: note = Variant of RNA polymerase
  source 1..2670: mol_type = other DNA
atgcaccatcaccatcaccatatgaacacgattaacattgctaagaacgacttctctgacatcgaactggctgctatcccgttcaacactctggctgaccattacggtgagcgtttagctcgcgaacagttggcccttgagcatgagtcttacgagatgggtgaagcacgcttccgcaagatgtttgagcgtcaacttaaagctggtgaggttgcggataacgctgccgccaagcctctcatcactaccctactccctaagatgattgcacgcatcaacgactggtttgaggaagtgaaagctaagcgcggcaagcgcccgacagccttccagttcctgcaagaaatcaagccggaagccgtagcgtacatcaccattaagaccactctggcttgcctaaccagtgcggacaatacaaccgttcaggctgtagcaagcgcaatcggtcgggccattgaggacgaggctcgcttcggtcgtatccgtgaccttgaagctaagcacttcaagaagaacgttgaggaacaactcaacaagcgcgtagggcacccgtacaagaaagcatttatgcaagttgtcgagcacgacatgctctctaagggtctactcggtggcgaggcgtggtcttcgtggcataaggaagactctattcatgtaggagtacgctgcatcgagatgctcattgagtcaaccggaatggttagcttacaccgccaaaatgctggcgtagtaggtcaagactctgagactatcgaactcgcacctgaatacgctgaggctatcgcaacccgtgcaggtgcgctggctggcatctctccgatgttccaaccttgcgtagttcctcctaagccgtggactggcattactggtggtggctattgggctgcggggcgcaaacccctgcagttagtacgtactcgcagtctggcggcgcttcgccgctatgaagaagtgtcgatgccggaggtcatcaaagcagtcaacattgcgcagaatacagcatggcgtattaacaagaaagttctcgacgtagcgaataccatcacccaatggcagcactgtccagtcgcggatgtgcctgcgatggatcgtggcgaaatgccagctcgtccgttggacatcgataccaacgagattgcacttaaagcgtggaagaaagaagcttccgcgttctaccgcaaagacaaagcacgcgttagccgtcgtctgtcaatggagtttatgttatctcaggcgaacaagtttgcgaattatatggcaatctggtttccgcaaaacatggattggcgtgggcgcgtgtacgctgtcccgatgttcaatcctcagggcaacgatatgacgaaaggcctgctgacctttgcgcaggagaaacccattggtgaagacggcttctattggctcaagattcatggcgcaaatacagctggagtggataaagtaccgtttccacaacgcatcaaatttgttgaggataaccatacgaatattatggaatgcgcgaaagcaccgctggaaaacacttggtgggcggaacaggactcgccgttctgttttctggcgttctgctttgagtatgctggcgtcatcaatagtggtctgtcgtacaactgtagcttgcctctggcatttgatggtagttgctccggcctgcaacatttctcagcgatgttacgcgacgaaattggcggcaaagctgtgaatctcctcccatctgcggaataccaggatatttatcgtatcgtcagcgacaaagttaacgagatgctgaaacaagatctgattaacggtacctctaccaccgtggaaacggtgactgataagaagacaggcgaaattacccaacgcacgaaatacgggaccaaagaaatggcacagtggtggttagaacacggtgtgaatcgtggcgtcacgaaacgctcggttatgactttggtgtatgggagcaaagagtttggattccgcgatcaagtgctgagtgacaccattcaaccggcgatcgataacggcaaaggtgacatgtttctgaatccgaatcaggctgctggttacatggcgaaactgatctggaacgcagtgtccgggaccgtagtcgcagcagttgaggcgatgaactggctgaaaagtgcggcgaaattacttgctgctgaagtgaaggatccaaagacggacacagttctgcgtggccgctgcgcagtacattgggtgactcccgacggcttccctgtgtggcaggaatacaagaagcctattcagacgcgcttgaacctgatgttcctcggtcagttccgcttacagcctaccattaacaccaacaaagatagcgagattgatgcacacaaacaggagtctggtatcgctcctaactttgtacacagccaagacggtaaccaccttcgtatgactgtagtgtgggcacacgagaagtacggaatcgaatcttttgcactgattcacgactccttcggtaccattccggctgacgctgcgaacctgttcaaagcagtgcgcgaaactatggtttcgacatatgagtcttgtgatgtactggctgatttctacgaccagttcgctgaccagttgcacgagtctcaattggacaaaatgccagcacttccggctaaaggtaacttgaacctccgtgacatcttaaaatcggacttcgcgttcgcg

SEQ ID NO: 924 - protein, 890 aa, synthetic construct
  REGION 1..890: note = Variant of RNA polymerase
MHHHHHHMNTINIAKNDFSDIELAAIPFNTLADHYGERLAREQLALEHESYEMGEARFRKMFERQLKAGEVADNAAAKPLITTLLPKMIARINDWFEEVKAKRGKRPTAFQFLQEIKPEAVAYITIKTTLACLTSADNTTVQAVASAIGRAIEDEARFGRIRDLEAKHFKKNVEEQLNKRVGHPYKKAFMQVVEHDMLSKGLLGGEAWSSWHKEDSIHVGVRCIEMLIESTGMVSLHRQNAGVVGQDSETIELAPEYAEAIATRAGALAGISPMFQPCVVPPKPWTGITGGGYWAAGRKPLQLVRTRSLAALRRYEEVSMPEVIKAVNIAQNTAWRINKKVLDVANTITQWQHCPVADVPAMDRGEMPARPLDIDTNEIALKAWKKEASAFYRKDKARVSRRLSMEFMLSQANKFANYMAIWFPQNMDWRGRVYAVPMFNPQGNDMTKGLLTFAQEKPIGEDGFYWLKIHGANTAGVDKVPFPQRIKFVEDNHTNIMECAKAPLENTWWAEQDSPFCFLAFCFEYAGVINSGLSYNCSLPLAFDGSCSGLQHFSAMLRDEIGGKAVNLLPSAEYQDIYRIVSDKVNEMLKQDLINGTSTTVETVTDKKTGEITQRTKYGTKEMAQWWLEHGVNRGVTKRSVMTLVYGSKEFGFRDQVLSDTIQPAIDNGKGDMFLNPNQAAGYMAKLIWNAVSGTVVAAVEAMNWLKSAAKLLAAEVKDPKTDTVLRGRCAVHWVTPDGFPVWQEYKKPIQTRLNLMFLGQFRLQPTINTNKDSEIDAHKQESGIAPNFVHSQDGNHLRMTVVWAHEKYGIESFALIHDSFGTIPADAANLFKAVRETMVSTYESCDVLADFYDQFADQLHESQLDKMPALPAKGNLNLRDILKSDFAFA

SEQ ID NO: 925 - DNA, 2670 bp, synthetic construct
  misc_feature 1..2670: note = Variant of RNA polymerase
  source 1..2670: mol_type = other DNA
atgcaccatcaccatcaccatatgaacacgattaacattgctaagaacgacttctctgacatcgaactggctgctatcccgttcaacactctggctgaccattacggtgagcgtttagctcgcgaacagttggcccttgagcatgagtcttacgagatgggtgaagcacgcttccgcaagatgtttgagcgtcaacttaaagctggtgaggttgcggataacgctgccgccaagcctctcatcactaccctactccctaagatgattgcacgcatcaacgactggtttgaggaagtgaaagctaagcgcggcaagcgcccgacagccttccagttcctgcaagaaatcaagccggaagccgtagcgtacatcaccattaagaccactctggcttgcctaaccagtgcggacaatacaaccgttcaggctgtagcaagcgcaatcggtcgggccattgaggacgaggctcgcttcggtcgtatccgtgaccttgaagctaagcacttcaagaagaacgttgaggaacaactcaacaagcgcgtagggcacgtctacaagaaagcatttatgcaagttgtcgagcacgacatgctctctaagggtctactcggtggcgaggcgtggtcttcgtggcataaggaagactctattcatgtaggagtacgctgcatcgagatgctcattgagtcaaccggaatggttagcttacaccgccaaaatgctggcgtagtaggtcaagactctgagactatcgaactcgcacctgaatacgctgaggctatcgcaacccgtgcaggtgcgctggctggcatctctccgatgttccaaccttgcgtagttcctcctaagccgtggactggcattactggtggtggctattgggctgcggggcgcaaacccctgcagttagtacgtactcgcagtctggcggcgcttcgccgctatgaagaagtgtcgatgccggaggtcatcaaagcagtcaacattgcgcagaatacagcatggcgtattaacaagaaagttctcgacgtagcgaataccatcacccaatggcagcactgtccagtcgcggatgtgcctgcgatggatcgtggcgaaatgccagctcgtccgttggacatcgataccaacgagattgcacttaaagcgtggaagaaagaagcttccgcgttctaccgcaaagacaaagcacgcgttagccgtcgtctgtcaatggagtttatgttatctcaggcgaacaagtttgcgaattataaagcaatctggtttccgcaaaacatggattggcgtgggcgcgtgtacgctgtcccgatgttcaatcctcagggcaacgatatgacgaaaggcctgctgacctttgcgcaggagaaacccattggtgaagacggcttctattggctcaagattcatggcgcaaatacagctggagtggataaagtaccgtttccacaacgcatcaaatttgttgaggataaccatacgaatgtgatggaatgcgcgaaagcaccgctggaaaacacttggtgggcggaacaggactcgccgttctgttttctggcgttctgctttgagtatgctggcgtcatcaatagtggtctgtcgtacaactgtagcttgcctctggcatttgatggtagttgctccggcctgcaacatttctcagcgatgttacgcgacgaaattggcggcaaagctgtgaatctcctcccatctgcggaataccaggatatttatcgtatcgtcagcgacaaagttaacgagatgctgaaacaagatctgattaacggtacctctaccaccgtggaaacggtgactgataagaagacaggcgaaattacccaacgcacgaaatacgggaccaaagttatggcacagtggtggttagaacacggtgtgaatcgtggcgtcacgaaacgctcggttatgactttggtgtatgggagcaaagagtttggattccgcgatcaagtgctgagtgacaccattcaaccggcgatcgataacggcaaaggtgacatgtttctgaatccgaatcaggctgctggttacatggcgaaactgatctggaacgcagtgtccgggaccgtagtcgcagcagttgaggcgatgaactggctgaaaagtgcggcgaaattacttgctgctgaagtgaaggatcctaagacggatacagttctgcgtggccgctgcgcagtacattgggtgactcccgacggcttccctgtgtggcaggaatacaagaagcctattcagacgcgcttgaacctgatgttcctcggtcagttccgcttacagcctaccattaacaccaacaaagatagcgagattgatgcacacaaacaggagtctggtatcgctcctaactttgtacacagccaagacggtaaccaccttcgtatgactgtagtgtgggcacacgagaagtacggaatcgaatcttttgcactgattcacgactccttcggtaccattccggctgacgctgcgaacctgttcaaagcagtgcgcgaaactatggtttcgacatatgagtcttgtgatgtactggctgatttctacgaccagttcgctgaccagttgcacgagtctcaattggacaaaatgccagcacttccggctaaaggtaacttgaacctccgtgacatcttaaaatcggacttcgcgttcgcg

SEQ ID NO: 926 - protein, 890 aa, synthetic construct
  REGION 1..890: note = Variant of RNA polymerase
MHHHHHHMNTINIAKNDFSDIELAAIPFNTLADHYGERLAREQLALEHESYEMGEARFRKMFERQLKAGEVADNAAAKPLITTLLPKMIARINDWFEEVKAKRGKRPTAFQFLQEIKPEAVAYITIKTTLACLTSADNTTVQAVASAIGRAIEDEARFGRIRDLEAKHFKKNVEEQLNKRVGHVYKKAFMQVVEHDMLSKGLLGGEAWSSWHKEDSIHVGVRCIEMLIESTGMVSLHRQNAGVVGQDSETIELAPEYAEAIATRAGALAGISPMFQPCVVPPKPWTGITGGGYWAAGRKPLQLVRTRSLAALRRYEEVSMPEVIKAVNIAQNTAWRINKKVLDVANTITQWQHCPVADVPAMDRGEMPARPLDIDTNEIALKAWKKEASAFYRKDKARVSRRLSMEFMLSQANKFANYKAIWFPQNMDWRGRVYAVPMFNPQGNDMTKGLLTFAQEKPIGEDGFYWLKIHGANTAGVDKVPFPQRIKFVEDNHTNVMECAKAPLENTWWAEQDSPFCFLAFCFEYAGVINSGLSYNCSLPLAFDGSCSGLQHFSAMLRDEIGGKAVNLLPSAEYQDIYRIVSDKVNEMLKQDLINGTSTTVETVTDKKTGEITQRTKYGTKVMAQWWLEHGVNRGVTKRSVMTLVYGSKEFGFRDQVLSDTIQPAIDNGKGDMFLNPNQAAGYMAKLIWNAVSGTVVAAVEAMNWLKSAAKLLAAEVKDPKTDTVLRGRCAVHWVTPDGFPVWQEYKKPIQTRLNLMFLGQFRLQPTINTNKDSEIDAHKQESGIAPNFVHSQDGNHLRMTVVWAHEKYGIESFALIHDSFGTIPADAANLFKAVRETMVSTYESCDVLADFYDQFADQLHESQLDKMPALPAKGNLNLRDILKSDFAFA

SEQ ID NO: 927 - DNA, 2670 bp, synthetic construct
  misc_feature 1..2670: note = Variant of RNA polymerase
  source 1..2670: mol_type = other DNA
atgcaccatcaccatcaccatatgaacacgattaacattgctaagaacgacttctctgacatcgaactggctgctatcccgttcaacactctggctgaccattacggtgagcgtttagctcgcgaacagttggcccttgagcatgagtcttacgagatgggtgaagcacgcttccgcaagatgtttgagcgtcaacttaaagctggtgaggttgcggataacgctgccgccaagcctctcatcactaccctactccctaagatgattgcacgcatcaacgactggtttgaggaagtgaaagctaagcgcggcaagcgcccgacagccttccagttcctgcaagaaatcaagccggaagccgtagcgtacatcaccattaagaccactctggcttgcctaaccagtgcggacaatacaaccgttcaggctgtagcaagcgcaatcggtcgggccattgaggacgaggctcgcttcggtcgtatccgtgaccttgaagctaagcacttcaagaagaacgttgaggaacaactcaacaagcgcgtagggcacccgtacaagaaagcatttatgcaagttgtcgagcacgacatgctctctaagggtctactcggtggcgaggcgtggtcttcgtggcataaggaagactctattcatgtaggagtacgctgcatcgagatgctcattgagtcaaccggaatggttagcttacaccgccaaaatgctggcgtagtaggtcaagactctgagactatcgaactcgcacctgaatacgctgaggctatcgcaacccgtgcaggtgcgctggctggcatctctccgatgttccaaccttgcgtagttcctcctaagccgtggactggcattactggtggtggctattgggctgcggggcgcaaacccctgcagttagtacgtactcgcagtctggcggcgcttcgccgctatgaagaagtgtcgatgccggaggtcatcaaagcagtcaacattgcgcagaatacagcatggcgtattaacaagaaagttctcgacgtagcgaataccatcacccaatggcagcactgtccagtcgcggatgtgcctgcgatggatcgtggcgaaatgccagctcgtccgttggacatcgataccaacgagattgcacttaaagcgtggaagaaagaagcttccgcgttctaccgcaaagacaaagcacgcgttagccgtcgtctgtcaatggagtttatgttatctcaggcgaacaagtttgcgaattataaagcaatctggtttccgcaaaacatggattggcgtgggcgcgtgtacgctgtcccgatgttcaatcctcagggcaacgatatgacgaaaggcctgctgacctttgcgcaggagaaacccattggtgaagacggcttctattggctcaagattcatggcgcaaatacagctggagtggataaagtaccgtttccacaacgcatcaaatttgttgaggataaccatacgaatattatggaatgcgcgaaagcaccgctggaaaacacttggtgggcggaacaggactcgccgttctgttttctggcgttctgctttgagtatgctggcgtcatcaatagtggtctgtcgtacaactgtagcttgcctctggcatttgatggtagttgctccggcctgcaacatttctcagcgatgttacgcgacgaaattggcggcaaagctgtgaatctcctcccatctgcggaataccaggatatttatcgtatcgtcagcgacaaagttaacgagatgctgaaacaagatctgattaacggtacctctaccaccgtggaaacggtgactgataagaagacaggcgaaattacccaacgcacgaaatacgggaccaaagaaatggcacagtggtggttagaacacggtgtgaatcgtggcgtcacgaaacgctcggttatgactttggtgtatgggagcaaagagtttggattccgcgatcaagtgctgagtgacaccattcaaccggcgatcgataacggcaaaggtgacatgtttctgaatccgaatcaggctgctggttacatggcgaaactgatctggaacgcagtgtccgggaccgtagtcgcagcagttgaggcgatgaactggctgaaaagtgcggcgaaattacttgctgctgaagtgaaggatcctaagacggatacagttctgcgtggccgctgcgcagtacattgggtgactcccgacggcttccctgtgtggcaggaatacaagaagcctattcagacgcgcttgaacctgatgttcctcggtcagttccgcttacagcctaccattaacaccaacaaagatagcgagattgatgcacacaaacaggagtctggtatcgctcctaactttgtacacagccaagacggtaaccaccttcgtatgactgtagtgtgggcacacgagaagtacggaatcgaatcttttgcactgattcacgactccttcggtaccattccggctgacgctgcgaacctgttcaaagcagtgcgcgaaactatggttagcacatatgagtcttgtgatgtactggctgatttctacgaccagttcgctgaccagttgcacgagtctcaacgcgacaaaatgccagcacttccggctaaaggtaacttgaacctccgtgacatcttaaaatcggacttcgcgttcgcg

SEQ ID NO: 928 - protein, 890 aa, synthetic construct
  REGION 1..890: note = Variant of RNA polymerase
MHHHHHHMNTINIAKNDFSDIELAAIPFNTLADHYGERLAREQLALEHESYEMGEARFRKMFERQLKAGEVADNAAAKPLITTLLPKMIARINDWFEEVKAKRGKRPTAFQFLQEIKPEAVAYITIKTTLACLTSADNTTVQAVASAIGRAIEDEARFGRIRDLEAKHFKKNVEEQLNKRVGHPYKKAFMQVVEHDMLSKGLLGGEAWSSWHKEDSIHVGVRCIEMLIESTGMVSLHRQNAGVVGQDSETIELAPEYAEAIATRAGALAGISPMFQPCVVPPKPWTGITGGGYWAAGRKPLQLVRTRSLAALRRYEEVSMPEVIKAVNIAQNTAWRINKKVLDVANTITQWQHCPVADVPAMDRGEMPARPLDIDTNEIALKAWKKEASAFYRKDKARVSRRLSMEFMLSQANKFANYKAIWFPQNMDWRGRVYAVPMFNPQGNDMTKGLLTFAQEKPIGEDGFYWLKIHGANTAGVDKVPFPQRIKFVEDNHTNIMECAKAPLENTWWAEQDSPFCFLAFCFEYAGVINSGLSYNCSLPLAFDGSCSGLQHFSAMLRDEIGGKAVNLLPSAEYQDIYRIVSDKVNEMLKQDLINGTSTTVETVTDKKTGEITQRTKYGTKEMAQWWLEHGVNRGVTKRSVMTLVYGSKEFGFRDQVLSDTIQPAIDNGKGDMFLNPNQAAGYMAKLIWNAVSGTVVAAVEAMNWLKSAAKLLAAEVKDPKTDTVLRGRCAVHWVTPDGFPVWQEYKKPIQTRLNLMFLGQFRLQPTINTNKDSEIDAHKQESGIAPNFVHSQDGNHLRMTVVWAHEKYGIESFALIHDSFGTIPADAANLFKAVRETMVSTYESCDVLADFYDQFADQLHESQRDKMPALPAKGNLNLRDILKSDFAFA

SEQ ID NO: 929 - DNA, 2670 bp, synthetic construct
  misc_feature 1..2670: note = Variant of RNA polymerase
  source 1..2670: mol_type = other DNA
atgcaccatcaccatcaccatatgaacacgattaacattgctaagaacgacttctctgacatcgaactggctgctatcccgttcaacactctggctgaccattacggtgagcgtttagctcgcgaacagttggcccttgagcatgagtcttacgagatgggtgaagcacgcttccgcaagatgtttgagcgtcaacttaaagctggtgaggttgcggataacgctgccgccaagcctctcatcactaccctactccctaagatgattgcacgcatcaacgactggtttgaggaagtgaaagctaagcgcggcaagcgcccgacagccttccagttcctgcaagaaatcaagccggaagccgtagcgtacatcaccattaagaccactctggcttgcctaaccagtgcggacaatacaaccgttcaggctgtagcaagcgcaatcggtcgggccattgaggacgaggctcgcttcggtcgtatccgtgaccttgaagctaagcacttcaagaagaacgttgaggaacaactcaacaagcgcgtagggcacgtcgataagaaagcatttatgcaagttgtcgagcacgacatgctctctaagggtctactcggtggcgaggcgtggtcttcgtggcataaggaagactctattcatgtaggagtacgctgcatcgagatgctcattgagtcaaccggaatggttagcttacaccgccaaaatgctggcgtagtaggtcaagactctgagactatcgaactcgcacctgaatacgctgaggctatcgcaacccgtgcaggtgcgctggctggcatctctccgatgttccaaccttgcgtagttcctcctaagccgtggactggcattactggtggtggctattgggctgcggggcgcaaacccctgcagttagtacgtactcgcagtctggcggcgcttcgccgctatgaagaagtgtcgatgccggaggtcatcaaagcagtcaacattgcgcagaatacagcatggcgtattaacaagaaagttctcgacgtagcgaataccatcacccaatggcagcactgtccagtcgcggatgtgcctgcgatggatcgtggcgaaatgccagctcgtccgttggacatcgataccaacgagattgcacttaaagcgtggaagaaagaagcttccgcgttctaccgcaaagacaaagcacgcgttagccgtcgtctgtcaatggagtttatgttatctcaggcgaacaagtttgcgaattataaagcaatctggtttccgcaaaacatggattggcgtgggcgcgtgtacgctgtcccgatgttcaatcctcagggcaacgatatgacgaaaggcctgctgacctttgcgcaggagaaacccattggtgaagacggcttctattggctcaagattcatggcgcaaatacagctggagtggataaagtaccgtttccacaacgcatcaaatttgttgaggataaccatacgaatattatggaatgcgcgaaagcaccgctggaaaacacttggtgggcggaacaggactcgccgttctgttttctggcgttctgctttgagtatgctggcgtcatcaatagtggtctgtcgtacaactgtagcttgcctctggcatttgatggtagttgctccggcctgcaacatttctcagcgatgttacgcgacgaaattggcggcaaagctgtgaatctcctcccatctgcggaataccaggatatttatcgtatcgtcagcgacaaagttaacgagatgctgaaacaagatctgattaacggtacctctaccaccgtggaaacggtgactgataagaagacaggcgaaattacccaacgcacgaaatacgggaccaaagttatggcacagtggtggttagaacacggtgtgaatcgtggcgtcacgaaacgctcggttatgactttggtgtatgggagcaaagagtttggattccgcgatcaagtgctgagtgacaccattcaaccggcgatcgataacggcaaaggtgacatgtttctgaatccgaatcaggctgctggttacatggcgaaactgatctggaacgcagtgtccgggaccgtagtcgcagcagttgaggcgatgaactggctgaaaagtgcggcgaaattacttgctgctgaagtgaaggatcctaagacggatacagttctgcgtggccgctgcgcagtacattgggtgactcccgacggcttccctgtgtggcaggaatacaagaagcctattcagacgcgcttgaacctgatgttcctcggtcagttccgcttacagcctaccattaacaccaacaaagatagcgagattgatgcacacaaacaggagtctggtatcgctcctaactttgtacacagccaagacggtaaccaccttcgtatgactgtagtgtgggcacacgagaagtacggaatcgaatcttttgcactgattcacgactccttcggtaccattccggctgacgctgcgaacctgttcaaagcagtgcgcgaaactatggtttcgacatatgagtcttgtgatgtactggctgatttctacgaccagttcgctgaccagttgcacgagtctcaattggacaaaatgccagcacttccggctaaaggtaacttgaacctccgtgacatcttaaaatcggacttcgcgttcgcg

SEQ ID NO: 930 - protein, 890 aa, synthetic construct
  REGION 1..890: note = Variant of RNA polymerase
MHHHHHHMNTINIAKNDFSDIELAAIPFNTLADHYGERLAREQLALEHESYEMGEARFRKMFERQLKAGEVADNAAAKPLITTLLPKMIARINDWFEEVKAKRGKRPTAFQFLQEIKPEAVAYITIKTTLACLTSADNTTVQAVASAIGRAIEDEARFGRIRDLEAKHFKKNVEEQLNKRVGHVDKKAFMQVVEHDMLSKGLLGGEAWSSWHKEDSIHVGVRCIEMLIESTGMVSLHRQNAGVVGQDSETIELAPEYAEAIATRAGALAGISPMFQPCVVPPKPWTGITGGGYWAAGRKPLQLVRTRSLAALRRYEEVSMPEVIKAVNIAQNTAWRINKKVLDVANTITQWQHCPVADVPAMDRGEMPARPLDIDTNEIALKAWKKEASAFYRKDKARVSRRLSMEFMLSQANKFANYKAIWFPQNMDWRGRVYAVPMFNPQGNDMTKGLLTFAQEKPIGEDGFYWLKIHGANTAGVDKVPFPQRIKFVEDNHTNIMECAKAPLENTWWAEQDSPFCFLAFCFEYAGVINSGLSYNCSLPLAFDGSCSGLQHFSAMLRDEIGGKAVNLLPSAEYQDIYRIVSDKVNEMLKQDLINGTSTTVETVTDKKTGEITQRTKYGTKVMAQWWLEHGVNRGVTKRSVMTLVYGSKEFGFRDQVLSDTIQPAIDNGKGDMFLNPNQAAGYMAKLIWNAVSGTVVAAVEAMNWLKSAAKLLAAEVKDPKTDTVLRGRCAVHWVTPDGFPVWQEYKKPIQTRLNLMFLGQFRLQPTINTNKDSEIDAHKQESGIAPNFVHSQDGNHLRMTVVWAHEKYGIESFALIHDSFGTIPADAANLFKAVRETMVSTYESCDVLADFYDQFADQLHESQLDKMPALPAKGNLNLRDILKSDFAFA

SEQ ID NO: 931 - DNA, 2670 bp, synthetic construct
  misc_feature 1..2670: note = Variant of RNA polymerase
  source 1..2670: mol_type = other DNA
atgcaccatcaccatcaccatatgaacacgattaacattgctaagaacgacttctctgacatcgaactggctgctatcccgttcaacactctggctgaccattacggtgagcgtttagctcgcgaacagttggcccttgagcatgagtcttacgagatgggtgaagcacgcttccgcaagatgtttgagcgtcaacttaaagctggtgaggttgcggataacgctgccgccaagcctctcatcactaccctactccctaagatgattgcacgcatcaacgactggtttgaggaagtgaaagctaagcgcggcaagcgcccgacagccttccagttcctgcaagaaatcaagccggaagccgtagcgtacatcaccattaagaccactctggcttgcctaaccagtgcggacaatacaaccgttcaggctgtagcaagcgcaatcggtcgggccattgaggacgaggctcgcttcggtcgtatccgtgaccttgaagctaagcacttcaagggcaacgttgaggaacaactcaacaagcgcgtagggcacccgtacaagaaagcatttatgcaagttgtcgagcacgacatgctctctaagggtctactcggtggcgaggcgtggtcttcgtggcataaggaagactctattcatgtaggagtacgctgcatcgagatgctcattgagtcaaccggaatggttagcttacaccgccaaaatgctggcgtagtaggtcaagactctgagactatcgaactcgcacctgaatacgctgaggctatcgcaacccgtgcaggtgcgctggctggcatctctccgatgttccaaccttgcgtagttcctcctaagccgtggactggcattactggtggtggctattgggctgcggggcgcaaacccctgcagttagtacgtactcgcagtctggcggcgcttcgccgctatgaagaagtgtcgatgccggaggtcatcaaagcagtcaacattgcgcagaatacagcatggcgtattaacaagaaagttctcgacgtagcgaataccatcacccaatggcagcactgtccagtcgcggatgtgcctgcgatggatcgtggcgaaatgccagctcgtccgttggacatcgataccaacgagattgcacttaaagcgtggaagaaagaagcttccgcgttctaccgcaaagacaaagcacgcgttagccgtcgtctgtcaatggagtttatgttatctcaggcgaacaagtttgcgaatgagaacgcaatctggtttccgcaaaacatggattggcgtgggcgcgtgtacgctgtcccgatgttcaatcctcagggcaacgatatgacgaaaggcctgctgacctttgcgcaggagaaacccattggtgaagacggcttctattggctcaagattcatggcgcaaatacagctggagtggataaagtaccgtttccacaacgcatcaaatttgttgaggataaccatacgaatattatggaatgcgcgaaagcaccgctggaaaacacttggtgggcggaacaggactcgccgttctgttttctggcgttctgctttgagtatgctggcgtcatcaatagtggtctgtcgtacaactgtagcttgcctctggcatttgatggtagttgctccggcctgcaacatttctcagcgatgttacgcgacgaaattggcggcaaagctgtgaatctcctcccatctgcggaataccaggatatttatcgtatcgtcagcgacaaagttaacgagatgctgaaacaagatctgattaacggtacctctaccaccgtggaaacggtgactgataagaagacaggcgaaattacccaacgcacgaaatacgggaccaaagttatggcacagtggtggttagaacacggtgtgaatcgtggcgtcacgaaacgctcggttatgactttggtgtatgggagcaaagagtttggattccgcgatcaagtgctgagtgacaccattcaaccggcgatcgataacggcaaaggtgacatgtttctgaatccgaatcaggctgctggttacatggcgaaactgatctggaacgcagtgtccgggaccgtagtcgcagcagttgaggcgatgaactggctgaaaagtgcggcgaaattacttgctgctgaagtgaaggatccaaagacggacacagttctgcgtggccgctgcgcagtacattgggtgactcccgacggcttccctgtgtggcaggaatacaagaagcctattcagacgcgcttgaacctgatgttcctcggtcagttccgcttacagcctaccattaacaccaacaaagatagcgagattgatgcacacaaacaggagtctggtatcgctcctaactttgtacacagccaagacggtaaccaccttcgtatgactgtagtgtgggcacacgagaagtacggaatcgaatcttttgcactgattcacgactccttcggtaccattccggctgacgctgcgaacctgttcaaagcagtgcgcgaaactttcgttgacacatatgagtcttgtgatgtactggctgatttctacgaccagttcgctgaccagttgcacgagtctcaattggacaaaatgccagcacttccggctaaaggtaacttgaacctccgtgacatcttaaaatcggacttcgcgttcgcg

SEQ ID NO: 932 - protein, 890 aa, synthetic construct
  REGION 1..890: note = Variant of RNA polymerase
MHHHHHHMNTINIAKNDFSDIELAAIPFNTLADHYGERLAREQLALEHESYEMGEARFRKMFERQLKAGEVADNAAAKPLITTLLPKMIARINDWFEEVKAKRGKRPTAFQFLQEIKPEAVAYITIKTTLACLTSADNTTVQAVASAIGRAIEDEARFGRIRDLEAKHFKGNVEEQLNKRVGHPYKKAFMQVVEHDMLSKGLLGGEAWSSWHKEDSIHVGVRCIEMLIESTGMVSLHRQNAGVVGQDSETIELAPEYAEAIATRAGALAGISPMFQPCVVPPKPWTGITGGGYWAAGRKPLQLVRTRSLAALRRYEEVSMPEVIKAVNIAQNTAWRINKKVLDVANTITQWQHCPVADVPAMDRGEMPARPLDIDTNEIALKAWKKEASAFYRKDKARVSRRLSMEFMLSQANKFANENAIWFPQNMDWRGRVYAVPMFNPQGNDMTKGLLTFAQEKPIGEDGFYWLKIHGANTAGVDKVPFPQRIKFVEDNHTNIMECAKAPLENTWWAEQDSPFCFLAFCFEYAGVINSGLSYNCSLPLAFDGSCSGLQHFSAMLRDEIGGKAVNLLPSAEYQDIYRIVSDKVNEMLKQDLINGTSTTVETVTDKKTGEITQRTKYGTKVMAQWWLEHGVNRGVTKRSVMTLVYGSKEFGFRDQVLSDTIQPAIDNGKGDMFLNPNQAAGYMAKLIWNAVSGTVVAAVEAMNWLKSAAKLLAAEVKDPKTDTVLRGRCAVHWVTPDGFPVWQEYKKPIQTRLNLMFLGQFRLQPTINTNKDSEIDAHKQESGIAPNFVHSQDGNHLRMTVVWAHEKYGIESFALIHDSFGTIPADAANLFKAVRETFVDTYESCDVLADFYDQFADQLHESQLDKMPALPAKGNLNLRDILKSDFAFA

SEQ ID NO: 933 - DNA, 2670 bp, synthetic construct
  misc_feature 1..2670: note = Variant of RNA polymerase
  source 1..2670: mol_type = other DNA
atgcaccatcaccatcaccatatgaacacgattaacattgctaagaacgacttctctgacatcgaactggctgctatcccgttcaacactctggctgaccattacggtgagcgtttagctcgcgaacagttggcccttgagcatgagtcttacgagatgggtgaagcacgcttccgcaagatgtttgagcgtcaacttaaagctggtgaggttgcggataacgctgccgccaagcctctcatcactaccctactccctaagatgattgcacgcatcaacgactggtttgaggaagtgaaagctaagcgcggcaagcgcccgacagccttccagttcctgcaagaaatcaagccggaagccgtagcgtacatcaccattaagaccactctggcttgcctaaccagtgcggacaatacaaccgttcaggctgtagcaagcgcaatcggtcgggccattgaggacgaggctcgcttcggtcgtatccgtgaccttgaagctaagcacttcaagggcaacgttgaggaacaactcaacaagcgcgtagggcacccgtacaagaaagcatttatgcaagttgtcgagcacgacatgctctctaagggtctactcggtggcgaggcgtggtcttcgtggcataaggaagactctattcatgtaggagtacgctgcatcgagatgctcattgagtcaaccggaatggttagcttacaccgccaaaatgctggcgtagtaggtcaagactctgagactatcgaactcgcacctgaatacgctgaggctatcgcaacccgtgcaggtgcgctggctggcatctctccgatgttccaaccttgcgtagttcctcctaagccgtggactggcattactggtggtggctattgggctgcggggcgcaaacccctgcagttagtacgtactcgcagtctggcggcgcttcgccgctatgaagaagtgtcgatgccggaggtcatcaaagcagtcaacattgcgcagaatacagcatggcgtattaacaagaaagttctcgacgtagcgaataccatcacccaatggcagcactgtccagtcgcggatgtgcctgcgatggatcgtggcgaaatgccagctcgtccgttggacatcgataccaacgagattgcacttaaagcgtggaagaaagaagcttccgcgttctaccgcaaagacaaagcacgcgttagccgtcgtctgtcaatggagtttatgttatctcaggcgaacaagtttgcgaatgaggtggcaatctggtttccgcaaaacatggattggcgtgggcgcgtgtacgctgtcccgatgttcaatcctcagggcaacgatatgacgaaaggcctgctgacctttgcgcaggagaaacccattggtgaagacggcttctattggctcaagattcatggcgcaaatacagctggagtggataaagtaccgtttccacaacgcatcaaatttgttgaggataaccatacgaatattatggaatgcgcgaaagcaccgctggaaaacacttggtgggcggaacaggactcgccgttctgttttctggcgttctgctttgagtatgctggcgtcatcaatagtggtctgtcgtacaactgtagcttgcctctggcatttgatggtagttgctccggcctgcaacatttctcagcgatgttacgcgacgaaattggcggcaaagctgtgaatctcctcccatctgcggaataccaggatatttatcgtatcgtcagcgacaaagttaacgagatgctgaaacaagatctgattaacggtacctctaccaccgtggaaacggtgactgataagaagacaggcgaaattacccaacgcacgaaatacgggaccaaagaaatggcacagtggtggttagaacacggtgtgaatcgtggcgtcacgaaacgctcggttatgactttggtgtatgggagcaaagagtttggattccgcgatcaagtgctgagtgacaccattcaaccggcgatcgataacggcaaaggtgacatgtttctgaatccgaatcaggctgctggttacatggcgaaactgatctggaacgcagtgtccgggaccgtagtcgcagcagttgaggcgatgaactggctgaaaagtgcggcgaaattacttgctgctgaagtgaaggatcctaagacggatacagttctgcgtggccgctgcgcagtacattgggtgactcccgacggcttccctgtgtggcaggaatacaagaagcctattcagacgcgcttgaacctgatgttcctcggtcagttccgcttacagcctaccattaacaccaacaaagatagcgagattgatgcacacaaacaggagtctggtatcgctcctaactttgtacacagccaagacggtaaccaccttcgtatgactgtagtgtgggcacacgagaagtacggaatcgaatcttttgcactgattcacgactccttcggtaccattccggctgacgctgcgaacctgttcaaagcagtgcgcgaaactttcgttagcacatatgagtcttgtgatgtactggctgatttctacgaccagttcgctgaccagttgcacgagtctcaactggacaaaatgccagcacttccggctaaaggtaacttgaacctccgtgacatcttaaaatcggacttcgcgttcgcg

SEQ ID NO: 934 - protein, 890 aa, synthetic construct
  REGION 1..890: note = Variant of RNA polymerase
MHHHHHHMNTINIAKNDFSDIELAAIPFNTLADHYGERLAREQLALEHESYEMGEARFRKMFERQLKAGEVADNAAAKPLITTLLPKMIARINDWFEEVKAKRGKRPTAFQFLQEIKPEAVAYITIKTTLACLTSADNTTVQAVASAIGRAIEDEARFGRIRDLEAKHFKGNVEEQLNKRVGHPYKKAFMQVVEHDMLSKGLLGGEAWSSWHKEDSIHVGVRCIEMLIESTGMVSLHRQNAGVVGQDSETIELAPEYAEAIATRAGALAGISPMFQPCVVPPKPWTGITGGGYWAAGRKPLQLVRTRSLAALRRYEEVSMPEVIKAVNIAQNTAWRINKKVLDVANTITQWQHCPVADVPAMDRGEMPARPLDIDTNEIALKAWKKEASAFYRKDKARVSRRLSMEFMLSQANKFANEVAIWFPQNMDWRGRVYAVPMFNPQGNDMTKGLLTFAQEKPIGEDGFYWLKIHGANTAGVDKVPFPQRIKFVEDNHTNIMECAKAPLENTWWAEQDSPFCFLAFCFEYAGVINSGLSYNCSLPLAFDGSCSGLQHFSAMLRDEIGGKAVNLLPSAEYQDIYRIVSDKVNEMLKQDLINGTSTTVETVTDKKTGEITQRTKYGTKEMAQWWLEHGVNRGVTKRSVMTLVYGSKEFGFRDQVLSDTIQPAIDNGKGDMFLNPNQAAGYMAKLIWNAVSGTVVAAVEAMNWLKSAAKLLAAEVKDPKTDTVLRGRCAVHWVTPDGFPVWQEYKKPIQTRLNLMFLGQFRLQPTINTNKDSEIDAHKQESGIAPNFVHSQDGNHLRMTVVWAHEKYGIESFALIHDSFGTIPADAANLFKAVRETFVSTYESCDVLADFYDQFADQLHESQLDKMPALPAKGNLNLRDILKSDFAFA

SEQ ID NO: 935 - DNA, 2670 bp, synthetic construct
  misc_feature 1..2670: note = Variant of RNA polymerase
  source 1..2670: mol_type = other DNA
atgcaccatcaccatcaccatatgaacacgattaacattgctaagaacgacttctctgacatcgaactggctgctatcccgttcaacactctggctgaccattacggtgagcgtttagctcgcgaacagttggcccttgagcatgagtcttacgagatgggtgaagcacgcttccgcgagatgtttgagcgtcaacttaaagctggtgaggttgcggataacgctgccgccaagcctctcatcactaccctactccctaagatgattgcacgcatcaacgactggtttgaggaagtgaaagctaagcgcggcaagcgcccgacagccttccagttcctgcaagaaatcaagccggaagccgtagcgtacatcaccattaagaccactctggcttgcctaaccagtgcggacaatacaaccgttcaggctgtagcaagcgcaatcggtcgggccattgaggacgaggctcgcttcggtcgtatccgtgaccttgaagctaagcacttcaagaagaacgttgaggaacaactcaacaagcgcgtagggcacgtctacaagaaagcatttatgcaagttgtcgagcacgacatgctctctaagggtctactcggtggcgaggcgtggtcttcgtggcataaggaagactctattcatgtaggagtacgctgcatcgagatgctcattgagtcaaccggaatggttagcttacaccgccaaaatgctggcgtagtaggtcaagactctgagactatcgaactcgcacctgaatacgctgaggctatcgcaacccgtgcaggtgcgctggctggcatctctccgatgttccaaccttgcgtagttcctcctaagccgtggactggcattactggtggtggctattgggctgcggggcgcaaacccctgcagttagtacgtactcgcagtctggcggcgcttcgccgctatgaagaagtgtcgatgccggaggtcatcaaagcagtcaacattgcgcagaatacagcatggcgtattaacaagaaagttctcgacgtagcgaataccatcacccaatggcagcactgtccagtcgcggatgtgcctgcgatggatcgtggcgaaatgccagctcgtccgttggacatcgataccaacgagattgcacttaaagcgtggaagaaagaagcttccgcgttctaccgcaaagacaaagcacgcgttagccgtcgtctgtcaatggagtttatgttatctcaggcgaacaagtttgcgaattataaagcaatctggtttccgcaaaacatggattggcgtgggcgcgtgtacgctgtcccgatgttcaatcctcagggcaacgatatgacgaaaggcctgctgacctttgcgcaggagaaacccattggtgaagacggcttctattggctcaagattcatggcgcaaatacagctggagtggataaagtaccgtttccacaacgcatcaaatttgttgaggataaccatacgaatattatggaatgcgcgaaagcaccgctggaaaacacttggtgggcggaacaggactcgccgttctgttttctggcgttctgctttgagtatgctggcgtcatcaatagtggtctgtcgtacaactgtagcttgcctctggcatttgatggtagttgctccggcctgcaacatttctcagcgatgttacgcgacgaaattggcggcaaagctgtgaatctcctcccatctgcggaataccaggatatttatcgtatcgtcagcgacaaagttaacgagatgctgaaacaagatctgattaacggtacctctaccaccgtggaaacggtgactgataagaagacaggcgaaattacccaacgcacgaaatacgggaccaaagttatggcacagtggtggttagaacacggtgtgaatcgtggcgtcacgaaacgctcggttatgactttggtgtatgggagcaaagagtttggattccgcgatcaagtgctgagtgacaccattcaaccggcgatcgataacggcaaaggtgacatgtttctgaatccgaatcaggctgctggttacatggcgaaactgatctggaacgcagtgtccgggaccgtagtcgcagcagttgaggcgatgaactggctgaaaagtgcggcgaaattacttgctgctgaagtgaaggatcctaagacggatacagttctgcgtggccgctgcgcagtacattgggtgactcccgacggcttccctgtgtggcaggaatacaagaagcctattcagacgcgcttgaacctgatgttcctcggtcagttccgcttacagcctaccattaacaccaacaaagatagcgagattgatgcacacaaacaggagtctggtatcgctcctaactttgtacacagccaagacggtaaccaccttcgtatgactgtagtgtgggcacacgagaagtacggaatcgaatcttttgcactgattcacgactccttcggtaccattccggctgacgctgcgaacctgttcaaagcagtgcgcgaaactatggtttcgacatatgagtcttgtgatgtactggctgatttctacgaccagttcgctgaccagttgcacgagtctcaattggacaaaatgccagcacttccggctaaaggtaacttgaacctccgtgacatcttaaaatcggacttcgcgttcgcg

SEQ ID NO: 936 - protein, 890 aa, synthetic construct
  REGION 1..890: note = Variant of RNA polymerase
MHHHHHHMNTINIAKNDFSDIELAAIPFNTLADHYGERLAREQLALEHESYEMGEARFREMFERQLKAGEVADNAAAKPLITTLLPKMIARINDWFEEVKAKRGKRPTAFQFLQEIKPEAVAYITIKTTLACLTSADNTTVQAVASAIGRAIEDEARFGRIRDLEAKHFKKNVEEQLNKRVGHVYKKAFMQVVEHDMLSKGLLGGEAWSSWHKEDSIHVGVRCIEMLIESTGMVSLHRQNAGVVGQDSETIELAPEYAEAIATRAGALAGISPMFQPCVVPPKPWTGITGGGYWAAGRKPLQLVRTRSLAALRRYEEVSMPEVIKAVNIAQNTAWRINKKVLDVANTITQWQHCPVADVPAMDRGEMPARPLDIDTNEIALKAWKKEASAFYRKDKARVSRRLSMEFMLSQANKFANYKAIWFPQNMDWRGRVYAVPMFNPQGNDMTKGLLTFAQEKPIGEDGFYWLKIHGANTAGVDKVPFPQRIKFVEDNHTNIMECAKAPLENTWWAEQDSPFCFLAFCFEYAGVINSGLSYNCSLPLAFDGSCSGLQHFSAMLRDEIGGKAVNLLPSAEYQDIYRIVSDKVNEMLKQDLINGTSTTVETVTDKKTGEITQRTKYGTKVMAQWWLEHGVNRGVTKRSVMTLVYGSKEFGFRDQVLSDTIQPAIDNGKGDMFLNPNQAAGYMAKLIWNAVSGTVVAAVEAMNWLKSAAKLLAAEVKDPKTDTVLRGRCAVHWVTPDGFPVWQEYKKPIQTRLNLMFLGQFRLQPTINTNKDSEIDAHKQESGIAPNFVHSQDGNHLRMTVVWAHEKYGIESFALIHDSFGTIPADAANLFKAVRETMVSTYESCDVLADFYDQFADQLHESQLDKMPALPAKGNLNLRDILKSDFAFA

SEQ ID NO: 937 - DNA, 2670 bp, synthetic construct
  misc_feature 1..2670: note = Variant of RNA polymerase
  source 1..2670: mol_type = other DNA
atgcaccatcaccatcaccatatgaacacgattaacattgctaagaacgacttctctgacatcgaactggctgctatcccgttcaacactctggctgaccattacggtgagcgtttagctcgcgaacagttggcccttgagcatgagtcttacgagatgggtgaagcacgcttccgcaagatgtttgagcgtcaacttaaagctggtgaggttgcggataacgctgccgccaagcctctcatcactaccctactccctaagatgattgcacgcatcaacgactggtttgaggaagtgaaagctaagcgcggcaagcgcccgacagccttccagttcctgcaagaaatcaagccggaagccgtagcgtacatcaccattaagaccactctggcttgcctaaccagtgcggacaatacaaccgttcaggctgtagcaagcgcaatcggtcgggccattgaggacgaggctcgcttcggtcgtatccgtgaccttgaagctaagcacttcaagaaaaacgttgaggaacaactcaacaagcgcgtagggcacgtgtacaagaaagcatttatgcaagttgtcgagcacgacatgctctctaagggtctactcggtggcgaggcgtggtcttcgtggcataaggaagactctattcatgtaggagtacgctgcatcgagatgctcattgagtcaaccggaatggttagcttacaccgccaaaatgctggcgtagtaggtcaagactctgagactatcgaactcgcacctgaatacgctgaggctatcgcaacccgtgcaggtgcgctggctggcatctctccgatgttccaaccttgcgtagttcctcctaagccgtggactggcattactggtggtggctattgggctgcggggcgcaaacccctgcagttagtacgtactcgcagtctggcggcgcttcgccgctatgaagaagtgtcgatgccggaggtcatcaaagcagtcaacattgcgcagaatacagcatggcgtattaacaagaaagttctcgacgtagcgaataccatcacccaatggcagcactgtccagtcgcggatgtgcctgcgatggatcgtggcgaaatgccagctcgtccgttggacatcgataccaacgagattgcacttaaagcgtggaagaaagaagcttccgcgttctaccgcaaagacaaagcacgcgttagccgtcgtctgtcaatggagtttatgttatctcaggcgaacaagtttgcgaattatgtggcaatctggtttccgcaaaacatggattggcgtgggcgcgtgtacgctgtcccgatgttcaatcctcagggcaacgatatgacgaaaggcctgctgacctttgcgcaggagaaacccattggtgaagacggcttctattggctcaagattcatggcgcaaatacagctggagtggataaagtaccgtttccacaacgcatcaaatttgttgaggataaccatacgaatattatggaatgcgcgaaagcaccgctggaaaacacttggtgggcggaacaggactcgccgttctgttttctggcgttctgctttgagtatgctggcgtcatcaatagtggtctgtcgtacaactgtagcttgcctctggcatttgatggtagttgctccggcctgcaacatttctcagcgatgttacgcgacgaaattggcggcaaagctgtgaatctcctcccatctgcggaataccaggatatttatcgtatcgtcagcgacaaagttaacgagatgctgaaacaagatctgattaacggtacctctaccaccgtggaaacggtgactgataagaagacaggcgaaattacccaacgcacgaaatacgggaccaaagaaatggcacagtggtggttagaacacggtgtgaatcgtggcgtcacgaaacgctcggttatgactttggtgtatgggagcaaagagtttggattccgcgatcaagtgctgagtgacaccattcaaccggcgatcgataacggcaaaggtgacatgtttctgaatccgaatcaggctgctggttacatggcgaaactgatctggaacgcagtgtccgggaccgtagtcgcagcagttgaggcgatgaactggctgaaaagtgcggcgaaattacttgctgctgaagtgaaggatcctaagacggatacagttctgcgtggccgctgcgcagtacattgggtgactcccgacggcttccctgtgtggcaggaatacaagaagcctattcagacgcgcttgaacctgatgttcctcggtcagttccgcttacagcctaccattaacaccaacaaagatagcgagattgatgcacacaaacaggagtctggtatcgctcctaactttgtacacagccaagacggtaaccaccttcgtatgactgtagtgtgggcacacgagaagtacggaatcgaatcttttgcactgattcacgactccttcggtaccattccggctgacgctgcgaacctgttcaaagcagtgcgcgaaactttcgttagcacatatgagtcttgtgatgtactggctgatttctacgaccagttcgctgaccagttgcacgagtctcaactggacaaaatgccagcacttccggctaaaggtaacttgaacctccgtgacatcttaaaatcggacttcgcgttcgcg

SEQ ID NO: 938 - protein, 890 aa, synthetic construct
  REGION 1..890: note = Variant of RNA polymerase
MHHHHHHMNTINIAKNDFSDIELAAIPFNTLADHYGERLAREQLALEHESYEMGEARFRKMFERQLKAGEVADNAAAKPLITTLLPKMIARINDWFEEVKAKRGKRPTAFQFLQEIKPEAVAYITIKTTLACLTSADNTTVQAVASAIGRAIEDEARFGRIRDLEAKHFKKNVEEQLNKRVGHVYKKAFMQVVEHDMLSKGLLGGEAWSSWHKEDSIHVGVRCIEMLIESTGMVSLHRQNAGVVGQDSETIELAPEYAEAIATRAGALAGISPMFQPCVVPPKPWTGITGGGYWAAGRKPLQLVRTRSLAALRRYEEVSMPEVIKAVNIAQNTAWRINKKVLDVANTITQWQHCPVADVPAMDRGEMPARPLDIDTNEIALKAWKKEASAFYRKDKARVSRRLSMEFMLSQANKFANYVAIWFPQNMDWRGRVYAVPMFNPQGNDMTKGLLTFAQEKPIGEDGFYWLKIHGANTAGVDKVPFPQRIKFVEDNHTNIMECAKAPLENTWWAEQDSPFCFLAFCFEYAGVINSGLSYNCSLPLAFDGSCSGLQHFSAMLRDEIGGKAVNLLPSAEYQDIYRIVSDKVNEMLKQDLINGTSTTVETVTDKKTGEITQRTKYGTKEMAQWWLEHGVNRGVTKRSVMTLVYGSKEFGFRDQVLSDTIQPAIDNGKGDMFLNPNQAAGYMAKLIWNAVSGTVVAAVEAMNWLKSAAKLLAAEVKDPKTDTVLRGRCAVHWVTPDGFPVWQEYKKPIQTRLNLMFLGQFRLQPTINTNKDSEIDAHKQESGIAPNFVHSQDGNHLRMTVVWAHEKYGIESFALIHDSFGTIPADAANLFKAVRETFVSTYESCDVLADFYDQFADQLHESQLDKMPALPAKGNLNLRDILKSDFAFA

SEQ ID NO: 939 - DNA, 2670 bp, synthetic construct
  misc_feature 1..2670: note = Variant of RNA polymerase
  source 1..2670: mol_type = other DNA
atgcaccatcaccatcaccatatgaacacgattaacattgctaagaacgacttctctgacatcgaactggctgctatcccgttcaacactctggctgaccattacggtgagcgtttagctcgcgaacagttggcccttgagcatgagtcttacgagatgggtgaagcacgcttccgcaagatgtttgagcgtcaacttaaagctggtgaggttgcggataacgctgccgccaagcctctcatcactaccctactccctaagatgattgcacgcatcaacgactggtttgaggaagtgaaagctaagcgcggcaagcgcccgacagccttccagttcctgcaagaaatcaagccggaagccgtagcgtacatcaccattaagaccactctggcttgcctaaccagtgcggacaatacaaccgttcaggctgtagcaagcgcaatcggtcgggccattgaggacgaggctcgcttcggtcgtatccgtgaccttgaagctaagcacttcaagggcaacgttgaggaacaactcaacaagcgcgtagggcacccgtacaagaaagcatttatgcaagttgtcgagcacgacatgctctctaagggtctactcggtggcgaggcgtggtcttcgtggcataaggaagactctattcatgtaggagtacgctgcatcgagatgctcattgagtcaaccggaatggttagcttacaccgccaaaatgctggcgtagtaggtcaagactctgagactatcgaactcgcacctgaatacgctgaggctatcgcaacccgtgcaggtgcgctggctggcatctctccgatgttccaaccttgcgtagttcctcctaagccgtggactggcattactggtggtggctattgggctgcggggcgcaaacccctgcagttagtacgtactcgcagtctggcggcgcttcgccgctatgaagaagtgtcgatgccggaggtcatcaaagcagtcaacattgcgcagaatacagcatggcgtattaacaagaaagttctcgacgtagcgaataccatcacccaatggcagcactgtccagtcgcggatgtgcctgcgatggatcgtggcgaaatgccagctcgtccgttggacatcgataccaacgagattgcacttaaagcgtggaagaaagaagcttccgcgttctaccgcaaagacaaagcacgcgttagccgtcgtctgtcaatggagtttatgttatctcaggcgaacaagtttgcgaattatgtggcaatctggtttccgcaaaacatggattggcgtgggcgcgtgtacgctgtcccgatgttcaatcctcagggcaacgatatgacgaaaggcctgctgacctttgcgcaggagaaacccattggtgaagacggcttctattggctcaagattcatggcgcaaatacagctggagtggataaagtaccgtttccacaacgcatcaaatttgttgaggataaccatacgaatattatggaatgcgcgaaagcaccgctggaaaacacttggtgggcggaacaggactcgccgttctgttttctggcgttctgctttgagtatgctggcgtcatcaatagtggtctgtcgtacaactgtagcttgcctctggcatttgatggtagttgctccggcctgcaacatttctcagcgatgttacgcgacgaaattggcggcaaagctgtgaatctcctcccatctgcggaataccaggatatttatcgtatcgtcagcgacaaagttaacgagatgctgaaacaagatctgattaacggtacctctaccaccgtggaaacggtgactgataagaagacaggcgaaattacccaacgcacgaaatacgggaccaaagaaatggcacagtggtggttagaacacggtgtgaatcgtggcgtcacgaaacgctcggttatgactttggtgtatgggagcaaagagtttggattccgcgatcaagtgctgagtgacaccattcaaccggcgatcgataacggcaaaggtgacatgtttctgaatccgaatcaggctgctggttacatggcgaaactgatctggaacgcagtgtccgggaccgtagtcgcagcagttgaggcgatgaactggctgaaaagtgcggcgaaattacttgctgctgaagtgaaggatccaaagacggacacagttctgcgtggccgctgcgcagtacattgggtgactcccgacggcttccctgtgtggcaggaatacaagaagcctattcagacgcgcttgaacctgatgttcctcggtcagttccgcttacagcctaccattaacaccaacaaagatagcgagattgatgcacacaaacaggagtctggtatcgctcctaactttgtacacagccaagacggtaaccaccttcgtatgactgtagtgtgggcacacgagaagtacggaatcgaatcttttgcactgattcacgactccttcggtaccattccggctgacgctgcgaacctgttcaaagcagtgcgcgaaactttcgttgacacatatgagtcttgtgatgtactggctgatttctacgaccagttcgctgaccagttgcacgagtctcaattggacaaaatgccagcacttccggctaaaggtaacttgaacctccgtgacatcttaaaatcggacttcgcgttcgcg

SEQ ID NO: 940 - protein, 890 aa, synthetic construct
  REGION 1..890: note = Variant of RNA polymerase
MHHHHHHMNTINIAKNDFSDIELAAIPFNTLADHYGERLAREQLALEHESYEMGEARFRKMFERQLKAGEVADNAAAKPLITTLLPKMIARINDWFEEVKAKRGKRPTAFQFLQEIKPEAVAYITIKTTLACLTSADNTTVQAVASAIGRAIEDEARFGRIRDLEAKHFKGNVEEQLNKRVGHPYKKAFMQVVEHDMLSKGLLGGEAWSSWHKEDSIHVGVRCIEMLIESTGMVSLHRQNAGVVGQDSETIELAPEYAEAIATRAGALAGISPMFQPCVVPPKPWTGITGGGYWAAGRKPLQLVRTRSLAALRRYEEVSMPEVIKAVNIAQNTAWRINKKVLDVANTITQWQHCPVADVPAMDRGEMPARPLDIDTNEIALKAWKKEASAFYRKDKARVSRRLSMEFMLSQANKFANYVAIWFPQNMDWRGRVYAVPMFNPQGNDMTKGLLTFAQEKPIGEDGFYWLKIHGANTAGVDKVPFPQRIKFVEDNHTNIMECAKAPLENTWWAEQDSPFCFLAFCFEYAGVINSGLSYNCSLPLAFDGSCSGLQHFSAMLRDEIGGKAVNLLPSAEYQDIYRIVSDKVNEMLKQDLINGTSTTVETVTDKKTGEITQRTKYGTKEMAQWWLEHGVNRGVTKRSVMTLVYGSKEFGFRDQVLSDTIQPAIDNGKGDMFLNPNQAAGYMAKLIWNAVSGTVVAAVEAMNWLKSAAKLLAAEVKDPKTDTVLRGRCAVHWVTPDGFPVWQEYKKPIQTRLNLMFLGQFRLQPTINTNKDSEIDAHKQESGIAPNFVHSQDGNHLRMTVVWAHEKYGIESFALIHDSFGTIPADAANLFKAVRETFVDTYESCDVLADFYDQFADQLHESQLDKMPALPAKGNLNLRDILKSDFAFA

SEQ ID NO: 941 - DNA, 2670 bp, synthetic construct
  misc_feature 1..2670: note = Variant of RNA polymerase
  source 1..2670: mol_type = other DNA
atgcaccatcaccatcaccatatgaacacgattaacattgctaagaacgacttctctgacatcgaactggctgctatcccgttcaacactctggctgaccattacggtgagcgtttagctcgcgaacagttggcccttgagcatgagtcttacgagatgggtgaagcacgcttccgcaagatgtttgagcgtcaacttaaagctggtgaggttgcggataacgctgccgccaagcctctcatcactaccctactccctaagatgattgcacgcatcaacgactggtttgaggaagtgaaagctaagcgcggcaagcgcccgacagccttccagttcctgcaagaaatcaagccggaagccgtagcgtacatcaccattaagaccactctggcttgcctaaccagtgcggacaatacaaccgttcaggctgtagcaagcgcaatcggtcgggccattgaggacgaggctcgcttcggtcgtatccgtgaccttgaagctaagcacttcaagaagaacgttgaggaacaactcaacaagcgcgtagggcacccgtacaagaaagcatttatgcaagttgtcgagcacgacatgctctctaagggtctactcggtggcgaggcgtggtcttcgtggcataaggaagactctattcatgtaggagtacgctgcatcgagatgctcattgagtcaaccggaatggttagcttacaccgccaaaatgctggcgtagtaggtcaagactctgagactatcgaactcgcacctgaatacgctgaggctatcgcaacccgtgcaggtgcgctggctggcatctctccgatgttccaaccttgcgtagttcctcctaagccgtggactggcattactggtggtggctattgggctgcggggcgcaaacccctgcagttagtacgtactcgcagtctggcggcgcttcgccgctatgaagaagtgtcgatgccggaggtcatcaaagcagtcaacattgcgcagaatacagcatggcgtattaacaagaaagttctcgacgtagcgaataccatcacccaatggcagcactgtccagtcgcggatgtgcctgcgatggatcgtggcgaaatgccagctcgtccgttggacatcgataccaacgagattgcacttaaagcgtggaagaaagaagcttccgcgttctaccgcaaagacaaagcacgcgttagccgtcgtctgtcaatggagtttatgttatctcaggcgaacaagtttgcgaattataacgcaatctggtttccgcaaaacatggattggcgtgggcgcgtgtacgctgtcccgatgttcaatcctcagggcaacgatatgacgaaaggcctgctgacctttgcgcaggagaaacccattggtgaagacggcttctattggctcaagattcatggcgcaaatacagctggagtggataaagtaccgtttccacaacgcatcaaatttgttgaggataaccatacgaatattatggaatgcgcgaaagcaccgctggaaaacacttggtgggcggaacaggactcgccgttctgttttctggcgttctgctttgagtatgctggcgtcatcaatagtggtctgtcgtacaactgtagcttgcctctggcatttgatggtagttgctccggcctgcaacatttctcagcgatgttacgcgacgaaattggcggcaaagctgtgaatctcctcccatctgcggaataccaggatatttatcgtatcgtcagcgacaaagttaacgagatgctgaaacaagatctgattaacggtacctctaccaccgtggaaacggtgactgataagaagacaggcgaaattacccaacgcacgaaatacgggaccaaagaaatggcacagtggtggttagaacacggtgtgaatcgtggcgtcacgaaacgctcggttatgactttggtgtatgggagcaaagagtttggattccgcgatcaagtgctgagtgacaccattcaaccggcgatcgataacggcaaaggtgacatgtttctgaatccgaatcaggctgctggttacatggcgaaactgatctggaacgcagtgtccgggaccgtagtcgcagcagttgaggcgatgaactggctgaaaagtgcggcgaaattacttgctgctgaagtgaaggatcctaagacggatacagttctgcgtggccgctgcgcagtacattgggtgactcccgacggcttccctgtgtggcaggaatacaagaagcctattcagacgcgcttgaacctgatgttcctcggtcagttccgcttacagcctaccattaacaccaacaaagatagcgagattgatgcacacaaacaggagtctggtatcgctcctaactttgtacacagccaagacggtaaccaccttcgtatgactgtagtgtgggcacacgagaagtacggaatcgaatcttttgcactgattcacgactccttcggtaccattccggctgacgctgcgaacctgttcaaagcagtgcgcgaaactatggttagcacatatgagtcttgtgatgtactggctgatttctacgaccagttcgctgaccagttgcacgagtctcaactggacaaaatgccagcacttccggctaaaggtaacttgaacctccgtgacatcttaaaatcggacttcgcgttcgcg

SEQ ID NO: 942 - protein, 890 aa, synthetic construct
  REGION 1..890: note = Variant of RNA polymerase
MHHHHHHMNTINIAKNDFSDIELAAIPFNTLADHYGERLAREQLALEHESYEMGEARFRKMFERQLKAGEVADNAAAKPLITTLLPKMIARINDWFEEVKAKRGKRPTAFQFLQEIKPEAVAYITIKTTLACLTSADNTTVQAVASAIGRAIEDEARFGRIRDLEAKHFKKNVEEQLNKRVGHPYKKAFMQVVEHDMLSKGLLGGEAWSSWHKEDSIHVGVRCIEMLIESTGMVSLHRQNAGVVGQDSETIELAPEYAEAIATRAGALAGISPMFQPCVVPPKPWTGITGGGYWAAGRKPLQLVRTRSLAALRRYEEVSMPEVIKAVNIAQNTAWRINKKVLDVANTITQWQHCPVADVPAMDRGEMPARPLDIDTNEIALKAWKKEASAFYRKDKARVSRRLSMEFMLSQANKFANYNAIWFPQNMDWRGRVYAVPMFNPQGNDMTKGLLTFAQEKPIGEDGFYWLKIHGANTAGVDKVPFPQRIKFVEDNHTNIMECAKAPLENTWWAEQDSPFCFLAFCFEYAGVINSGLSYNCSLPLAFDGSCSGLQHFSAMLRDEIGGKAVNLLPSAEYQDIYRIVSDKVNEMLKQDLINGTSTTVETVTDKKTGEITQRTKYGTKEMAQWWLEHGVNRGVTKRSVMTLVYGSKEFGFRDQVLSDTIQPAIDNGKGDMFLNPNQAAGYMAKLIWNAVSGTVVAAVEAMNWLKSAAKLLAAEVKDPKTDTVLRGRCAVHWVTPDGFPVWQEYKKPIQTRLNLMFLGQFRLQPTINTNKDSEIDAHKQESGIAPNFVHSQDGNHLRMTVVWAHEKYGIESFALIHDSFGTIPADAANLFKAVRETMVSTYESCDVLADFYDQFADQLHESQLDKMPALPAKGNLNLRDILKSDFAFA

SEQ ID NO: 943 - DNA, 2670 bp, synthetic construct
  misc_feature 1..2670: note = Variant of RNA polymerase
  source 1..2670: mol_type = other DNA
atgcaccatcaccatcaccatatgaacacgattaacattgctaagaacgacttctctgacatcgaactggctgctatcccgttcaacactctggctgaccattacggtgagcgtttagctcgcgaacagttggcccttgagcatgagtcttacgagatgggtgaagcacgcttccgcaagatgtttgagcgtcaacttaaagctggtgaggttgcggataacgctgccgccaagcctctcatcactaccctactccctaagatgattgcacgcatcaacgactggtttgaggaagtgaaagctaagcgcggcaagcgcccgacagccttccagttcctgcaagaaatcaagccggaagccgtagcgtacatcaccattaagaccactctggcttgcctaaccagtgcggacaatacaaccgttcaggctgtagcaagcgcaatcggtcgggccattgaggacgaggctcgcttcggtcgtatccgtgaccttgaagctaagcacttcaagaagaacgttgaggaacaactcaacaagcgcgtagggcacgtctacaagaaagcatttatgcaagttgtcgagcacgacatgctctctaagggtctactcggtggcgaggcgtggtcttcgtggcataaggaagactctattcatgtaggagtacgctgcatcgagatgctcattgagtcaaccggaatggttagcttacaccgccaaaatgctggcgtagtaggtcaagactctgagactatcgaactcgcacctgaatacgctgaggctatcgcaacccgtgcaggtgcgctggctggcatctctccgatgttccaaccttgcgtagttcctcctaagccgtggactggcattactggtggtggctattgggctgcggggcgcaaacccctgcagttagtacgtactcgcagtctggcggcgcttcgccgctatgaagaagtgtcgatgccggaggtcatcaaagcagtcaacattgcgcagaatacagcatggcgtattaacaagaaagttctcgacgtagcgaataccatcacccaatggcagcactgtccagtcgcggatgtgcctgcgatggatcgtggcgaaatgccagctcgtccgttggacatcgataccaacgagattgcacttaaagcgtggaagaaagaagcttccgcgttctaccgcaaagacaaagcacgcgttagccgtcgtctgtcaatggagtttatgttatctcaggcgaacaagtttgcgaatgagaaggcaatctggtttccgcaaaacatggattggcgtgggcgcgtgtacgctgtcccgatgttcaatcctcagggcaacgatatgacgaaaggcctgctgacctttgcgcaggagaaacccattggtgaagacggcttctattggctcaagattcatggcgcaaatacagctggagtggataaagtaccgtttccacaacgcatcaaatttgttgaggataaccatacgaatattatggaatgcgcgaaagcaccgctggaaaacacttggtgggcggaacaggactcgccgttctgttttctggcgttctgctttgagtatgctggcgtcatcaatagtggtctgtcgtacaactgtagcttgcctctggcatttgatggtagttgctccggcctgcaacatttctcagcgatgttacgcgacgaaattggcggcaaagctgtgaatctcctcccatctgcggaataccaggatatttatcgtatcgtcagcgacaaagttaacgagatgctgaaacaagatctgattaacggtacctctaccaccgtggaaacggtgactgataagaagacaggcgaaattacccaacgcacgaaatacgggaccaaagttatggcacagtggtggttagaacacggtgtgaatcgtggcgtcacgaaacgctcggttatgactttggtgtatgggagcaaagagtttggattccgcgatcaagtgctgagtgacaccattcaaccggcgatcgataacggcaaaggtgacatgtttctgaatccgaatcaggctgctggttacatggcgaaactgatctggaacgcagtgtccgggaccgtagtcgcagcagttgaggcgatgaactggctgaaaagtgcggcgaaattacttgctgctgaagtgaaggatcctaagacgggcacagttctgcgtggccgctgcgcagtacattgggtgactcccgacggcttccctgtgtggcaggaatacaagaagcctattcagacgcgcttgaacctgatgttcctcggtcagttccgcttacagcctaccattaacaccaacaaagatagcgagattgatgcacacaaacaggagtctggtatcgctcctaactttgtacacagccaagacggtaaccaccttcgtatgactgtagtgtgggcacacgagaagtacggaatcgaatcttttgcactgattcacgactccttcggtaccattccggctgacgctgcgaacctgttcaaagcagtgcgcgaaactatggttgacacatatgagtcttgtgatgtactggctgatttctacgaccagttcgctgaccagttgcacgagtctcaattggacaaaatgccagcacttccggctaaaggtaacttgaacctccgtgacatcttaaaatcggacttcgcgttcgcg

SEQ ID NO: 944 - protein, 890 aa, synthetic construct
  REGION 1..890: note = Variant of RNA polymerase
MHHHHHHMNTINIAKNDFSDIELAAIPFNTLADHYGERLAREQLALEHESYEMGEARFRKMFERQLKAGEVADNAAAKPLITTLLPKMIARINDWFEEVKAKRGKRPTAFQFLQEIKPEAVAYITIKTTLACLTSADNTTVQAVASAIGRAIEDEARFGRIRDLEAKHFKKNVEEQLNKRVGHVYKKAFMQVVEHDMLSKGLLGGEAWSSWHKEDSIHVGVRCIEMLIESTGMVSLHRQNAGVVGQDSETIELAPEYAEAIATRAGALAGISPMFQPCVVPPKPWTGITGGGYWAAGRKPLQLVRTRSLAALRRYEEVSMPEVIKAVNIAQNTAWRINKKVLDVANTITQWQHCPVADVPAMDRGEMPARPLDIDTNEIALKAWKKEASAFYRKDKARVSRRLSMEFMLSQANKFANEKAIWFPQNMDWRGRVYAVPMFNPQGNDMTKGLLTFAQEKPIGEDGFYWLKIHGANTAGVDKVPFPQRIKFVEDNHTNIMECAKAPLENTWWAEQDSPFCFLAFCFEYAGVINSGLSYNCSLPLAFDGSCSGLQHFSAMLRDEIGGKAVNLLPSAEYQDIYRIVSDKVNEMLKQDLINGTSTTVETVTDKKTGEITQRTKYGTKVMAQWWLEHGVNRGVTKRSVMTLVYGSKEFGFRDQVLSDTIQPAIDNGKGDMFLNPNQAAGYMAKLIWNAVSGTVVAAVEAMNWLKSAAKLLAAEVKDPKTGTVLRGRCAVHWVTPDGFPVWQEYKKPIQTRLNLMFLGQFRLQPTINTNKDSEIDAHKQESGIAPNFVHSQDGNHLRMTVVWAHEKYGIESFALIHDSFGTIPADAANLFKAVRETMVDTYESCDVLADFYDQFADQLHESQLDKMPALPAKGNLNLRDILKSDFAFA

SEQ ID NO: 945 - DNA, 2670 bp, synthetic construct
  misc_feature 1..2670: note = Variant of RNA polymerase
  source 1..2670: mol_type = other DNA
atgcaccatcaccatcaccatatgaacacgattaacattgctaagaacgacttctctgacatcgaactggctgctatcccgttcaacactctggctgaccattacggtgagcgtttagctcgcgaacagttggcccttgagcatgagtcttacgagatgggtgaagcacgcttccgcaagatgtttgagcgtcaacttaaagctggtgaggttgcggataacgctgccgccaagcctctcatcactaccctactccctaagatgattgcacgcatcaacgactggtttgaggaagtgaaagctaagcgcggcaagcgcccgacagccttccagttcctgcaagaaatcaagccggaagccgtagcgtacatcaccattaagaccactctggcttgcctaaccagtgcggacaatacaaccgttcaggctgtagcaagcgcaatcggtcgggccattgaggacgaggctcgcttcggtcgtatccgtgaccttgaagctaagcacttcaagaagaacgttgaggaacaactcaacaagcgcgtagggcacgtctacaagaaagcatttatgcaagttgtcgagcacgacatgctctctaagggtctactcggtggcgaggcgtggtcttcgtggcataaggaagactctattcatgtaggagtacgctgcatcgagatgctcattgagtcaaccggaatggttagcttacaccgccaaaatgctggcgtagtaggtcaagactctgagactatcgaactcgcacctgaatacgctgaggctatcgcaacccgtgcaggtgcgctggctggcatctctccgatgttccaaccttgcgtagttcctcctaagccgtggactggcattactggtggtggctattgggctgcggggcgcaaacccctgcagttagtacgtactcgcagtctggcggcgcttcgccgctatgaagaagtgtcgatgccggaggtcatcaaagcagtcaacattgcgcagaatacagcatggcgtattaacaagaaagttctcgacgtagcgaataccatcacccaatggcagcactgtccagtcgcggatgtgcctgcgatggatcgtggcgaaatgccagctcgtccgttggacatcgataccaacgagattgcacttaaagcgtggaagaaagaagcttccgcgttctaccgcaaagacaaagcacgcgttagccgtcgtctgtcaatggagtttatgttatctcaggcgaacaagtttgcgaattataaggcaatctggtttccgcaaaacatggattggcgtgggcgcgtgtacgctgtcccgatgttcaatcctcagggcaacgatatgacgaaaggcctgctgacctttgcgcaggagaaacccattggtgaagacggcttctattggctcaagattcatggcgcaaatacagctggagtggataaagtaccgtttccacaacgcatcaaatttgttgaggataaccatacgaatattatggaatgcgcgaaagcaccgctggaaaacacttggtgggcggaacaggactcgccgttctgttttctggcgttctgctttgagtatgctggcgtcatcaatagtggtctgtcgtacaactgtagcttgcctctggcatttgatggtagttgctccggcctgcaacatttctcagcgatgttacgcgacgaaattggcggcaaagctgtgaatctcctcccatctgcggaataccaggatatttatcgtatcgtcagcgacaaagttaacgagatgctgaaacaagatctgattaacggtacctctaccaccgtggaaacggtgactgataagaagacaggcgaaattacccaacgcacgaaatacgggaccaaagtaatggcacagtggtggttagaacacggtgtgaatcgtggcgtcacgaaacgctcggttatgactttggtgtatgggagcaaagagtttggattccgcgatcaagtgctgagtgacaccattcaaccggcgatcgataacggcaaaggtgacatgtttctgaatccgaatcaggctgctggttacatggcgaaactgatctggaacgcagtgtccgggaccgtagtcgcagcagttgaggcgatgaactggctgaaaagtgcggcgaaattacttgctgctgaagtgaaggatcctaagacggatacagttctgcgtggccgctgcgcagtacattgggtgactcccgacggcttccctgtgtggcaggaatacaagaagcctattcagacgcgcttgaacctgatgttcctcggtcagttccgcttacagcctaccattaacaccaacaaagatagcgagattgatgcacacaaacaggagtctggtatcgctcctaactttgtacacagccaagacggtaaccaccttcgtatgactgtagtgtgggcacacgagaagtacggaatcgaatcttttgcactgattcacgactccttcggtaccattccggctgacgctgcgaacctgttcaaagcagtgcgcgaaactttcgttgacacatatgagtcttgtgatgtactggctgatttctacgaccagttcgctgaccagttgcacgagtctcaattggacaaaatgccagcacttccggctaaaggtaacttgaacctccgtgacatcttaaaatcggacttcgcgttcgcg

SEQ ID NO: 946 - protein, 890 aa, synthetic construct
  REGION 1..890: note = Variant of RNA polymerase
MHHHHHHMNTINIAKNDFSDIELAAIPFNTLADHYGERLAREQLALEHESYEMGEARFRKMFERQLKAGEVADNAAAKPLITTLLPKMIARINDWFEEVKAKRGKRPTAFQFLQEIKPEAVAYITIKTTLACLTSADNTTVQAVASAIGRAIEDEARFGRIRDLEAKHFKKNVEEQLNKRVGHVYKKAFMQVVEHDMLSKGLLGGEAWSSWHKEDSIHVGVRCIEMLIESTGMVSLHRQNAGVVGQDSETIELAPEYAEAIATRAGALAGISPMFQPCVVPPKPWTGITGGGYWAAGRKPLQLVRTRSLAALRRYEEVSMPEVIKAVNIAQNTAWRINKKVLDVANTITQWQHCPVADVPAMDRGEMPARPLDIDTNEIALKAWKKEASAFYRKDKARVSRRLSMEFMLSQANKFANYKAIWFPQNMDWRGRVYAVPMFNPQGNDMTKGLLTFAQEKPIGEDGFYWLKIHGANTAGVDKVPFPQRIKFVEDNHTNIMECAKAPLENTWWAEQDSPFCFLAFCFEYAGVINSGLSYNCSLPLAFDGSCSGLQHFSAMLRDEIGGKAVNLLPSAEYQDIYRIVSDKVNEMLKQDLINGTSTTVETVTDKKTGEITQRTKYGTKVMAQWWLEHGVNRGVTKRSVMTLVYGSKEFGFRDQVLSDTIQPAIDNGKGDMFLNPNQAAGYMAKLIWNAVSGTVVAAVEAMNWLKSAAKLLAAEVKDPKTDTVLRGRCAVHWVTPDGFPVWQEYKKPIQTRLNLMFLGQFRLQPTINTNKDSEIDAHKQESGIAPNFVHSQDGNHLRMTVVWAHEKYGIESFALIHDSFGTIPADAANLFKAVRETFVDTYESCDVLADFYDQFADQLHESQLDKMPALPAKGNLNLRDILKSDFAFA

SEQ ID NO: 947 - DNA, 2670 bp, synthetic construct
  misc_feature 1..2670: note = Variant of RNA polymerase
  source 1..2670: mol_type = other DNA
atgcaccatcaccatcaccatatgaacacgattaacattgctaagaacgacttctctgacatcgaactggctgctatcccgttcaacactctggctgaccattacggtgagcgtttagctcgcgaacagttggcccttgagcatgagtcttacgagatgggtgaagcacgcttccgcaagatgtttgagcgtcaacttaaagctggtgaggttgcggataacgctgccgccaagcctctcatcactaccctactccctaagatgattgcacgcatcaacgactggtttgaggaagtgaaagctaagcgcggcaagcgcccgacagccttccagttcctgcaagaaatcaagccggaagccgtagcgtacatcaccattaagaccactctggcttgcctaaccagtgcggacaatacaaccgttcaggctgtagcaagcgcaatcggtcgggccattgaggacgaggctcgcttcggtcgtatccgtgaccttgaagctaagcacttcaagaagaacgttgaggaacaactcaacaagcgcgtagggcacgtctacaagaaagcatttatgcaagttgtcgagcacgacatgctctctaagggtctactcggtggcgaggcgtggtcttcgtggcataaggaagactctattcatgtaggagtacgctgcatcgagatgctcattgagtcaaccggaatggttagcttacaccgccaaaatgctggcgtagtaggtcaagactctgagactatcgaactcgcacctgaatacgctgaggctatcgcaacccgtgcaggtgcgctggctggcatctctccgatgttccaaccttgcgtagttcctcctaagccgtggactggcattactggtggtggctattgggctgcggggcgcaaacccctgcagttagtacgtactcgcagtctggcggcgcttcgccgctatgaagaagtgtcgatgccggaggtcatcaaagcagtcaacattgcgcagaatacagcatggcgtattaacaagaaagttctcgacgtagcgaataccatcacccaatggcagcactgtccagtcgcggatgtgcctgcgatggatcgtggcgaaatgccagctcgtccgttggacatcgataccaacgagattgcacttaaagcgtggaagaaagaagcttccgcgttctaccgcaaagacaaagcacgcgttagccgtcgtctgtcaatggagtttatgttatctcaggcgaacaagtttgcgaattataaagcaatctggtttccgcaaaacatggattggcgtgggcgcgtgtacgctgtcccgatgttcaatcctcagggcaacgatatgacgaaaggcctgctgacctttgcgcaggagaaacccattggtgaagacggcttctattggctcaagattcatggcgcaaatacagctggagtggataaagtaccgtttcagcaacgcatcaaatttgttgaggataaccatacgaatattatggaatgcgcgaaagcaccgctggaaaacacttggtgggcggaacaggactcgccgttctgttttctggcgttctgctttgagtatgctggcgtcatcaatagtggtctgtcgtacaactgtagcttgcctctggcatttgatggtagttgctccggcctgcaacatttctcagcgatgttacgcgacgaaattggcggcaaagctgtgaatctcctcccatctgcggaataccaggatatttatcgtatcgtcagcgacaaagttaacgagatgctgaaacaagatctgattaacggtacctctaccaccgtggaaacggtgactgataagaagacaggcgaaattacccaacgcacgaaatacgggaccaaagttatggcacagtggtggttagaacacggtgtgaatcgtggcgtcacgaaacgctcggttatgactttggtgtatgggagcaaagagtttggattccgcgatcaagtgctgagtgacaccattcaaccggcgatcgataacggcaaaggtgacatgtttctgaatccgaatcaggctgctggttacatggcgaaactgatctggaacgcagtgtccgggaccgtagtcgcagcagttgaggcgatgaactggctgaaaagtgcggcgaaattacttgctgctgaagtgaaggatcctaagacggatacagttctgcgtggccgctgcgcagtacattgggtgactcccgacggcttccctgtgtggcaggaatacaagaagcctattcagacgcgcttgaacctgatgttcctcggtcagttccgcttacagcctaccattaacaccaacaaagatagcgagattgatgcacacaaacaggagtctggtatcgctcctaactttgtacacagccaagacggtaaccaccttcgtatgactgtagtgtgggcacacgagaagtacggaatcgaatcttttgcactgattcacgactccttcggtaccattccggctgacgctgcgaacctgttcaaagcagtgcgcgaaactatggtttcgacatatgagtcttgtgatgtactggctgatttctacgaccagttcgctgaccagttgcacgagtctcaattggacaaaatgccagcacttccggctaaaggtaacttgaacctccgtgacatcttaaaatcggacttcgcgttcgcg

SEQ ID NO: 948 - protein, 890 aa, synthetic construct
  REGION 1..890: note = Variant of RNA polymerase
MHHHHHHMNTINIAKNDFSDIELAAIPFNTLADHYGERLAREQLALEHESYEMGEARFRKMFERQLKAGEVADNAAAKPLITTLLPKMIARINDWFEEVKAKRGKRPTAFQFLQEIKPEAVAYITIKTTLACLTSADNTTVQAVASAIGRAIEDEARFGRIRDLEAKHFKKNVEEQLNKRVGHVYKKAFMQVVEHDMLSKGLLGGEAWSSWHKEDSIHVGVRCIEMLIESTGMVSLHRQNAGVVGQDSETIELAPEYAEAIATRAGALAGISPMFQPCVVPPKPWTGITGGGYWAAGRKPLQLVRTRSLAALRRYEEVSMPEVIKAVNIAQNTAWRINKKVLDVANTITQWQHCPVADVPAMDRGEMPARPLDIDTNEIALKAWKKEASAFYRKDKARVSRRLSMEFMLSQANKFANYKAIWFPQNMDWRGRVYAVPMFNPQGNDMTKGLLTFAQEKPIGEDGFYWLKIHGANTAGVDKVPFQQRIKFVEDNHTNIMECAKAPLENTWWAEQDSPFCFLAFCFEYAGVINSGLSYNCSLPLAFDGSCSGLQHFSAMLRDEIGGKAVNLLPSAEYQDIYRIVSDKVNEMLKQDLINGTSTTVETVTDKKTGEITQRTKYGTKVMAQWWLEHGVNRGVTKRSVMTLVYGSKEFGFRDQVLSDTIQPAIDNGKGDMFLNPNQAAGYMAKLIWNAVSGTVVAAVEAMNWLKSAAKLLAAEVKDPKTDTVLRGRCAVHWVTPDGFPVWQEYKKPIQTRLNLMFLGQFRLQPTINTNKDSEIDAHKQESGIAPNFVHSQDGNHLRMTVVWAHEKYGIESFALIHDSFGTIPADAANLFKAVRETMVSTYESCDVLADFYDQFADQLHESQLDKMPALPAKGNLNLRDILKSDFAFA

SEQ ID NO: 949 - DNA, 2670 bp, synthetic construct
  misc_feature 1..2670: note = Variant of RNA polymerase
  source 1..2670: mol_type = other DNA
atgcaccatcaccatcaccatatgaacacgattaacattgctaagaacgacttctctgacatcgaactggctgctatcccgttcaacactctggctgaccattacggtgagcgtttagctcgcgaacagttggcccttgagcatgagtcttacgagatgggtgaagcacgcttccgcaagatgtttgagcgtcaacttaaagctggtgaggttgcggataacgctgccgccaagcctctcatcactaccctactccctaagatgattgcacgcatcaacgactggtttgaggaagtgaaagctaagcgcggcaagcgcccgacagccttccagttcctgcaagaaatcaagccggaagccgtagcgtacatcaccattaagaccactctggcttgcctaaccagtgcggacaatacaaccgttcaggctgtagcaagcgcaatcggtcgggccattgaggacgaggctcgcttcggtcgtatccgtgaccttgaagctaagcacttcaagaagaacgttgaggaacaactcaacaagcgcgtagggcacgtctacaagaaagcatttatgcaagttgtcgagcacgacatgctctctaagggtctactcggtggcgaggcgtggtcttcgtggcataaggaagactctattcatgtaggagtacgctgcatcgagatgctcattgagtcaaccggaatggttagcttacaccgccaaaatgctggcgtagtaggtcaagactctgagactatcgaactcgcacctgaatacgctgaggctatcgcaacccgtgcaggtgcgctggctggcatctctccgatgttccaaccttgcgtagttcctcctaagccgtggactggcattactggtggtggctattgggctgcggggcgcaaacccctgcagttagtacgtactcgcagtctggcggcgcttcgccgctatgaagaagtgtcgatgccggaggtcatcaaagcagtcaacattgcgcagaatacagcatggcgtattaacaagaaagttctcgacgtagcgaataccatcacccaatggcagcactgtccagtcgcggatgtgcctgcgatggatcgtggcgaaatgccagctcgtccgttggacatcgataccaacgagattgcacttaaagcgtggaagaaagaagcttccgcgttctaccgcaaagacaaagcacgcgttagccgtcgtctgtcaatggagtttatgttatctcaggcgaacaagtttgcgaattataaagcaatctggtttccgcaaaacatggattggcgtgggcgcgtgtacgctgtcccgatgttcaatcctcagggcaacgatatgacgaaaggcctgctgacctttgcgcaggagaaacccattggtgaagacggcttctattggctcaagattcatggcgcaaatacagctggagtggataaagtaccgtttccacaacgcatcaaatttgttgaggataaccatacgaatattatggaatgcgcgaaagcaccgctggaaaacacttggtgggcggaacaggactcgccgttctgttttctggcgttctgctttgagtatgctggcgtcatcaatagtggtctgtcgtacaactgtagcttgcctctggcatttgatggtagttgctccggcctgcaacatttctcagcgatgttacgcgacgaaattggcggcaaagctgtgaatctcctcccatctgcggaataccaggatatttatcgtatcgtcagcgacaaagttaacgagatgctgaaacaagatctgattaacggtacctctaccaccgtggaaacggtgactgataagaagacaggcgaaattacccaacgcacgaaatacgggaccaaagttatggcacagtggtggttagaacacggtgtgaatcgtggcgtcacgaaacgctcggttatgactttggtgtatgggagcaaagagtttggattccgcgatcaagtgctgagtgacaccattcaaccggcgatcgataacggcaaaggtgacatgtttctgaatccgaatcaggctgctggttacatggcgaaactgatctggaacgcagtgtccgggaccgtagtcgcagcagttgaggcgatgaactggctgaaaagtgcggcgaaattacttgctgctgaagtgaaggatcctaagacggatacagttctgcgtggccgctgcgcagtacattgggtgactcccgacggcttccctgtgtggcaggaatacaagaagcctattcagacgcgcttgaacctgatgttcctcggtcagttccgcttacagcctaccattaacaccaacaaagatagcgagattgatgcacacaaacaggagtctggtatcgctcctaactttgtacacagccaagacggtaaccaccttcgtatgactgtagtgtgggcacacgagaagtacggaatcgaatcttttgcactgattcacgactccttcggtaccattccggctgacgctgcgaacctgttcaaagcagtgcgcgaaactatggtttcgacatatgagtcttgtgatgtactggctgatttctacgaccagttcgctgaccagttgcacgagtctcaaaaggacaaaatgccagcacttccggctaaaggtaacttgaacctccgtgacatcttaaaatcggacttcgcgttcgcg

SEQ ID NO: 950 - protein, 890 aa, synthetic construct
  REGION 1..890: note = Variant of RNA polymerase
MHHHHHHMNTINIAKNDFSDIELAAIPFNTLADHYGERLAREQLALEHESYEMGEARFRKMFERQLKAGEVADNAAAKPLITTLLPKMIARINDWFEEVKAKRGKRPTAFQFLQEIKPEAVAYITIKTTLACLTSADNTTVQAVASAIGRAIEDEARFGRIRDLEAKHFKKNVEEQLNKRVGHVYKKAFMQVVEHDMLSKGLLGGEAWSSWHKEDSIHVGVRCIEMLIESTGMVSLHRQNAGVVGQDSETIELAPEYAEAIATRAGALAGISPMFQPCVVPPKPWTGITGGGYWAAGRKPLQLVRTRSLAALRRYEEVSMPEVIKAVNIAQNTAWRINKKVLDVANTITQWQHCPVADVPAMDRGEMPARPLDIDTNEIALKAWKKEASAFYRKDKARVSRRLSMEFMLSQANKFANYKAIWFPQNMDWRGRVYAVPMFNPQGNDMTKGLLTFAQEKPIGEDGFYWLKIHGANTAGVDKVPFPQRIKFVEDNHTNIMECAKAPLENTWWAEQDSPFCFLAFCFEYAGVINSGLSYNCSLPLAFDGSCSGLQHFSAMLRDEIGGKAVNLLPSAEYQDIYRIVSDKVNEMLKQDLINGTSTTVETVTDKKTGEITQRTKYGTKVMAQWWLEHGVNRGVTKRSVMTLVYGSKEFGFRDQVLSDTIQPAIDNGKGDMFLNPNQAAGYMAKLIWNAVSGTVVAAVEAMNWLKSAAKLLAAEVKDPKTDTVLRGRCAVHWVTPDGFPVWQEYKKPIQTRLNLMFLGQFRLQPTINTNKDSEIDAHKQESGIAPNFVHSQDGNHLRMTVVWAHEKYGIESFALIHDSFGTIPADAANLFKAVRETMVSTYESCDVLADFYDQFADQLHESQKDKMPALPAKGNLNLRDILKSDFAFA

SEQ ID NO: 951 - DNA, 2670 bp, synthetic construct
  misc_feature 1..2670: note = Variant of RNA polymerase
  source 1..2670: mol_type = other DNA
atgcaccatcaccatcaccatatgaacacgattaacattgctaagaacgacttctctgacatcgaactggctgctatcccgttcaacactctggctgaccattacggtgagcgtttagctcgcgaacagttggcccttgagcatgagtcttacgagatgggtgaagcacgcttccgcaagatgtttgagcgtcaacttaaagctggtgaggttgcggataacgctgccgccaagcctctcatcactaccctactccctaagatgattgcacgcatcaacgactggtttgaggaagtgaaagctaagcgcggcaagcgcccgacagccttccagttcctgcaagaaatcaagccggaagccgtagcgtacatcaccattaagaccactctggcttgcctaaccagtgcggacaatacaaccgttcaggctgtagcaagcgcaatcggtcgggccattgaggacgaggctcgcttcggtcgtatccgtgaccttgaagctaagcacttcaagaaaaacgttgaggaacaactcaacaagcgcgtagggcacgtctacaagaaagcatttatgcaagttgtcgagcacgacatgctctctaagggtctactcggtggcgaggcgtggtcttcgtggcataaggaagactctattcatgtaggagtacgctgcatcgagatgctcattgagtcaaccggaatggttagcttacaccgccaaaatgctggcgtagtaggtcaagactctgagactatcgaactcgcacctgaatacgctgaggctatcgcaacccgtgcaggtgcgctggctggcatctctccgatgttccaaccttgcgtagttcctcctaagccgtggactggcattactggtggtggctattgggctgcggggcgcaaacccctgcagttagtacgtactcgcagtctggcggcgcttcgccgctatgaagaagtgtcgatgccggaggtcatcaaagcagtcaacattgcgcagaatacagcatggcgtattaacaagaaagttctcgacgtagcgaataccatcacccaatggcagcactgtccagtcgcggatgtgcctgcgatggatcgtggcgaaatgccagctcgtccgttggacatcgataccaacgagattgcacttaaagcgtggaagaaagaagcttccgcgttctaccgcaaagacaaagcacgcgttagccgtcgtctgtcaatggagtttatgttatctcaggcgaacaagtttgcgaatgagaaggcaatctggtttccgcaaaacatggattggcgtgggcgcgtgtacgctgtcccgatgttcaatcctcagggcaacgatatgacgaaaggcctgctgacctttgcgcaggagaaacccattggtgaagacggcttctattggctcaagattcatggcgcaaatacagctggagtggataaagtaccgtttccacaacgcatcaaatttgttgaggataaccatacgaatattatggaatgcgcgaaagcaccgctggaaaacacttggtgggcggaacaggactcgccgttctgttttctggcgttctgctttgagtatgctggcgtcatcaatagtggtctgtcgtacaactgtagcttgcctctggcatttgatggtagttgctccggcctgcaacatttctcagcgatgttacgcgacgaaattggcggcaaagctgtgaatctcctcccatctgcggaataccaggatatttatcgtatcgtcagcgacaaagttaacgagatgctgaaacaagatctgattaacggtacctctaccaccgtggaaacggtgactgataagaagacaggcgaaattacccaacgcacgaaatacgggaccaaagtaatggcacagtggtggttagaacacggtgtgaatcgtggcgtcacgaaacgctcggttatgactttggtgtatgggagcaaagagtttggattccgcgatcaagtgctgagtgacaccattcaaccggcgatcgataacggcaaaggtgacatgtttctgaatccgaatcaggctgctggttacatggcgaaactgatctggaacgcagtgtccgggaccgtagtcgcagcagttgaggcgatgaactggctgaaaagtgcggcgaaattacttgctgctgaagtgaaggatccaaagacgggcacagttctgcgtggccgctgcgcagtacattgggtgactcccgacggcttccctgtgtggcaggaatacaagaagcctattcagacgcgcttgaacctgatgttcctcggtcagttccgcttacagcctaccattaacaccaacaaagatagcgagattgatgcacacaaacaggagtctggtatcgctcctaactttgtacacagccaagacggtaaccaccttcgtatgactgtagtgtgggcacacgagaagtacggaatcgaatcttttgcactgattcacgactccttcggtaccattccggctgacgctgcgaacctgttcaaagcagtgcgcgaaactatggttgacacatatgagtcttgtgatgtactggctgatttctacgaccagttcgctgaccagttgcacgagtctcaacgcgacaaaatgccagcacttccggctaaaggtaacttgaacctccgtgacatcttaaaatcggacttcgcgttcgcg

SEQ ID NO: 952 - protein, 890 aa, synthetic construct
  REGION 1..890: note = Variant of RNA polymerase
MHHHHHHMNTINIAKNDFSDIELAAIPFNTLADHYGERLAREQLALEHESYEMGEARFRKMFERQLKAGEVADNAAAKPLITTLLPKMIARINDWFEEVKAKRGKRPTAFQFLQEIKPEAVAYITIKTTLACLTSADNTTVQAVASAIGRAIEDEARFGRIRDLEAKHFKKNVEEQLNKRVGHVYKKAFMQVVEHDMLSKGLLGGEAWSSWHKEDSIHVGVRCIEMLIESTGMVSLHRQNAGVVGQDSETIELAPEYAEAIATRAGALAGISPMFQPCVVPPKPWTGITGGGYWAAGRKPLQLVRTRSLAALRRYEEVSMPEVIKAVNIAQNTAWRINKKVLDVANTITQWQHCPVADVPAMDRGEMPARPLDIDTNEIALKAWKKEASAFYRKDKARVSRRLSMEFMLSQANKFANEKAIWFPQNMDWRGRVYAVPMFNPQGNDMTKGLLTFAQEKPIGEDGFYWLKIHGANTAGVDKVPFPQRIKFVEDNHTNIMECAKAPLENTWWAEQDSPFCFLAFCFEYAGVINSGLSYNCSLPLAFDGSCSGLQHFSAMLRDEIGGKAVNLLPSAEYQDIYRIVSDKVNEMLKQDLINGTSTTVETVTDKKTGEITQRTKYGTKVMAQWWLEHGVNRGVTKRSVMTLVYGSKEFGFRDQVLSDTIQPAIDNGKGDMFLNPNQAAGYMAKLIWNAVSGTVVAAVEAMNWLKSAAKLLAAEVKDPKTGTVLRGRCAVHWVTPDGFPVWQEYKKPIQTRLNLMFLGQFRLQPTINTNKDSEIDAHKQESGIAPNFVHSQDGNHLRMTVVWAHEKYGIESFALIHDSFGTIPADAANLFKAVRETMVDTYESCDVLADFYDQFADQLHESQRDKMPALPAKGNLNLRDILKSDFAFA

SEQ ID NO: 953 - DNA, 2670 bp, synthetic construct
  misc_feature 1..2670: note = Variant of RNA polymerase
  source 1..2670: mol_type = other DNA
atgcaccatcaccatcaccatatgaacacgattaacattgctaagaacgacttctctgacatcgaactggctgctatcccgttcaacactctggctgaccattacggtgagcgtttagctcgcgaacagttggcccttgagcatgagtcttacgagatgggtgaagcacgcttccgcaagatgtttgagcgtcaacttaaagctggtgaggttgcggataacgctgccgccaagcctctcatcactaccctactccctaagatgattgcacgcatcaacgactggtttgaggaagtgaaagctaagcgcggcaagcgcccgacagccttccagttcctgcaagaaatcaagccggaagccgtagcgtacatcaccattaagaccactctggcttgcctaaccagtgcggacaatacaaccgttcaggctgtagcaagcgcaatcggtcgggccattgaggacgaggctcgcttcggtcgtatccgtgaccttgaagctaagcacttcaagaagaacgttgaggaacaactcaacaagcgcgtagggcacgtctacaagaaagcatttatgcaagttgtcgagcacgacatgctctctaagggtctactcggtggcgaggcgtggtcttcgtggcataaggaagactctattcatgtaggagtacgctgcatcgagatgctcattgagtcaaccggaatggttagcttacaccgccaaaatgctggcgtagtaggtcaagactctgagactatcgaactcgcacctgaatacgctgaggctatcgcaacccgtgcaggtgcgctggctggcatctctccgatgttccaaccttgcgtagttcctcctaagccgtggactggcattactggtggtggctattgggctgcggggcgcaaacccctgcagttagtacgtactcgcagtctggcggcgcttcgccgctatgaagaagtgtcgatgccggaggtcatcaaagcagtcaacattgcgcagaatacagcatggcgtattaacaagaaagttctcgacgtagcgaataccatcacccaatggcagcactgtccagtcgcggatgtgcctgcgatggatcgtggcgaaatgccagctcgtccgttggacatcgataccaacgagattgcacttaaagcgtggaagaaagaagcttccgcgttctaccgcaaagacaaagcacgcgttagccgtcgtctgtcaatggagtttatgttatctcaggcgaacaagtttgcgaattataacgcaatctggtttccgcaaaacatggattggcgtgggcgcgtgtacgctgtcccgatgttcaatcctcagggcaacgatatgacgaaaggcctgctgacctttgcgcaggagaaacccattggtgaagacggcttctattggctcaagattcatggcgcaaatacagctggagtggataaagtaccgtttccacaacgcatcaaatttgttgaggataaccatacgaatattatggaatgcgcgaaagcaccgctggaaaacacttggtgggcggaacaggactcgccgttctgttttctggcgttctgctttgagtatgctggcgtcatcaatagtggtctgtcgtacaactgtagcttgcctctggcatttgatggtagttgctccggcctgcaacatttctcagcgatgttacgcgacgaaattggcggcaaagctgtgaatctcctcccatctgcggaataccaggatatttatcgtatcgtcagcgacaaagttaacgagatgctgaaacaagatctgattaacggtacctctaccaccgtggaaacggtgactgataagaagacaggcgaaattacccaacgcacgaaatacgggaccaaagtaatggcacagtggtggttagaacacggtgtgaatcgtggcgtcacgaaacgctcggttatgactttggtgtatgggagcaaagagtttggattccgcgatcaagtgctgagtgacaccattcaaccggcgatcgataacggcaaaggtgacatgtttctgaatccgaatcaggctgctggttacatggcgaaactgatctggaacgcagtgtccgggaccgtagtcgcagcagttgaggcgatgaactggctgaaaagtgcggcgaaattacttgctgctgaagtgaaggatccaaagacggacacagttctgcgtggccgctgcgcagtacattgggtgactcccgacggcttccctgtgtggcaggaatacaagaagcctattcagacgcgcttgaacctgatgttcctcggtcagttccgcttacagcctaccattaacaccaacaaagatagcgagattgatgcacacaaacaggagtctggtatcgctcctaactttgtacacagccaagacggtaaccaccttcgtatgactgtagtgtgggcacacgagaagtacggaatcgaatcttttgcactgattcacgactccttcggtaccattccggctgacgctgcgaacctgttcaaagcagtgcgcgaaactatggttagcacatatgagtcttgtgatgtactggctgatttctacgaccagttcgctgaccagttgcacgagtctcaactggacaaaatgccagcacttccggctaaaggtaacttgaacctccgtgacatcttaaaatcggacttcgcgttcgcg

SEQ ID NO: 954 - protein, 890 aa, synthetic construct
  REGION 1..890: note = Variant of RNA polymerase
MHHHHHHMNTINIAKNDFSDIELAAIPFNTLADHYGERLAREQLALEHESYEMGEARFRKMFERQLKAGEVADNAAAKPLITTLLPKMIARINDWFEEVKAKRGKRPTAFQFLQEIKPEAVAYITIKTTLACLTSADNTTVQAVASAIGRAIEDEARFGRIRDLEAKHFKKNVEEQLNKRVGHVYKKAFMQVVEHDMLSKGLLGGEAWSSWHKEDSIHVGVRCIEMLIESTGMVSLHRQNAGVVGQDSETIELAPEYAEAIATRAGALAGISPMFQPCVVPPKPWTGITGGGYWAAGRKPLQLVRTRSLAALRRYEEVSMPEVIKAVNIAQNTAWRINKKVLDVANTITQWQHCPVADVPAMDRGEMPARPLDIDTNEIALKAWKKEASAFYRKDKARVSRRLSMEFMLSQANKFANYNAIWFPQNMDWRGRVYAVPMFNPQGNDMTKGLLTFAQEKPIGEDGFYWLKIHGANTAGVDKVPFPQRIKFVEDNHTNIMECAKAPLENTWWAEQDSPFCFLAFCFEYAGVINSGLSYNCSLPLAFDGSCSGLQHFSAMLRDEIGGKAVNLLPSAEYQDIYRIVSDKVNEMLKQDLINGTSTTVETVTDKKTGEITQRTKYGTKVMAQWWLEHGVNRGVTKRSVMTLVYGSKEFGFRDQVLSDTIQPAIDNGKGDMFLNPNQAAGYMAKLIWNAVSGTVVAAVEAMNWLKSAAKLLAAEVKDPKTDTVLRGRCAVHWVTPDGFPVWQEYKKPIQTRLNLMFLGQFRLQPTINTNKDSEIDAHKQESGIAPNFVHSQDGNHLRMTVVWAHEKYGIESFALIHDSFGTIPADAANLFKAVRETMVSTYESCDVLADFYDQFADQLHESQLDKMPALPAKGNLNLRDILKSDFAFA

SEQ ID NO: 955 - DNA, 2670 bp, synthetic construct
  misc_feature 1..2670: note = Variant of RNA polymerase
  source 1..2670: mol_type = other DNA
atgcaccatcaccatcaccatatgaacacgattaacattgctaagaacgacttctctgacatcgaactggctgctatcccgttcaacactctggctgaccattacggtgagcgtttagctcgcgaacagttggccctggagcatgagtcttacgagatgggtgaagcacgcttccgcaagatgtttgagcgtcaacttaaagctggtgaggttgcggataacgctgccgccaagcctctcatcactaccctactccctaagatgattgcacgcatcaacgactggtttgaggaagtgaaagctaagcgcggcaagcgcccgacagccttccagttcctgcaagaaatcaagccggaagccgtagcgtacatcaccattaagaccactctggcttgcctaaccagtgcggacaatacaaccgttcaggctgtagcaagcgcaatcggtcgggccattgaggacgaggctcgcttcggtcgtatccgtgaccttgaagctaagcacttcaagaagaacgttgaggaacaactcaacaagcgcgtagggcacgtctacaagaaagcatttatgcaagttgtcgagcacgacatgctctctaagggtctactcggtggcgaggcgtggtcttcgtggcataaggaagactctattcatgtaggagtacgctgcatcgagatgctcattgagtcaaccggaatggttagcttacaccgccaaaatgctggcgtagtaggtcaagactctgagactatcgaactcgcacctgaatacgctgaggctatcgcaacccgtgcaggtgcgctggctggcatctctccgatgttccaaccttgcgtagttcctcctaagccgtggactggcattactggtggtggctattgggctgcggggcgcaaacccctgcagttagtacgtactcacagtctggcggcgcttcgccgctatgaagaagtgtcgatgccggaggtcatcaaagcagtcaacattgcgcagaatacagcatggcgtattaacaagaaagttctcgacgtagcgaataccatcacccaatggcagcactgtccagtcgcggatgtgcctgcgatggatcgtggcgaaatgccagctcgtccgttggacatcgataccaacgagattgcacttaaagcgtggaagaaagaagcttccgcgttctaccgcaaagacaaagcacgcgttagccgtcgtctgtcaatggagtttatgttatctcaggcgaacaagtttgcgaattataaagcaatctggtttccgcaaaacatggattggcgtgggcgcgtgtacgctgtcccgatgttcaatcctcagggcaacgatatgacgaaaggcctgctgacctttgcgcaggagaaacccattggtgaagacggcttctattggctcaagattcatggcgcaaatacagctggagtggataaagtaccgtttccacaacgcatcaaatttgttgaggataaccatacgaatattatggaatgcgcgaaagcaccgctggaaaacacttggtgggcggaacaggactcgccgttctgttttctggcgttctgctttgagtatgctggcgtcatcaatagtggtctgtcgtacaactgtagcttgcctctggcatttgatggtagttgctccggcctgcaacatttctcagcgatgttacgcgacgaaattggcggcaaagctgtgaatctcctcccatctgcggaataccaggatatttatcgtatcgtcagcgacaaagttaacgagatgctgaaacaagatctgattaacggtacctctaccaccgtggaaacggtgactgataagaagacaggcgaaattacccaacgcacgaaatacgggaccaaagttatggcacagtggtggttagaacacggtgtgaatcgtggcgtcacgaaacgctcggttatgactttggtgtatgggagcaaagagtttggattccgcgatcaagtgctgagtgacaccattcaaccggcgatcgataacggcaaaggtgacatgtttctgaatccgaatcaggctgctggttacatggcgaaactgatctggaacgcagtgtccgggaccgtagtcgcagcagttgaggcgatgaattggctgaaaagtgcggcgaaattacttgctgctgaagtgaaggatcctaagacggatacagttctgcgtggccgctgcgcagtacattgggtgactcccgacggcttccctgtgtggcaggaatacaagaagcctattcagacgcgcttgaacctgatgttcctcggtcagttccgcttacagcctaccattaacaccaacaaagatagcgagattgatgcacacaaacaggagtctggtatcgctcctaactttgtacacagccaagacggtaaccaccttcgtatgactgtagtgtgggcacacgagaagtacggaatcgaatcttttgcactgattcacgactccttcggtaccattccggctgacgctgcgaacctgttcaaagcagtgcgcgaaactatggtttcgacatatgagtcttgtgatgtactggctgatttctacgaccagttcgctgaccagttgcacgagtctcaattggacaaaatgccagcacttccggctaaaggtaacttgaacctccgtgacatcttaaaatcggacttcgcgttcgcg

SEQ ID NO: 956 - protein, 890 aa, synthetic construct
  REGION 1..890: note = Variant of RNA polymerase
MHHHHHHMNTINIAKNDFSDIELAAIPFNTLADHYGERLAREQLALEHESYEMGEARFRKMFERQLKAGEVADNAAAKPLITTLLPKMIARINDWFEEVKAKRGKRPTAFQFLQEIKPEAVAYITIKTTLACLTSADNTTVQAVASAIGRAIEDEARFGRIRDLEAKHFKKNVEEQLNKRVGHVYKKAFMQVVEHDMLSKGLLGGEAWSSWHKEDSIHVGVRCIEMLIESTGMVSLHRQNAGVVGQDSETIELAPEYAEAIATRAGALAGISPMFQPCVVPPKPWTGITGGGYWAAGRKPLQLVRTHSLAALRRYEEVSMPEVIKAVNIAQNTAWRINKKVLDVANTITQWQHCPVADVPAMDRGEMPARPLDIDTNEIALKAWKKEASAFYRKDKARVSRRLSMEFMLSQANKFANYKAIWFPQNMDWRGRVYAVPMFNPQGNDMTKGLLTFAQEKPIGEDGFYWLKIHGANTAGVDKVPFPQRIKFVEDNHTNIMECAKAPLENTWWAEQDSPFCFLAFCFEYAGVINSGLSYNCSLPLAFDGSCSGLQHFSAMLRDEIGGKAVNLLPSAEYQDIYRIVSDKVNEMLKQDLINGTSTTVETVTDKKTGEITQRTKYGTKVMAQWWLEHGVNRGVTKRSVMTLVYGSKEFGFRDQVLSDTIQPAIDNGKGDMFLNPNQAAGYMAKLIWNAVSGTVVAAVEAMNWLKSAAKLLAAEVKDPKTDTVLRGRCAVHWVTPDGFPVWQEYKKPIQTRLNLMFLGQFRLQPTINTNKDSEIDAHKQESGIAPNFVHSQDGNHLRMTVVWAHEKYGIESFALIHDSFGTIPADAANLFKAVRETMVSTYESCDVLADFYDQFADQLHESQLDKMPALPAKGNLNLRDILKSDFAFA

SEQ ID NO: 957 - DNA, 2670 bp, synthetic construct
  misc_feature 1..2670: note = Variant of RNA polymerase
  source 1..2670: mol_type = other DNA
atgcaccatcaccatcaccatatgaacacgattaacattgctaagaacgacttctctgacatcgaactggctgctatcccgttcaacactctggctgaccattacggtgagcgtttagctcgcgaacagttggcccttgagcatgagtcttacgagatgggtgaagcacgcttccgcaagatgtttgagcgtcaacttaaagctggtgaggttgcggataacgctgccgccaagcctctcatcactaccctactccctaagatgattgcacgcatcaacgactggtttgaggaagtgaaagctaagcgcggcaagcgcccgacagccttccagttcctgcaagaaatcaagccggaagccgtagcgtacatcaccattaagaccactctggcttgcctaaccagtgcggacaatacaaccgttcaggctgtagcaagcgcaatcggtcgggccattgaggacgaggctcgcttcggtcgtatccgtgaccttgaagctaagcacttcaagaagaacgttgaggaacaactcaacaagcgcgtagggcacgtctacaagaaagcatttatgcaagttgtcgagcacgacatgctctctaagggtctactcggtggcgaggcgtggtcttcgtggcataaggaagactctattcatgtaggagtacgctgcatcgagatgctcattgagtcaaccggaatggttagcttacaccgccaaaatgctggcgtagtaggtcaagactctgagactatcgaactcgcacctgaatacgctgaggctatcgcaacccgtgcaggtgcgctggctggcatctctccgatgttccaaccttgcgtagttcctcctaagccgtggactggcattactggtggtggctattgggctgcggggcgcaaacccctgcagttagtacgtactcgcagtctggcggcgcttcgccgctatgaagaagtgtcgatgccggaggtcatcaaagcagtcaacattgcgcagaatacagcatggcgtattaacaagaaagttctcgacgtagcgaataccatcacccaatggcagcactgtccagtcgcggatgtgcctgcgatggatcgtggcgaaatgccagctcgtccgttggacatcgataccaacgagattgcacttaaagcgtggaagaaagaagcttccgcgttctaccgcaaagacaaagcacgcgttagccgtcgtctgtcaatggagtttatgttatctcaggcgaacaagtttgcgaattatatggcaatctggtttccgcaaaacatggattggcgtgggcgcgtgtacgctgtcccgatgttcaatcctcagggcaacgatatgacgaaaggcctgctgacctttgcgcaggagaaacccattggtgaagacggcttctattggctcaagattcatggcgcaaatacagctggagtggataaagtaccgtttccacaacgcatcaaatttgttgaggataaccatacgaatattatggaatgcgcgaaagcaccgctggaaaacacttggtgggcggaacaggactcgccgttctgttttctggcgttctgctttgagtatgctggcgtcatcaatagtggtctgtcgtacaactgtagcttgcctctggcatttgatggtagttgctccggcctgcaacatttctcagcgatgttacgcgacgaaattggcggcaaagctgtgaatctcctcccatctgcggaataccaggatatttatcgtatcgtcagcgacaaagttaacgagatgctgaaacaagatctgattaacggtacctctaccaccgtggaaacggtgactgataagaagacaggcgaaattacccaacgcacgaaatacgggaccaaagtaatggcacagtggtggttagaacacggtgtgaatcgtggcgtcacgaaacgctcggttatgactttggtgtatgggagcaaagagtttggattccgcgatcaagtgctgagtgacaccattcaaccggcgatcgataacggcaaaggtgacatgtttctgaatccgaatcaggctgctggttacatggcgaaactgatctggaacgcagtgtccgggaccgtagtcgcagcagttgaggcgatgaactggctgaaaagtgcggcgaaattacttgctgctgaagtgaaggatcctaagacggatacagttctgcgtggccgctgcgcagtacattgggtgactcccgacggcttccctgtgtggcaggaatacaagaagcctattcagacgcgcttgaacctgatgttcctcggtcagttccgcttacagcctaccattaacaccaacaaagatagcgagattgatgcacacaaacaggagtctggtatcgctcctaactttgtacacagccaagacggtaaccaccttcgtatgactgtagtgtgggcacacgagaagtacggaatcgaatcttttgcactgattcacgactccttcggtaccattccggctgacgctgcgaacctgttcaaagcagtgcgcgaaactatggttgacacatatgagtcttgtgatgtactggctgatttctacgaccagttcgctgaccagttgcacgagtctcaacgcgacaaaatgccagcacttccggctaaaggtaacttgaacctccgtgacatcttaaaatcggacttcgcgttcgcg

SEQ ID NO: 958 - protein, 890 aa, synthetic construct
  REGION 1..890: note = Variant of RNA polymerase
MHHHHHHMNTINIAKNDFSDIELAAIPFNTLADHYGERLAREQLALEHESYEMGEARFRKMFERQLKAGEVADNAAAKPLITTLLPKMIARINDWFEEVKAKRGKRPTAFQFLQEIKPEAVAYITIKTTLACLTSADNTTVQAVASAIGRAIEDEARFGRIRDLEAKHFKKNVEEQLNKRVGHVYKKAFMQVVEHDMLSKGLLGGEAWSSWHKEDSIHVGVRCIEMLIESTGMVSLHRQNAGVVGQDSETIELAPEYAEAIATRAGALAGISPMFQPCVVPPKPWTGITGGGYWAAGRKPLQLVRTRSLAALRRYEEVSMPEVIKAVNIAQNTAWRINKKVLDVANTITQWQHCPVADVPAMDRGEMPARPLDIDTNEIALKAWKKEASAFYRKDKARVSRRLSMEFMLSQANKFANYMAIWFPQNMDWRGRVYAVPMFNPQGNDMTKGLLTFAQEKPIGEDGFYWLKIHGANTAGVDKVPFPQRIKFVEDNHTNIMECAKAPLENTWWAEQDSPFCFLAFCFEYAGVINSGLSYNCSLPLAFDGSCSGLQHFSAMLRDEIGGKAVNLLPSAEYQDIYRIVSDKVNEMLKQDLINGTSTTVETVTDKKTGEITQRTKYGTKVMAQWWLEHGVNRGVTKRSVMTLVYGSKEFGFRDQVLSDTIQPAIDNGKGDMFLNPNQAAGYMAKLIWNAVSGTVVAAVEAMNWLKSAAKLLAAEVKDPKTDTVLRGRCAVHWVTPDGFPVWQEYKKPIQTRLNLMFLGQFRLQPTINTNKDSEIDAHKQESGIAPNFVHSQDGNHLRMTVVWAHEKYGIESFALIHDSFGTIPADAANLFKAVRETMVDTYESCDVLADFYDQFADQLHESQRDKMPALPAKGNLNLRDILKSDFAFA

SEQ ID NO: 959 - DNA, 2670 bp, synthetic construct
  misc_feature 1..2670: note = Variant of RNA polymerase
  source 1..2670: mol_type = other DNA
atgcaccatcaccatcaccatatgaacacgattaacattgctaagaacgacttctctgacatcgaactggctgctatcccgttcaacactctggctgaccattacggtgagcgtttagctcgcgaacagttggcccttgagcatgagtcttacgagatgggtgaagcacgcttccgcaagatgtttgagcgtcaacttaaagctggtgaggttgcggataacgctgccgccaagcctctcatcactaccctactccctaagatgattgcacgcatcaacgactggtttgaggaagtgaaagctaagcgcggcaagcgcccgacagccttccagttcctgcaagaaatcaagccggaagccgtagcgtacatcaccattaagaccactctggcttgcctaaccagtgcggacaatacaaccgttcaggctgtagcaagcgcaatcggtcgggccattgaggacgaggctcgcttcggtcgtatccgtgaccttgaagctaagcacttcaagaagaacgttgaggaacaactcaacaagcgcgtagggcacgtgtacaagaaagcatttatgcaagttgtcgagcacgacatgctctctaagggtctactcggtggcgaggcgtggtcttcgtggcataaggaagactctattcatgtaggagtacgctgcatcgagatgctcattgagtcaaccggaatggttagcttacaccgccaaaatgctggcgtagtaggtcaagactctgagactatcgaactcgcacctgaatacgctgaggctatcgcaacccgtgcaggtgcgctggctggcatctctccgatgttccaaccttgcgtagttcctcctaagccgtggactggcattactggtggtggctattgggctgcggggcgcaaacccctgcagttagtacgtactcgcagtctggcggcgcttcgccgctatgaagaagtgtcgatgccggaggtcatcaaagcagtcaacattgcgcagaatacagcatggcgtattaacaagaaagttctcgacgtagcgaataccatcacccaatggcagcactgtccagtcgcggatgtgcctgcgatggatcgtggcgaaatgccagctcgtccgttggacatcgataccaacgagattgcacttaaagcgtggaagaaagaagcttccgcgttctaccgcaaagacaaagcacgcgttagccgtcgtctgtcaatggagtttatgttatctcaggcgaacaagtttgcgaattatgaggcaatctggtttccgcaaaacatggattggcgtgggcgcgtgtacgctgtcccgatgttcaatcctcagggcaacgatatgacgaaaggcctgctgacctttgcgcaggagaaacccattggtgaagacggcttctattggctcaagattcatggcgcaaatacagctggagtggataaagtaccgtttccacaacgcatcaaatttgttgaggataaccatacgaatattatggaatgcgcgaaagcaccgctggaaaacacttggtgggcggaacaggactcgccgttctgttttctggcgttctgctttgagtatgctggcgtcatcaatagtggtctgtcgtacaactgtagcttgcctctggcatttgatggtagttgctccggcctgcaacatttctcagcgatgttacgcgacgaaattggcggcaaagctgtgaatctcctcccatctgcggaataccaggatatttatcgtatcgtcagcgacaaagttaacgagatgctgaaacaagatctgattaacggtacctctaccaccgtggaaacggtgactgataagaagacaggcgaaattacccaacgcacgaaatacgggaccaaagtaatggcacagtggtggttagaacacggtgtgaatcgtggcgtcacgaaacgctcggttatgactttggtgtatgggagcaaagagtttggattccgcgatcaagtgctgagtgacaccattcaaccggcgatcgataacggcaaaggtgacatgtttctgaatccgaatcaggctgctggttacatggcgaaactgatctggaacgcagtgtccgggaccgtagtcgcagcagttgaggcgatgaactggctgaaaagtgcggcgaaattacttgctgctgaagtgaaggatcctaagacggatacagttctgcgtggccgctgcgcagtacattgggtgactcccgacggcttccctgtgtggcaggaatacaagaagcctattcagacgcgcttgaacctgatgttcctcggtcagttccgcttacagcctaccattaacaccaacaaagatagcgagattgatgcacacaaacaggagtctggtatcgctcctaactttgtacacagccaagacggtaaccaccttcgtatgactgtagtgtgggcacacgagaagtacggaatcgaatcttttgcactgattcacgactccttcggtaccattccggctgacgctgcgaacctgttcaaagcagtgcgcgaaactatggtttcgacatatgagtcttgtgatgtactggctgatttctacgaccagttcgctgaccagttgcacgagtctcaattggacaaaatgccagcacttccggctaaaggtaacttgaacctccgtgacatcttaaaatcggacttcgcgttcgcg

SEQ ID NO: 960 - protein, 890 aa, synthetic construct
  REGION 1..890: note = Variant of RNA polymerase
MHHHHHHMNTINIAKNDFSDIELAAIPFNTLADHYGERLAREQLALEHESYEMGEARFRKMFERQLKAGEVADNAAAKPLITTLLPKMIARINDWFEEVKAKRGKRPTAFQFLQEIKPEAVAYITIKTTLACLTSADNTTVQAVASAIGRAIEDEARFGRIRDLEAKHFKKNVEEQLNKRVGHVYKKAFMQVVEHDMLSKGLLGGEAWSSWHKEDSIHVGVRCIEMLIESTGMVSLHRQNAGVVGQDSETIELAPEYAEAIATRAGALAGISPMFQPCVVPPKPWTGITGGGYWAAGRKPLQLVRTRSLAALRRYEEVSMPEVIKAVNIAQNTAWRINKKVLDVANTITQWQHCPVADVPAMDRGEMPARPLDIDTNEIALKAWKKEASAFYRKDKARVSRRLSMEFMLSQANKFANYEAIWFPQNMDWRGRVYAVPMFNPQGNDMTKGLLTFAQEKPIGEDGFYWLKIHGANTAGVDKVPFPQRIKFVEDNHTNIMECAKAPLENTWWAEQDSPFCFLAFCFEYAGVINSGLSYNCSLPLAFDGSCSGLQHFSAMLRDEIGGKAVNLLPSAEYQDIYRIVSDKVNEMLKQDLINGTSTTVETVTDKKTGEITQRTKYGTKVMAQWWLEHGVNRGVTKRSVMTLVYGSKEFGFRDQVLSDTIQPAIDNGKGDMFLNPNQAAGYMAKLIWNAVSGTVVAAVEAMNWLKSAAKLLAAEVKDPKTDTVLRGRCAVHWVTPDGFPVWQEYKKPIQTRLNLMFLGQFRLQPTINTNKDSEIDAHKQESGIAPNFVHSQDGNHLRMTVVWAHEKYGIESFALIHDSFGTIPADAANLFKAVRETMVSTYESCDVLADFYDQFADQLHESQLDKMPALPAKGNLNLRDILKSDFAFA

SEQ ID NO: 961 - DNA, 2670 bp, synthetic construct
  misc_feature 1..2670: note = Variant of RNA polymerase
  source 1..2670: mol_type = other DNA
atgcaccatcaccatcaccatatgaacacgattaacattgctaagaacgacttctctgacatcgaactggctgctatcccgttcaacactctggctgaccattacggtgagcgtttagctcgcgaacagttggcccttgagcatgagtcttacgagatgggtgaagcacgcttccgcaagatgtttgagcgtcaacttaaagctggtgaggttgcggataacgctgccgccaagcctctcatcactaccctactccctaagatgattgcacgcatcaacgactggtttgaggaagtgaaagctaagcgcggcaagcgcccgacagccttccagttcctgcaagaaatcaagccggaagccgtagcgtacatcaccattaagaccactctggcttgcctaaccagtgcggacaatacaaccgttcaggctgtagcaagcgcaatcggtcgggccattgaggacgaggctcgcttcggtcgtatccgtgaccttgaagctaagcacttcaagaagaacgttgaggaacaactcaacaagcgcgtagggcacgtcgcgaagaaagcatttatgcaagttgtcgagcacgacatgctctctaagggtctactcggtggcgaggcgtggtcttcgtggcataaggaagactctattcatgtaggagtacgctgcatcgagatgctcattgagtcaaccggaatggttagcttacaccgccaaaatgctggcgtagtaggtcaagactctgagactatcgaactcgcacctgaatacgctgaggctatcgcaacccgtgcaggtgcgctggctggcatctctccgatgttccaaccttgcgtagttcctcctaagccgtggactggcattactggtggtggctattgggctgcggggcgcaaacccctgcagttagtacgtactcgcagtctggcggcgcttcgccgctatgaagaagtgtcgatgccggaggtcatcaaagcagtcaacattgcgcagaatacagcatggcgtattaacaagaaagttctcgacgtagcgaataccatcacccaatggcagcactgtccagtcgcggatgtgcctgcgatggatcgtggcgaaatgccagctcgtccgttggacatcgataccaacgagattgcacttaaagcgtggaagaaagaagcttccgcgttctaccgcaaagacaaagcacgcgttagccgtcgtctgtcaatggagtttatgttatctcaggcgaacaagtttgcgaattataaagcaatctggtttccgcaaaacatggattggcgtgggcgcgtgtacgctgtcccgatgttcaatcctcagggcaacgatatgacgaaaggcctgctgacctttgcgcaggagaaacccattggtgaagacggcttctattggctcaagattcatggcgcaaatacagctggagtggataaagtaccgtttccacaacgcatcaaatttgttgaggataaccatacgaatattatggaatgcgcgaaagcaccgctggaaaacacttggtgggcggaacaggactcgccgttctgttttctggcgttctgctttgagtatgctggcgtcatcaatagtggtctgtcgtacaactgtagcttgcctctggcatttgatggtagttgctccggcctgcaacatttctcagcgatgttacgcgacgaaattggcggcaaagctgtgaatctcctcccatctgcggaataccaggatatttatcgtatcgtcagcgacaaagttaacgagatgctgaaacaagatctgattaacggtacctctaccaccgtggaaacggtgactgataagaagacaggcgaaattacccaacgcacgaaatacgggaccaaagttatggcacagtggtggttagaacacggtgtgaatcgtggcgtcacgaaacgctcggttatgactttggtgtatgggagcaaagagtttggattccgcgatcaagtgctgagtgacaccattcaaccggcgatcgataacggcaaaggtgacatgtttctgaatccgaatcaggctgctggttacatggcgaaactgatctggaacgcagtgtccgggaccgtagtcgcagcagttgaggcgatgaactggctgaaaagtgcggcgaaattacttgctgctgaagtgaaggatcctaagacggatacagttctgcgtggccgctgcgcagtacattgggtgactcccgacggcttccctgtgtggcaggaatacaagaagcctattcagacgcgcttgaacctgatgttcctcggtcagttccgcttacagcctaccattaacaccaacaaagatagcgagattgatgcacacaaacaggagtctggtatcgctcctaactttgtacacagccaagacggtaaccaccttcgtatgactgtagtgtgggcacacgagaagtacggaatcgaatcttttgcactgattcacgactccttcggtaccattccggctgacgctgcgaacctgttcaaagcagtgcgcgaaactatggtttcgacatatgagtcttgtgatgtactggctgatttctacgaccagttcgctgaccagttgcacgagtctcaattggacaaaatgccagcacttccggctaaaggtaacttgaacctccgtgacatcttaaaatcggacttcgcgttcgcg

SEQ ID NO: 962 - protein, 890 aa, synthetic construct
  REGION 1..890: note = Variant of RNA polymerase
MHHHHHHMNTINIAKNDFSDIELAAIPFNTLADHYGERLAREQLALEHESYEMGEARFRKMFERQLKAGEVADNAAAKPLITTLLPKMIARINDWFEEVKAKRGKRPTAFQFLQEIKPEAVAYITIKTTLACLTSADNTTVQAVASAIGRAIEDEARFGRIRDLEAKHFKKNVEEQLNKRVGHVAKKAFMQVVEHDMLSKGLLGGEAWSSWHKEDSIHVGVRCIEMLIESTGMVSLHRQNAGVVGQDSETIELAPEYAEAIATRAGALAGISPMFQPCVVPPKPWTGITGGGYWAAGRKPLQLVRTRSLAALRRYEEVSMPEVIKAVNIAQNTAWRINKKVLDVANTITQWQHCPVADVPAMDRGEMPARPLDIDTNEIALKAWKKEASAFYRKDKARVSRRLSMEFMLSQANKFANYKAIWFPQNMDWRGRVYAVPMFNPQGNDMTKGLLTFAQEKPIGEDGFYWLKIHGANTAGVDKVPFPQRIKFVEDNHTNIMECAKAPLENTWWAEQDSPFCFLAFCFEYAGVINSGLSYNCSLPLAFDGSCSGLQHFSAMLRDEIGGKAVNLLPSAEYQDIYRIVSDKVNEMLKQDLINGTSTTVETVTDKKTGEITQRTKYGTKVMAQWWLEHGVNRGVTKRSVMTLVYGSKEFGFRDQVLSDTIQPAIDNGKGDMFLNPNQAAGYMAKLIWNAVSGTVVAAVEAMNWLKSAAKLLAAEVKDPKTDTVLRGRCAVHWVTPDGFPVWQEYKKPIQTRLNLMFLGQFRLQPTINTNKDSEIDAHKQESGIAPNFVHSQDGNHLRMTVVWAHEKYGIESFALIHDSFGTIPADAANLFKAVRETMVSTYESCDVLADFYDQFADQLHESQLDKMPALPAKGNLNLRDILKSDFAFA

SEQ ID NO: 963 - DNA, 2670 bp, synthetic construct
  misc_feature 1..2670: note = Variant of RNA polymerase
  source 1..2670: mol_type = other DNA
atgcaccatcaccatcaccatatgaacacgattaacattgctaagaacgacttctctgacatcgaactggctgctatcccgttcaacactctggctgaccattacggtgagcgtttagctcgcgaacagttggcccttgagcatgagtcttacgagatgggtgaagcacgcttccgcaagatgtttgagcgtcaacttaaagctggtgaggttgcggataacgctgccgccaagcctctcatcactaccctactccctaagatgattgcacgcatcaacgactggtttgaggaagtgaaagctaagcgcggcaagcgcccgacagccttccagttcctgcaagaaatcaagccggaagccgtagcgtacatcaccattaagaccactctggcttgcctaaccagtgcggacaatacaaccgttcaggctgtagcaagcgcaatcggtcgggccattgaggacgaggctcgcttcggtcgtatccgtgaccttgaagctaagcacgtcaagaaaaacgttgaggaacaactcaacaagcgcgtagggcacgtctacaagaaagcatttatgcaagttgtcgagcacgacatgctctctaagggtctactcggtggcgaggcgtggtcttcgtggcataaggaagactctattcatgtaggagtacgctgcatcgagatgctcattgagtcaaccggaatggttagcttacaccgccaaaatgctggcgtagtaggtcaagactctgagactatcgaactcgcacctgaatacgctgaggctatcgcaacccgtgcaggtgcgctggctggcatctctccgatgttccaaccttgcgtagttcctcctaagccgtggactggcattactggtggtggctattgggctgcggggcgcaaacccctgcagttagtacgtactcgcagtctggcggcgcttcgccgctatgaagaagtgtcgatgccggaggtcatcaaagcagtcaacattgcgcagaatacagcatggcgtattaacaagaaagttctcgacgtagcgaataccatcacccaatggcagcactgtccagtcgcggatgtgcctgcgatggatcgtggcgaaatgccagctcgtccgttggacatcgataccaacgagattgcacttaaagcgtggaagaaagaagcttccgcgttctaccgcaaagacaaagcacgcgttagccgtcgtctgtcaatggagtttatgttatctcaggcgaacaagtttgcgaatgaggtggcaatctggtttccgcaaaacatggattggcgtgggcgcgtgtacgctgtcccgatgttcaatcctcagggcaacgatatgacgaaaggcctgctgacctttgcgcaggagaaacccattggtgaagacggcttctattggctcaagattcatggcgcaaatacagctggagtggataaagtaccgtttccacaacgcatcaaatttgttgaggataaccatacgaatattatggaatgcgcgaaagcaccgctggaaaacacttggtgggcggaacaggactcgccgttctgttttctggcgttctgctttgagtatgctggcgtcatcaatagtggtctgtcgtacaactgtagcttgcctctggcatttgatggtagttgctccggcctgcaacatttctcagcgatgttacgcgacgaaattggcggcaaagctgtgaatctcctcccatctgcggaataccaggatatttatcgtatcgtcagcgacaaagttaacgagatgctgaaacaagatctgattaacggtacctctaccaccgtggaaacggtgactgataagaagacaggcgaaattacccaacgcacgaaatacgggaccaaagtaatggcacagtggtggttagaacacggtgtgaatcgtggcgtcacgaaacgctcggttatgactttggtgtatgggagcaaagagtttggattccgcgatcaagtgctgagtgacaccattcaaccggcgatcgataacggcaaaggtgacatgtttctgaatccgaatcaggctgctggttacatggcgaaactgatctggaacgcagtgtccgggaccgtagtcgcagcagttgaggcgatgaactggctgaaaagtgcggcgaaattacttgctgctgaagtgaaggatcctaagacggatacagttctgcgtggccgctgcgcagtacattgggtgactcccgacggcttccctgtgtggcaggaatacaagaagcctattcagacgcgcttgaacctgatgttcctcggtcagttccgcttacagcctaccattaacaccaacaaagatagcgagattgatgcacacaaacaggagtctggtatcgctcctaactttgtacacagccaagacggtaaccaccttcgtatgactgtagtgtgggcacacgagaagtacggaatcgaatcttttgcactgattcacgactccttcggtaccattccggctgacgctgcgaacctgttcaaagcagtgcgcgaaactttcgttagcacatatgagtcttgtgatgtactggctgatttctacgaccagttcgctgaccagttgcacgagtctcaactggacaaaatgccagcacttccggctaaaggtaacttgaacctccgtgacatcttaaaatcggacttcgcgttcgcg

SEQ ID NO: 964 - protein, 890 aa, synthetic construct
  REGION 1..890: note = Variant of RNA polymerase
MHHHHHHMNTINIAKNDFSDIELAAIPFNTLADHYGERLAREQLALEHESYEMGEARFRKMFERQLKAGEVADNAAAKPLITTLLPKMIARINDWFEEVKAKRGKRPTAFQFLQEIKPEAVAYITIKTTLACLTSADNTTVQAVASAIGRAIEDEARFGRIRDLEAKHVKKNVEEQLNKRVGHVYKKAFMQVVEHDMLSKGLLGGEAWSSWHKEDSIHVGVRCIEMLIESTGMVSLHRQNAGVVGQDSETIELAPEYAEAIATRAGALAGISPMFQPCVVPPKPWTGITGGGYWAAGRKPLQLVRTRSLAALRRYEEVSMPEVIKAVNIAQNTAWRINKKVLDVANTITQWQHCPVADVPAMDRGEMPARPLDIDTNEIALKAWKKEASAFYRKDKARVSRRLSMEFMLSQANKFANEVAIWFPQNMDWRGRVYAVPMFNPQGNDMTKGLLTFAQEKPIGEDGFYWLKIHGANTAGVDKVPFPQRIKFVEDNHTNIMECAKAPLENTWWAEQDSPFCFLAFCFEYAGVINSGLSYNCSLPLAFDGSCSGLQHFSAMLRDEIGGKAVNLLPSAEYQDIYRIVSDKVNEMLKQDLINGTSTTVETVTDKKTGEITQRTKYGTKVMAQWWLEHGVNRGVTKRSVMTLVYGSKEFGFRDQVLSDTIQPAIDNGKGDMFLNPNQAAGYMAKLIWNAVSGTVVAAVEAMNWLKSAAKLLAAEVKDPKTDTVLRGRCAVHWVTPDGFPVWQEYKKPIQTRLNLMFLGQFRLQPTINTNKDSEIDAHKQESGIAPNFVHSQDGNHLRMTVVWAHEKYGIESFALIHDSFGTIPADAANLFKAVRETFVSTYESCDVLADFYDQFADQLHESQLDKMPALPAKGNLNLRDILKSDFAFA

SEQ ID NO: 965 - DNA, 2670 bp, synthetic construct
  misc_feature 1..2670: note = Variant of RNA polymerase
  source 1..2670: mol_type = other DNA
atgcaccatcaccatcaccatatgaacacgattaacattgctaagaacgacttctctgacatcgaactggctgctatcccgttcaacactctggctgaccattacggtgagcgtttagctcgcgaacagttggcccttgagcatgagtcttacgagatgggtgaagcacgcttccgcaagatgtttgagcgtcaacttaaagctggtgaggttgcggataacgctgccgccaagcctctcatcactaccctactccctaagatgattgcacgcatcaacgactggtttgaggaagtgaaagctaagcgcggcaagcgcccgacagccttccagttcctgcaagaaatcaagccggaagccgtagcgtacatcaccattaagaccactctggcttgcctaaccagtgcggacaatacaaccgttcaggctgtagcaagcgcaatcggtcgggccattgaggacgaggctcgcttcggtcgtatccgtgaccttgaagctaagcacttcaagaagaacgttgaggaacaactcaacaagcgcgtagggcacgtgtacaagaaagcatttatgcaagttgtcgagcacgacatgctctctaagggtctactcggtggcgaggcgtggtcttcgtggcataaggaagactctattcatgtaggagtacgctgcatcgagatgctcattgagtcaaccggaatggttagcttacaccgccaaaatgctggcgtagtaggtcaagactctgagactatcgaactcgcacctgaatacgctgaggctatcgcaacccgtgcaggtgcgctggctggcatctctccgatgttccaaccttgcgtagttcctcctaagccgtggactggcattactggtggtggctattgggctgcggggcgcaaacccctgcagttagtacgtactcgcagtctggcggcgcttcgccgctatgaagaagtgtcgatgccggaggtcatcaaagcagtcaacattgcgcagaatacagcatggcgtattaacaagaaagttctcgacgtagcgaataccatcacccaatggcagcactgtccagtcgcggatgtgcctgcgatggatcgtggcgaaatgccagctcgtccgttggacatcgataccaacgagattgcacttaaagcgtggaagaaagaagcttccgcgttctaccgcaaagacaaagcacgcgttagccgtcgtctgtcaatggagtttatgttatctcaggcgaacaagtttgcgaattatgaggcaatctggtttccgcaaaacatggattggcgtgggcgcgtgtacgctgtcccgatgttcaatcctcagggcaacgatatgacgaaaggcctgctgacctttgcgcaggagaaacccattggtgaagacggcttctattggctcaagattcatggcgcaaatacagctggagtggataaagtaccgtttccacaacgcatcaaatttgttgaggataaccatacgaatattatggaatgcgcgaaagcaccgctggaaaacacttggtgggcggaacaggactcgccgttctgttttctggcgttctgctttgagtatgctggcgtcatcaatagtggtctgtcgtacaactgtagcttgcctctggcatttgatggtagttgctccggcctgcaacatttctcagcgatgttacgcgacgaaattggcggcaaagctgtgaatctcctcccatctgcggaataccaggatatttatcgtatcgtcagcgacaaagttaacgagatgctgaaacaagatctgattaacggtacctctaccaccgtggaaacggtgactgataagaagacaggcgaaattacccaacgcacgaaatacgggaccaaagttatggcacagtggtggttagaacacggtgtgaatcgtggcgtcacgaaacgctcggttatgactttggtgtatgggagcaaagagtttggattccgcgatcaagtgctgagtgacaccattcaaccggcgatcgataacggcaaaggtgacatgtttctgaatccgaatcaggctgctggttacatggcgaaactgatctggaacgcagtgtccgggaccgtagtcgcagcagttgaggcgatgaactggctgaaaagtgcggcgaaattacttgctgctgaagtgaaggatcctaagacggatacagttctgcgtggccgctgcgcagtacattgggtgactcccgacggcttccctgtgtggcaggaatacaagaagcctattcagacgcgcttgaacctgatgttcctcggtcagttccgcttacagcctaccattaacaccaacaaagatagcgagattgatgcacacaaacaggagtctggtatcgctcctaactttgtacacagccaagacggtaaccaccttcgtatgactgtagtgtgggcacacgagaagtacggaatcgaatcttttgcactgattcacgactccttcggtaccattccggctgacgctgcgaacctgttcaaagcagtgcgcgaaactatggttgacacatatgagtcttgtgatgtactggctgatttctacgaccagttcgctgaccagttgcacgagtctcaattggacaaaatgccagcacttccggctaaaggtaacttgaacctccgtgacatcttaaaatcggacttcgcgttcgcg

SEQ ID NO: 966 - protein, 890 aa, synthetic construct
  REGION 1..890: note = Variant of RNA polymerase
MHHHHHHMNTINIAKNDFSDIELAAIPFNTLADHYGERLAREQLALEHESYEMGEARFRKMFERQLKAGEVADNAAAKPLITTLLPKMIARINDWFEEVKAKRGKRPTAFQFLQEIKPEAVAYITIKTTLACLTSADNTTVQAVASAIGRAIEDEARFGRIRDLEAKHFKKNVEEQLNKRVGHVYKKAFMQVVEHDMLSKGLLGGEAWSSWHKEDSIHVGVRCIEMLIESTGMVSLHRQNAGVVGQDSETIELAPEYAEAIATRAGALAGISPMFQPCVVPPKPWTGITGGGYWAAGRKPLQLVRTRSLAALRRYEEVSMPEVIKAVNIAQNTAWRINKKVLDVANTITQWQHCPVADVPAMDRGEMPARPLDIDTNEIALKAWKKEASAFYRKDKARVSRRLSMEFMLSQANKFANYEAIWFPQNMDWRGRVYAVPMFNPQGNDMTKGLLTFAQEKPIGEDGFYWLKIHGANTAGVDKVPFPQRIKFVEDNHTNIMECAKAPLENTWWAEQDSPFCFLAFCFEYAGVINSGLSYNCSLPLAFDGSCSGLQHFSAMLRDEIGGKAVNLLPSAEYQDIYRIVSDKVNEMLKQDLINGTSTTVETVTDKKTGEITQRTKYGTKVMAQWWLEHGVNRGVTKRSVMTLVYGSKEFGFRDQVLSDTIQPAIDNGKGDMFLNPNQAAGYMAKLIWNAVSGTVVAAVEAMNWLKSAAKLLAAEVKDPKTDTVLRGRCAVHWVTPDGFPVWQEYKKPIQTRLNLMFLGQFRLQPTINTNKDSEIDAHKQESGIAPNFVHSQDGNHLRMTVVWAHEKYGIESFALIHDSFGTIPADAANLFKAVRETMVDTYESCDVLADFYDQFADQLHESQLDKMPALPAKGNLNLRDILKSDFAFA

SEQ ID NO: 967 - DNA, 2670 bp, synthetic construct
  misc_feature 1..2670: note = Variant of RNA polymerase
  source 1..2670: mol_type = other DNA
atgcaccatcaccatcaccatatgaacacgattaacattgctaagaacgacttctctgacatcgaactggctgctatcccgttcaacactctggctgaccattacggtgagcgtttagctcgcgaacagttggcccttgagcatgagtcttacgagatgggtgaagcacgcttccgcaagatgtttgagcgtcaacttaaagctggtgaggttgcggataacgctgccgccaagcctctcatcactaccctactccctaagatgattgcacgcatcaacgactggtttgaggaagtgaaagctaagcgcggcaagcgcccgacagccttccagttcctgcaagaaatcaagccggaagccgtagcgtacatcaccattaagaccactctggcttgcctaaccagtgcggacaatacaaccgttcaggctgtagcaagcgcaatcggtcgggccattgaggacgaggctcgcttcggtcgtatccgtgaccttgaagctaagcacttcaagaagaacgttgaggaacaactcaacaagcgcgtagggcacgtctacaagaaagcatttatgcaagttgtcgagcacgacatgctctctaagggtctactcggtggcgaggcgtggtcttcgtggcataaggaagactctattcatgtaggagtacgctgcatcgagatgctcattgagtcaaccggaatggttagcttacaccgccaaaatgctggcgtagtaggtcaagactctgagactatcgaactcgcacctgaatacgctgaggctatcgcaacccgtgcaggtgcgctggctggcatctctccgatgttccaaccttgcgtagttcctcctaagccgtggactggcattactggtggtggctattgggctgcggggcgcaaacccctgcagttagtacgtactcgcagtctggcggcgcttcgccgctatgaagaagtgtcgatgccggaggtcatcaaagcagtcaacattgcgcagaatacagcatggcgtattaacaagaaagttctcgacgtagcgaataccatcacccaatggcagcactgtccagtcgcggatgtgcctgcgatggatcgtggcgaaatgccagctcgtccgttggacatcgataccaacgagattgcacttaaagcgtggaagaaagaagcttccgcgttctaccgcaaagacaaagcacgcgttagccgtcgtctgtcaatggagtttatgttatctcaggcgaacaagtttgcgaattataaagtgatctggtttccgcaaaacatggattggcgtgggcgcgtgtacgctgtcccgatgttcaatcctcagggcaacgatatgacgaaaggcctgctgacctttgcgcaggagaaacccattggtgaagacggcttctattggctcaagattcatggcgcaaatacagctggagtggataaagtaccgtttccacaacgcatcaaatttgttgaggataaccatacgaatattatggaatgcgcgaaagcaccgctggaaaacacttggtgggcggaacaggactcgccgttctgttttctggcgttctgctttgagtatgctggcgtcatcaatagtggtctgtcgtacaactgtagcttgcctctggcatttgatggtagttgctccggcctgcaacatttctcagcgatgttacgcgacgaaattggcggcaaagctgtgaatctcctcccatctgcggaataccaggatatttatcgtatcgtcagcgacaaagttaacgagatgctgaaacaagatctgattaacggtacctctaccaccgtggaaacggtgactgataagaagacaggcgaaattacccaacgcacgaaatacgggaccaaagttatggcacagtggtggttagaacacggtgtgaatcgtggcgtcacgaaacgctcggttatgactttggtgtatgggagcaaagagtttggattccgcgatcaagtgctgagtgacaccattcaaccggcgatcgataacggcaaaggtgacatgtttctgaatccgaatcaggctgctggttacatggcgaaactgatctggaacgcagtgtccgggaccgtagtcgcagcagttgaggcgatgaactggctgaaaagtgcggcgaaattacttgctgctgaagtgaaggatcctaagacggatacagttctgcgtggccgctgcgcagtacattgggtgactcccgacggcttccctgtgtggcaggaatacaagaagcctattcagacgcgcttgaacctgatgttcctcggtcagttccgcttacagcctaccattaacaccaacaaagatagcgagattgatgcacacaaacaggagtctggtatcgctcctaactttgtacacagccaagacggtaaccaccttcgtatgactgtagtgtgggcacacgagaagtacggaatcgaatcttttgcactgattcacgactccttcggtaccattccggctgacgctgcgaacctgttcaaagcagtgcgcgaaactatggtttcgacatatgagtcttgtgatgtactggctgatttctacgaccagttcgctgaccagttgcacgagtctcaattggacaaaatgccagcacttccggctaaaggtaacttgaacctccgtgacatcttaaaatcggacttcgcgttcgcg

SEQ ID NO: 968 - protein, 890 aa, synthetic construct
  REGION 1..890: note = Variant of RNA polymerase
MHHHHHHMNTINIAKNDFSDIELAAIPFNTLADHYGERLAREQLALEHESYEMGEARFRKMFERQLKAGEVADNAAAKPLITTLLPKMIARINDWFEEVKAKRGKRPTAFQFLQEIKPEAVAYITIKTTLACLTSADNTTVQAVASAIGRAIEDEARFGRIRDLEAKHFKKNVEEQLNKRVGHVYKKAFMQVVEHDMLSKGLLGGEAWSSWHKEDSIHVGVRCIEMLIESTGMVSLHRQNAGVVGQDSETIELAPEYAEAIATRAGALAGISPMFQPCVVPPKPWTGITGGGYWAAGRKPLQLVRTRSLAALRRYEEVSMPEVIKAVNIAQNTAWRINKKVLDVANTITQWQHCPVADVPAMDRGEMPARPLDIDTNEIALKAWKKEASAFYRKDKARVSRRLSMEFMLSQANKFANYKVIWFPQNMDWRGRVYAVPMFNPQGNDMTKGLLTFAQEKPIGEDGFYWLKIHGANTAGVDKVPFPQRIKFVEDNHTNIMECAKAPLENTWWAEQDSPFCFLAFCFEYAGVINSGLSYNCSLPLAFDGSCSGLQHFSAMLRDEIGGKAVNLLPSAEYQDIYRIVSDKVNEMLKQDLINGTSTTVETVTDKKTGEITQRTKYGTKVMAQWWLEHGVNRGVTKRSVMTLVYGSKEFGFRDQVLSDTIQPAIDNGKGDMFLNPNQAAGYMAKLIWNAVSGTVVAAVEAMNWLKSAAKLLAAEVKDPKTDTVLRGRCAVHWVTPDGFPVWQEYKKPIQTRLNLMFLGQFRLQPTINTNKDSEIDAHKQESGIAPNFVHSQDGNHLRMTVVWAHEKYGIESFALIHDSFGTIPADAANLFKAVRETMVSTYESCDVLADFYDQFADQLHESQLDKMPALPAKGNLNLRDILKSDFAFA

SEQ ID NO: 969 - DNA, 2670 bp, synthetic construct
  misc_feature 1..2670: note = Variant of RNA polymerase
  source 1..2670: mol_type = other DNA
atgcaccatcaccatcaccatatgaacacgattaacattgctaagaacgacttctctgacatcgaactggctgctatcccgttcaacactctggctgaccattacggtgagcgtttagctcgcgaacagttggcccttgagcatgagtcttacgagatgggtgaagcacgcttccgcaagatgtttgagcgtcaacttaaagctggtgaggttgcggataacgctgccgccaagcctctcatcactaccctactccctaagatgattgcacgcatcaacgactggtttgaggaagtgaaagctaagcgcggcaagcgcccgacagccttccagttcctgcaagaaatcaagccggaagccgtagcgtacatcaccattaagaccactctggcttgcctaaccagtgcggacaatacaaccgttcaggctgtagcaagcgcaatcggtcgggccattgaggacgaggctcgcttcggtcgtatccgtgaccttgaagctaagcacttcaagaagaacgttgaggaacaactcaacaagcgcgtagggcacgtctacaagaaagcatttatgcaagttgtcgagcacgacatgctctctaagggtctactcggtggcgaggcgtggtcttcgtggcataaggaagactctattcatgtaggagtacgctgcatcgagatgctcattgagtcaaccggaatggttagcttacaccgccaaaatgctggcgtagtaggtcaagactctgagactatcgaactcgcacctgaatacgctgaggctatcgcaacccgtgcaggtgcgctggctggcatctctccgatgttccaaccttgcgtagttcctcctaagccgtggactggcattactggtggtggctattgggctgcggggcgcaaacccctgcagttagtacgtactcgcagtctggcggcgcttcgccgctatgaagaagtgtcgatgccggaggtcatcaaagcagtcaacattgcgcagaatacagcatggcgtattaacaagaaagttctcgacgtagcgaataccatcacccaatggcagcactgtccagtcgcggatgtgcctgcgatggatcgtggcgaaatgccagctcgtccgttggacatcgataccaacgagattgcacttaaagcgtggaagaaagaagcttccgcgttctaccgcaaagacaaagcacgcgttagccgtcgtctgtcaatggagtttatgttatctcaggcgaacaagtttgcgaattataaagcaatctggtttccgcaaaacatggattggcgtgggcgcgtgtacgctgtcccgatgttcaatcctcagggcaacgatatgacgaaaggcctgctgacctttgcgcaggagaaacccattggtgaagacggcttctattggctcaagattcatggcgcaaatacagctggagtggataaagtaccgtttccacaacgcatcaaatttgttgaggataaccatacgggtattatggaatgcgcgaaagcaccgctggaaaacacttggtgggcggaacaggactcgccgttctgttttctggcgttctgctttgagtatgctggcgtcatcaatagtggtctgtcgtacaactgtagcttgcctctggcatttgatggtagttgctccggcctgcaacatttctcagcgatgttacgcgacgaaattggcggcaaagctgtgaatctcctcccatctgcggaataccaggatatttatcgtatcgtcagcgacaaagttaacgagatgctgaaacaagatctgattaacggtacctctaccaccgtggaaacggtgactgataagaagacaggcgaaattacccaacgcacgaaatacgggaccaaagttatggcacagtggtggttagaacacggtgtgaatcgtggcgtcacgaaacgctcggttatgactttggtgtatgggagcaaagagtttggattccgcgatcaagtgctgagtgacaccattcaaccggcgatcgataacggcaaaggtgacatgtttctgaatccgaatcaggctgctggttacatggcgaaactgatctggaacgcagtgtccgggaccgtagtcgcagcagttgaggcgatgaactggctgaaaagtgcggcgaaattacttgctgctgaagtgaaggatcctaagacggatacagttctgcgtggccgctgcgcagtacattgggtgactcccgacggcttccctgtgtggcaggaatacaagaagcctattcagacgcgcttgaacctgatgttcctcggtcagttccgcttacagcctaccattaacaccaacaaagatagcgagattgatgcacacaaacaggagtctggtatcgctcctaactttgtacacagccaagacggtaaccaccttcgtatgactgtagtgtgggcacacgagaagtacggaatcgaatcttttgcactgattcacgactccttcggtaccattccggctgacgctgcgaacctgttcaaagcagtgcgcgaaactatggtttcgacatatgagtcttgtgatgtactggctgatttctacgaccagttcgctgaccagttgcacgagtctcaattggacaaaatgccagcacttccggctaaaggtaacttgaacctccgtgacatcttaaaatcggacttcgcgttcgcg

SEQ ID NO: 970 - protein, 890 aa, synthetic construct
  REGION 1..890: note = Variant of RNA polymerase
MHHHHHHMNTINIAKNDFSDIELAAIPFNTLADHYGERLAREQLALEHESYEMGEARFRKMFERQLKAGEVADNAAAKPLITTLLPKMIARINDWFEEVKAKRGKRPTAFQFLQEIKPEAVAYITIKTTLACLTSADNTTVQAVASAIGRAIEDEARFGRIRDLEAKHFKKNVEEQLNKRVGHVYKKAFMQVVEHDMLSKGLLGGEAWSSWHKEDSIHVGVRCIEMLIESTGMVSLHRQNAGVVGQDSETIELAPEYAEAIATRAGALAGISPMFQPCVVPPKPWTGITGGGYWAAGRKPLQLVRTRSLAALRRYEEVSMPEVIKAVNIAQNTAWRINKKVLDVANTITQWQHCPVADVPAMDRGEMPARPLDIDTNEIALKAWKKEASAFYRKDKARVSRRLSMEFMLSQANKFANYKAIWFPQNMDWRGRVYAVPMFNPQGNDMTKGLLTFAQEKPIGEDGFYWLKIHGANTAGVDKVPFPQRIKFVEDNHTGIMECAKAPLENTWWAEQDSPFCFLAFCFEYAGVINSGLSYNCSLPLAFDGSCSGLQHFSAMLRDEIGGKAVNLLPSAEYQDIYRIVSDKVNEMLKQDLINGTSTTVETVTDKKTGEITQRTKYGTKVMAQWWLEHGVNRGVTKRSVMTLVYGSKEFGFRDQVLSDTIQPAIDNGKGDMFLNPNQAAGYMAKLIWNAVSGTVVAAVEAMNWLKSAAKLLAAEVKDPKTDTVLRGRCAVHWVTPDGFPVWQEYKKPIQTRLNLMFLGQFRLQPTINTNKDSEIDAHKQESGIAPNFVHSQDGNHLRMTVVWAHEKYGIESFALIHDSFGTIPADAANLFKAVRETMVSTYESCDVLADFYDQFADQLHESQLDKMPALPAKGNLNLRDILKSDFAFA

SEQ ID NO: 971 - DNA, 2670 bp, synthetic construct
  misc_feature 1..2670: note = Variant of RNA polymerase
  source 1..2670: mol_type = other DNA
atgcaccatcaccatcaccatatgaacacgattaacattgctaagaacgacttctctgacatcgaactggctgctatcccgttcaacactctggctgaccattacggtgagcgtttagctcgcgaacagttggcccttgagcatgagtcttacgagatgggtgaagcacgcttccgcaagatgtttgagcgtcaacttaaagctggtgaggttgcggataacgctgccgccaagcctctcatcactaccctactccctaagatgattgcacgcatcaacgactggtttgaggaagtgaaagctaagcgcggcaagcgcccgacagccttccagttcctgcaagaaatcaagccggaagccgtagcgtacatcaccattaagaccactctggcttgcctaaccagtgcggacaatacaaccgttcaggctgtagcaagcgcaatcggtcgggccattgaggacgaggctcgcttcggtcgtatccgtgaccttgaagctaagcacttcaagaagaacgttgaggaacaactcaacaagaaggtagggcacgtctacaagaaagcatttatgcaagttgtcgagcacgacatgctctctaagggtctactcggtggcgaggcgtggtcttcgtggcataaggaagactctattcatgtaggagtacgctgcatcgagatgctcattgagtcaaccggaatggttagcttacaccgccaaaatgctggcgtagtaggtcaagactctgagactatcgaactcgcacctgaatacgctgaggctatcgcaacccgtgcaggtgcgctggctggcatctctccgatgttccaaccttgcgtagttcctcctaagccgtggactggcattactggtggtggctattgggctgcggggcgcaaacccctgcagttagtacgtactcgcagtctggcggcgcttcgccgctatgaagaagtgtcgatgccggaggtcatcaaagcagtcaacattgcgcagaatacagcatggcgtattaacaagaaagttctcgacgtagcgaataccatcacccaatggcagcactgtccagtcgcggatgtgcctgcgatggatcgtggcgaaatgccagctcgtccgttggacatcgataccaacgagattgcacttaaagcgtggaagaaagaagcttccgcgttctaccgcaaagacaaagcacgcgttagccgtcgtctgtcaatggagtttatgttatctcaggcgaacaagtttgcgaattataaagcaatctggtttccgcaaaacatggattggcgtgggcgcgtgtacgctgtcccgatgttcaatcctcagggcaacgatatgacgaaaggcctgctgacctttgcgcaggagaaacccattggtgaagacggcttctattggctcaagattcatggcgcaaatacagctggagtggataaagtaccgtttccacaacgcatcaaatttgttgaggataaccatacgaatattatggaatgcgcgaaagcaccgctggaaaacacttggtgggcggaacaggactcgccgttctgttttctggcgttctgctttgagtatgctggcgtcatcaatagtggtctgtcgtacaactgtagcttgcctctggcatttgatggtagttgctccggcctgcaacatttctcagcgatgttacgcgacgaaattggcggcaaagctgtgaatctcctcccatctgcggaataccaggatatttatcgtatcgtcagcgacaaagttaacgagatgctgaaacaagatctgattaacggtacctctaccaccgtggaaacggtgactgataagaagacaggcgaaattacccaacgcacgaaatacgggaccaaagttatggcacagtggtggttagaacacggtgtgaatcgtggcgtcacgaaacgctcggttatgactttggtgtatgggagcaaagagtttggattccgcgatcaagtgctgagtgacaccattcaaccggcgatcgataacggcaaaggtgacatgtttctgaatccgaatcaggctgctggttacatggcgaaactgatctggaacgcagtgtccgggaccgtagtcgcagcagttgaggcgatgaactggctgaaaagtgcggcgaaattacttgctgctgaagtgaaggatcctaagacggatacagttctgcgtggccgctgcgcagtacattgggtgactcccgacggcttccctgtgtggcaggaatacaagaagcctattcagacgcgcttgaacctgatgttcctcggtcagttccgcttacagcctaccattaacaccaacaaagatagcgagattgatgcacacaaacaggagtctggtatcgctcctaactttgtacacagccaagacggtaaccaccttcgtatgactgtagtgtgggcacacgagaagtacggaatcgaatcttttgcactgattcacgactccttcggtaccattccggctgacgctgcgaacctgttcaaagcagtgcgcgaaactatggtttcgacatatgagtcttgtgatgtactggctgatttctacgaccagttcgctgaccagttgcacgagtctcaattggacaaaatgccagcacttccggctaaaggtaacttgaacctccgtgacatcttaaaatcggacttcgcgttcgcg

SEQ ID NO: 972 - protein, 890 aa, synthetic construct
  REGION 1..890: note = Variant of RNA polymerase
MHHHHHHMNTINIAKNDFSDIELAAIPFNTLADHYGERLAREQLALEHESYEMGEARFRKMFERQLKAGEVADNAAAKPLITTLLPKMIARINDWFEEVKAKRGKRPTAFQFLQEIKPEAVAYITIKTTLACLTSADNTTVQAVASAIGRAIEDEARFGRIRDLEAKHFKKNVEEQLNKKVGHVYKKAFMQVVEHDMLSKGLLGGEAWSSWHKEDSIHVGVRCIEMLIESTGMVSLHRQNAGVVGQDSETIELAPEYAEAIATRAGALAGISPMFQPCVVPPKPWTGITGGGYWAAGRKPLQLVRTRSLAALRRYEEVSMPEVIKAVNIAQNTAWRINKKVLDVANTITQWQHCPVADVPAMDRGEMPARPLDIDTNEIALKAWKKEASAFYRKDKARVSRRLSMEFMLSQANKFANYKAIWFPQNMDWRGRVYAVPMFNPQGNDMTKGLLTFAQEKPIGEDGFYWLKIHGANTAGVDKVPFPQRIKFVEDNHTNIMECAKAPLENTWWAEQDSPFCFLAFCFEYAGVINSGLSYNCSLPLAFDGSCSGLQHFSAMLRDEIGGKAVNLLPSAEYQDIYRIVSDKVNEMLKQDLINGTSTTVETVTDKKTGEITQRTKYGTKVMAQWWLEHGVNRGVTKRSVMTLVYGSKEFGFRDQVLSDTIQPAIDNGKGDMFLNPNQAAGYMAKLIWNAVSGTVVAAVEAMNWLKSAAKLLAAEVKDPKTDTVLRGRCAVHWVTPDGFPVWQEYKKPIQTRLNLMFLGQFRLQPTINTNKDSEIDAHKQESGIAPNFVHSQDGNHLRMTVVWAHEKYGIESFALIHDSFGTIPADAANLFKAVRETMVSTYESCDVLADFYDQFADQLHESQLDKMPALPAKGNLNLRDILKSDFAFA

SEQ ID NO: 973 - DNA, 2670 bp, synthetic construct
  misc_feature 1..2670: note = Variant of RNA polymerase
  source 1..2670: mol_type = other DNA
atgcaccatcaccatcaccatatgaacacgattaacattgctaagaacgacttctctgacatcgaactggctgctatcccgttcaacactctggctgaccattacggtgagcgtttagctcgcgaacagttggcccttgagcatgagtcttacgagatgggtgaagcacgcttccgcaagatgtttgagcgtcaacttaaagctggtgaggttgcggataacgctgccgccaagcctctcatcactaccctactccctaagatgattgcacgcatcaacgactggtttgaggaagtgaaagctaagcgcggcaagcgcccgacagccttccagttcctgcaagaaatcaagccggaagccgtagcgtacatcaccattaagaccactctggcttgcctaaccagtgcggacaatacaaccgttcaggctgtagcaagcgcaatcggtcgggccattgaggacgaggctcgcttcggtcgtatccgtgaccttgaagctaagcacttcaagaagaacgttgaggaacaactcaacaagcgcgtagggcacgtctacaagaaagcatttatgcaagttgtcgagcacgacatgctctctaagggtctactcggtggcgaggcgtggtcttcgtggcataaggaagactctattcatgtaggagtacgctgcatcgagatgctcattgagtcaaccggaatggttagcttacaccgccaaaatgctggcgtagtaggtcaagactctgagactatcgaactcgcacctgaatacgctgaggctatcgcaacccgtgcaggtgcgctggctggcatctctccgatgttccaaccttgcgtagttcctcctaagccgtggactggcattactggtggtggctattgggctgcggggcgcaaacccctgcagttagtacgtactcgcagtctggcggcgcttcgccgctatgaagaagtgtcgatgccggaggtcatcaaagcagtcaacattgcgcagaatacagcatggcgtattaacaagaaagttctcgacgtagcgaataccatcacccaatggcagcactgtccagtcgcggatgtgcctgcgatggatcgtggcgaaatgccagctcgtccgttggacatcgataccaacgagattgcacttaaagcgtggaagaaagaagcttccgcgttctaccgcaaagacaaagcacgcgttagccgtcgtctgtcaatggagtttatgttatctcaggcgaacaagtttggtaattataaagcaatctggtttccgcaaaacatggattggcgtgggcgcgtgtacgctgtcccgatgttcaatcctcagggcaacgatatgacgaaaggcctgctgacctttgcgcaggagaaacccattggtgaagacggcttctattggctcaagattcatggcgcaaatacagctggagtggataaagtaccgtttccacaacgcatcaaatttgttgaggataaccatacgaatattatggaatgcgcgaaagcaccgctggaaaacacttggtgggcggaacaggactcgccgttctgttttctggcgttctgctttgagtatgctggcgtcatcaatagtggtctgtcgtacaactgtagcttgcctctggcatttgatggtagttgctccggcctgcaacatttctcagcgatgttacgcgacgaaattggcggcaaagctgtgaatctcctcccatctgcggaataccaggatatttatcgtatcgtcagcgacaaagttaacgagatgctgaaacaagatctgattaacggtacctctaccaccgtggaaacggtgactgataagaagacaggcgaaattacccaacgcacgaaatacgggaccaaagttatggcacagtggtggttagaacacggtgtgaatcgtggcgtcacgaaacgctcggttatgactttggtgtatgggagcaaagagtttggattccgcgatcaagtgctgagtgacaccattcaaccggcgatcgataacggcaaaggtgacatgtttctgaatccgaatcaggctgctggttacatggcgaaactgatctggaacgcagtgtccgggaccgtagtcgcagcagttgaggcgatgaactggctgaaaagtgcggcgaaattacttgctgctgaagtgaaggatcctaagacggatacagttctgcgtggccgctgcgcagtacattgggtgactcccgacggcttccctgtgtggcaggaatacaagaagcctattcagacgcgcttgaacctgatgttcctcggtcagttccgcttacagcctaccattaacaccaacaaagatagcgagattgatgcacacaaacaggagtctggtatcgctcctaactttgtacacagccaagacggtaaccaccttcgtatgactgtagtgtgggcacacgagaagtacggaatcgaatcttttgcactgattcacgactccttcggtaccattccggctgacgctgcgaacctgttcaaagcagtgcgcgaaactatggtttcgacatatgagtcttgtgatgtactggctgatttctacgaccagttcgctgaccagttgcacgagtctcaattggacaaaatgccagcacttccggctaaaggtaacttgaacctccgtgacatcttaaaatcggacttcgcgttcgcg

SEQ ID NO: 974 - protein, 890 aa, synthetic construct
  REGION 1..890: note = Variant of RNA polymerase
MHHHHHHMNTINIAKNDFSDIELAAIPFNTLADHYGERLAREQLALEHESYEMGEARFRKMFERQLKAGEVADNAAAKPLITTLLPKMIARINDWFEEVKAKRGKRPTAFQFLQEIKPEAVAYITIKTTLACLTSADNTTVQAVASAIGRAIEDEARFGRIRDLEAKHFKKNVEEQLNKRVGHVYKKAFMQVVEHDMLSKGLLGGEAWSSWHKEDSIHVGVRCIEMLIESTGMVSLHRQNAGVVGQDSETIELAPEYAEAIATRAGALAGISPMFQPCVVPPKPWTGITGGGYWAAGRKPLQLVRTRSLAALRRYEEVSMPEVIKAVNIAQNTAWRINKKVLDVANTITQWQHCPVADVPAMDRGEMPARPLDIDTNEIALKAWKKEASAFYRKDKARVSRRLSMEFMLSQANKFGNYKAIWFPQNMDWRGRVYAVPMFNPQGNDMTKGLLTFAQEKPIGEDGFYWLKIHGANTAGVDKVPFPQRIKFVEDNHTNIMECAKAPLENTWWAEQDSPFCFLAFCFEYAGVINSGLSYNCSLPLAFDGSCSGLQHFSAMLRDEIGGKAVNLLPSAEYQDIYRIVSDKVNEMLKQDLINGTSTTVETVTDKKTGEITQRTKYGTKVMAQWWLEHGVNRGVTKRSVMTLVYGSKEFGFRDQVLSDTIQPAIDNGKGDMFLNPNQAAGYMAKLIWNAVSGTVVAAVEAMNWLKSAAKLLAAEVKDPKTDTVLRGRCAVHWVTPDGFPVWQEYKKPIQTRLNLMFLGQFRLQPTINTNKDSEIDAHKQESGIAPNFVHSQDGNHLRMTVVWAHEKYGIESFALIHDSFGTIPADAANLFKAVRETMVSTYESCDVLADFYDQFADQLHESQLDKMPALPAKGNLNLRDILKSDFAFA

SEQ ID NO: 975 - DNA, 2670 bp, synthetic construct
  misc_feature 1..2670: note = Variant of RNA polymerase
  source 1..2670: mol_type = other DNA
atgcaccatcaccatcaccatatgaacacgattaacattgctaagaacgacttctctgacatcgaactggctgctatcccgttcaacactctggctgaccattacggtgagcgtttagctcgcgaacagttggcccttgagcatgagtcttacgagatgggtgaagcacgcttccgcaagatgtttgagcgtcaacttaaagctggtgaggttgcggataacgctgccgccaagcctctcatcactaccctactccctaagatgattgcacgcatcaacgactggtttgaggaagtgaaagctaagcgcggcaagcgcccgacagccttccagttcctgcaagaaatcaagccggaagccgtagcgtacatcaccattaagaccactctggcttgcctaaccagtgcggacaatacaaccgttcaggctgtagcaagcgcaatcggtcgggccattgaggacgaggctcgcttcggtcgtatccgtgaccttgaagctaagcacttcaagaagaacgttgaggaacaactcaacaagcgcgtagggcacgtctacaagaaagcatttatgcaagttgtcgagcacgacatgctctctaagggtctactcggtggcgaggcgtggtcttcgtggcataaggaagactctattcatgtaggagtacgctgcatcgagatgctcattgagtcaaccggaatggttagcttacaccgccaaaatgctggcgtagtaggtcaagactctgagactatcgaactcgcacctgaatacgctgaggctatcgcaacccgtgcaggtgcgctggctggcatctctccgatgttccaaccttgcgtagttcctcctaagccgtggactggcattactggtggtggctattgggctgcggggcgcaaacccctgcagttagtacgtactcgcagtctggcggcgcttcgccgctatgaagaagtgtcgatgccggaggtcatcaaagcagtcaacattgcgcagaatacagcatggcgtattaacaagaaagttctcgacgtagcgaataccatcacccaatggcagcactgtccagtcgcggatgtgcctgcgatggatcgtggcgaaatgccagctcgtccgttggacatcgataccaacgagattgcacttaaagcgtggaagaaagaagcttccgcgttctaccgcaaagacaaagcacgcgttagccgtcgtctgtcaatggagtttatgttatctcaggcgaacaagtttgcgaattataaagcaatctggtttccgcaaaacatggattggcgtgggcgcgtgtacgctgtcccgatgttcaatcctcagggcaacgatatgacgaaaggcctgctgacctttgcgcaggagaaacccattggtgaagacggcttctattggctcaagattcatggcgcaaatacagctggagtggataaagtaccgtttccacaacgcatcaaatttgttgaggataaccatacgaatattatggaatgcgcgaaagcaccgctggaaaacacttggtgggcggaacaggactcgccgttctgttttctggcgttctgctttgagtatgctggcgtcatcaatagtggtctgtcgtacaactgtagcttgcctctggcatttgatggtagttgctccggcctgcaacatttctcagcgatgttacgcgacgaaattggcggcaaagctgtgaatctcctcccatctgcggaataccaggatatttatcgtatcgtcagcgacaaagttaacgagatgctgaaacaagatctgattaacggtacctctaccaccgtggaaacggtgactgataagaagacaggcgaaattacccaacgcacgaaatacgggaccaaagttatggcacagtggtggttagaacacggtgtgaatcgtggcgtcacgaaacgctcggttatgactttggtgtatgggagcaaagagtttggattccgcgatcaagtgctgagtgacaccattcaaccggcgatcgataacggcaaaggtgacatgtttctgaatccgaatcaggctgctggttacatggcgaaactgatctggaacgcagtgtccgggaccgtagtcgcagcagttgaggcgatgaactggctgaaaagtgcggcgaaattacttgctgctgaagtgaaggatcctaagacggatacagttctgcgtggccgctgcgcagtacattgggtgactcccgacggcttccctgtgtggcaggaatacaagaagcctattcagacgcgcttgaacctgatgttcctcggtcagttccgcttacagcctaccattaacaccaacaaagatagcgagattgatgcacacaaacaggagtctggtatcgctcctaactttgtacacagccaagacggtaaccaccttcgtatgactgtagtgtgggcacacgagaagtacggaatcgaatcttttgcactgattcacgactccttcggtaccattccggctgacgctgcgaacctgttcaaagcagtgcgcgaaactatggtttcgacatatgagtcttgtgatgtactggctgatttctacgaccagttcgtggaccagttgcacgagtctcaattggacaaaatgccagcacttccggctaaaggtaacttgaacctccgtgacatcttaaaatcggacttcgcgttcgcg

SEQ ID NO: 976 - protein, 890 aa, synthetic construct
  REGION 1..890: note = Variant of RNA polymerase
MHHHHHHMNTINIAKNDFSDIELAAIPFNTLADHYGERLAREQLALEHESYEMGEARFRKMFERQLKAGEVADNAAAKPLITTLLPKMIARINDWFEEVKAKRGKRPTAFQFLQEIKPEAVAYITIKTTLACLTSADNTTVQAVASAIGRAIEDEARFGRIRDLEAKHFKKNVEEQLNKRVGHVYKKAFMQVVEHDMLSKGLLGGEAWSSWHKEDSIHVGVRCIEMLIESTGMVSLHRQNAGVVGQDSETIELAPEYAEAIATRAGALAGISPMFQPCVVPPKPWTGITGGGYWAAGRKPLQLVRTRSLAALRRYEEVSMPEVIKAVNIAQNTAWRINKKVLDVANTITQWQHCPVADVPAMDRGEMPARPLDIDTNEIALKAWKKEASAFYRKDKARVSRRLSMEFMLSQANKFANYKAIWFPQNMDWRGRVYAVPMFNPQGNDMTKGLLTFAQEKPIGEDGFYWLKIHGANTAGVDKVPFPQRIKFVEDNHTNIMECAKAPLENTWWAEQDSPFCFLAFCFEYAGVINSGLSYNCSLPLAFDGSCSGLQHFSAMLRDEIGGKAVNLLPSAEYQDIYRIVSDKVNEMLKQDLINGTSTTVETVTDKKTGEITQRTKYGTKVMAQWWLEHGVNRGVTKRSVMTLVYGSKEFGFRDQVLSDTIQPAIDNGKGDMFLNPNQAAGYMAKLIWNAVSGTVVAAVEAMNWLKSAAKLLAAEVKDPKTDTVLRGRCAVHWVTPDGFPVWQEYKKPIQTRLNLMFLGQFRLQPTINTNKDSEIDAHKQESGIAPNFVHSQDGNHLRMTVVWAHEKYGIESFALIHDSFGTIPADAANLFKAVRETMVSTYESCDVLADFYDQFVDQLHESQLDKMPALPAKGNLNLRDILKSDFAFA

SEQ ID NO: 977 - DNA, 2670 bp, synthetic construct
  misc_feature 1..2670: note = Variant of RNA polymerase
  source 1..2670: mol_type = other DNA
atgcaccatcaccatcaccatatgaacacgattaacattgctaagaacgacttctctgacatcgaactggctgctatcccgttcaacactctggctgaccattacggtgagcgtttagctcgcgaacagttggcccttgagcatgagtcttacgagatgggtgaagcacgcttccgcaagatgtttgagcgtcaacttaaagctggtgaggttgcggataacgctgccgccaagcctctcatcactaccctactccctaagatgattgcacgcatcaacgactggtttgaggaagtgaaagctaagcgcggcaagcgcccgacagccttccagttcctgcaagaaatcaagccggaagccgtagcgtacatcaccattaagaccactctggcttgcctaaccagtgcggacaatacaaccgttcaggctgtagcaagcgcaatcggtcgggccattgaggacgaggctcgcttcggtcgtatccgtgaccttgaagctaagcacttcaagaagaacgttgaggaacaactcaacaagcgcgtagggcacgtctacaagaaagcatttatgcaagttgtcgagcacgacatgctctctaagggtctactcggtggcgaggcgtggtcttcgtggcataaggaagactctattcatgtaggagtacgctgcatcgagatgctcattgagtcaaccggaatggttagcttacaccgccaaaatgctggcgtagtaggtcaagactctgagactatcgaactcgcacctgaatacgctgaggctatcgcaacccgtgcaggtgcgctggctggcatctctccgatgttccaaccttgcgtagttcctcctaagccgtggactggcattactggtggtggctattgggctgcggggcgcaaacccctgcagttagtacgtactcgcagtctggcggcgcttcgccgctatgaagaagtgtcgatgccggaggtcatcaaagcagtcaacattgcgcagaatacagcatggcgtattaacaagaaagttctcgacgtagcgaataccatcacccaatggcagcactgtccagtcgcggatgtgcctgcgatggatcgtggcgaaatgccagctcgtccgttggacatcgataccaacgagattgcacttaaagcgtggaagaaagaagcttccgcgttctaccgcaaagacaaagcacgcgttagccgtcgtctgtcaatggagtttatgttatctcaggcgaacaagtttgcgaattataaagcaatctggtttccgcaaaacatggattggcgtgggcgcgtgtacgctgtcccgatgttcaatcctcagggcaacgatatgacgaaaggcctgctgacctttgcgcaggagaaacccattggtgaagacggcttctattggctcaagattcatggcgcaaatacagctggagtggataaagtaccgtttccacaacgcatcaaatttgttgaggataaccatacgaatattatggaatcggcgaaagcaccgctggaaaacacttggtgggcggaacaggactcgccgttctgttttctggcgttctgctttgagtatgctggcgtcatcaatagtggtctgtcgtacaactgtagcttgcctctggcatttgatggtagttgctccggcctgcaacatttctcagcgatgttacgcgacgaaattggcggcaaagctgtgaatctcctcccatctgcggaataccaggatatttatcgtatcgtcagcgacaaagttaacgagatgctgaaacaagatctgattaacggtacctctaccaccgtggaaacggtgactgataagaagacaggcgaaattacccaacgcacgaaatacgggaccaaagttatggcacagtggtggttagaacacggtgtgaatcgtggcgtcacgaaacgctcggttatgactttggtgtatgggagcaaagagtttggattccgcgatcaagtgctgagtgacaccattcaaccggcgatcgataacggcaaaggtgacatgtttctgaatccgaatcaggctgctggttacatggcgaaactgatctggaacgcagtgtccgggaccgtagtcgcagcagttgaggcgatgaactggctgaaaagtgcggcgaaattacttgctgctgaagtgaaggatcctaagacggatacagttctgcgtggccgctgcgcagtacattgggtgactcccgacggcttccctgtgtggcaggaatacaagaagcctattcagacgcgcttgaacctgatgttcctcggtcagttccgcttacagcctaccattaacaccaacaaagatagcgagattgatgcacacaaacaggagtctggtatcgctcctaactttgtacacagccaagacggtaaccaccttcgtatgactgtagtgtgggcacacgagaagtacggaatcgaatcttttgcactgattcacgactccttcggtaccattccggctgacgctgcgaacctgttcaaagcagtgcgcgaaactatggtttcgacatatgagtcttgtgatgtactggctgatttctacgaccagttcgctgaccagttgcacgagtctcaattggacaaaatgccagcacttccggctaaaggtaacttgaacctccgtgacatcttaaaatcggacttcgcgttcgcg

SEQ ID NO: 978 - protein, 890 aa, synthetic construct
  REGION 1..890: note = Variant of RNA polymerase
MHHHHHHMNTINIAKNDFSDIELAAIPFNTLADHYGERLAREQLALEHESYEMGEARFRKMFERQLKAGEVADNAAAKPLITTLLPKMIARINDWFEEVKAKRGKRPTAFQFLQEIKPEAVAYITIKTTLACLTSADNTTVQAVASAIGRAIEDEARFGRIRDLEAKHFKKNVEEQLNKRVGHVYKKAFMQVVEHDMLSKGLLGGEAWSSWHKEDSIHVGVRCIEMLIESTGMVSLHRQNAGVVGQDSETIELAPEYAEAIATRAGALAGISPMFQPCVVPPKPWTGITGGGYWAAGRKPLQLVRTRSLAALRRYEEVSMPEVIKAVNIAQNTAWRINKKVLDVANTITQWQHCPVADVPAMDRGEMPARPLDIDTNEIALKAWKKEASAFYRKDKARVSRRLSMEFMLSQANKFANYKAIWFPQNMDWRGRVYAVPMFNPQGNDMTKGLLTFAQEKPIGEDGFYWLKIHGANTAGVDKVPFPQRIKFVEDNHTNIMESAKAPLENTWWAEQDSPFCFLAFCFEYAGVINSGLSYNCSLPLAFDGSCSGLQHFSAMLRDEIGGKAVNLLPSAEYQDIYRIVSDKVNEMLKQDLINGTSTTVETVTDKKTGEITQRTKYGTKVMAQWWLEHGVNRGVTKRSVMTLVYGSKEFGFRDQVLSDTIQPAIDNGKGDMFLNPNQAAGYMAKLIWNAVSGTVVAAVEAMNWLKSAAKLLAAEVKDPKTDTVLRGRCAVHWVTPDGFPVWQEYKKPIQTRLNLMFLGQFRLQPTINTNKDSEIDAHKQESGIAPNFVHSQDGNHLRMTVVWAHEKYGIESFALIHDSFGTIPADAANLFKAVRETMVSTYESCDVLADFYDQFADQLHESQLDKMPALPAKGNLNLRDILKSDFAFA

SEQ ID NO: 979 - DNA, 2670 bp, synthetic construct
  misc_feature 1..2670: note = Variant of RNA polymerase
  source 1..2670: mol_type = other DNA
atgcaccatcaccatcaccatatgaacacgattaacattgctaagaacgacttctctgacatcgaactggctgctatcccgttcaacactctggctgaccattacggtgagcgtttagctcgcgaacagttggcccttgagcatgagtcttacgagatgggtgaagcacgcttccgcaagatgtttgagcgtcaacttaaagctggtgaggttgcggataacgctgccgccaagcctctcatcactaccctactccctaagatgattgcacgcatcaacgactggtttgaggaagtgaaagctaagcgcggcaagcgcccgacagccttccagttcctgcaagaaatcaagccggaagccgtagcgtacatcaccattaagaccactctggcttgcctaaccagtgcggacaatacaaccgttcaggctgtagcaagcgcaatcggtcgggccattgaggacgaggctcgcttcggtcgtatccgtgaccttgaagctaagcacttcaagaagaacgttgaggaacaactcaacaagggggtagggcacgtctacaagaaagcatttatgcaagttgtcgagcacgacatgctctctaagggtctactcggtggcgaggcgtggtcttcgtggcataaggaagactctattcatgtaggagtacgctgcatcgagatgctcattgagtcaaccggaatggttagcttacaccgccaaaatgctggcgtagtaggtcaagactctgagactatcgaactcgcacctgaatacgctgaggctatcgcaacccgtgcaggtgcgctggctggcatctctccgatgttccaaccttgcgtagttcctcctaagccgtggactggcattactggtggtggctattgggctgcggggcgcaaacccctgcagttagtacgtactcgcagtctggcggcgcttcgccgctatgaagaagtgtcgatgccggaggtcatcaaagcagtcaacattgcgcagaatacagcatggcgtattaacaagaaagttctcgacgtagcgaataccatcacccaatggcagcactgtccagtcgcggatgtgcctgcgatggatcgtggcgaaatgccagctcgtccgttggacatcgataccaacgagattgcacttaaagcgtggaagaaagaagcttccgcgttctaccgcaaagacaaagcacgcgttagccgtcgtctgtcaatggagtttatgttatctcaggcgaacaagtttgcgaattataaagcaatctggtttccgcaaaacatggattggcgtgggcgcgtgtacgctgtcccgatgttcaatcctcagggcaacgatatgacgaaaggcctgctgacctttgcgcaggagaaacccattggtgaagacggcttctattggctcaagattcatggcgcaaatacagctggagtggataaagtaccgtttccacaacgcatcaaatttgttgaggataaccatacgaatattatggaatgcgcgaaagcaccgctggaaaacacttggtgggcggaacaggactcgccgttctgttttctggcgttctgctttgagtatgctggcgtcatcaatagtggtctgtcgtacaactgtagcttgcctctggcatttgatggtagttgctccggcctgcaacatttctcagcgatgttacgcgacgaaattggcggcaaagctgtgaatctcctcccatctgcggaataccaggatatttatcgtatcgtcagcgacaaagttaacgagatgctgaaacaagatctgattaacggtacctctaccaccgtggaaacggtgactgataagaagacaggcgaaattacccaacgcacgaaatacgggaccaaagttatggcacagtggtggttagaacacggtgtgaatcgtggcgtcacgaaacgctcggttatgactttggtgtatgggagcaaagagtttggattccgcgatcaagtgctgagtgacaccattcaaccggcgatcgataacggcaaaggtgacatgtttctgaatccgaatcaggctgctggttacatggcgaaactgatctggaacgcagtgtccgggaccgtagtcgcagcagttgaggcgatgaactggctgaaaagtgcggcgaaattacttgctgctgaagtgaaggatcctaagacggatacagttctgcgtggccgctgcgcagtacattgggtgactcccgacggcttccctgtgtggcaggaatacaagaagcctattcagacgcgcttgaacctgatgttcctcggtcagttccgcttacagcctaccattaacaccaacaaagatagcgagattgatgcacacaaacaggagtctggtatcgctcctaactttgtacacagccaagacggtaaccaccttcgtatgactgtagtgtgggcacacgagaagtacggaatcgaatcttttgcactgattcacgactccttcggtaccattccggctgacgctgcgaacctgttcaaagcagtgcgcgaaactatggtttcgacatatgagtcttgtgatgtactggctgatttctacgaccagttcgctgaccagttgcacgagtctcaattggacaaaatgccagcacttccggctaaaggtaacttgaacctccgtgacatcttaaaatcggacttcgcgttcgcg

SEQ ID NO: 980 - protein, 890 aa, synthetic construct
  REGION 1..890: note = Variant of RNA polymerase
MHHHHHHMNTINIAKNDFSDIELAAIPFNTLADHYGERLAREQLALEHESYEMGEARFRKMFERQLKAGEVADNAAAKPLITTLLPKMIARINDWFEEVKAKRGKRPTAFQFLQEIKPEAVAYITIKTTLACLTSADNTTVQAVASAIGRAIEDEARFGRIRDLEAKHFKKNVEEQLNKGVGHVYKKAFMQVVEHDMLSKGLLGGEAWSSWHKEDSIHVGVRCIEMLIESTGMVSLHRQNAGVVGQDSETIELAPEYAEAIATRAGALAGISPMFQPCVVPPKPWTGITGGGYWAAGRKPLQLVRTRSLAALRRYEEVSMPEVIKAVNIAQNTAWRINKKVLDVANTITQWQHCPVADVPAMDRGEMPARPLDIDTNEIALKAWKKEASAFYRKDKARVSRRLSMEFMLSQANKFANYKAIWFPQNMDWRGRVYAVPMFNPQGNDMTKGLLTFAQEKPIGEDGFYWLKIHGANTAGVDKVPFPQRIKFVEDNHTNIMECAKAPLENTWWAEQDSPFCFLAFCFEYAGVINSGLSYNCSLPLAFDGSCSGLQHFSAMLRDEIGGKAVNLLPSAEYQDIYRIVSDKVNEMLKQDLINGTSTTVETVTDKKTGEITQRTKYGTKVMAQWWLEHGVNRGVTKRSVMTLVYGSKEFGFRDQVLSDTIQPAIDNGKGDMFLNPNQAAGYMAKLIWNAVSGTVVAAVEAMNWLKSAAKLLAAEVKDPKTDTVLRGRCAVHWVTPDGFPVWQEYKKPIQTRLNLMFLGQFRLQPTINTNKDSEIDAHKQESGIAPNFVHSQDGNHLRMTVVWAHEKYGIESFALIHDSFGTIPADAANLFKAVRETMVSTYESCDVLADFYDQFADQLHESQLDKMPALPAKGNLNLRDILKSDFAFA

SEQ ID NO: 981 - DNA, 2670 bp, synthetic construct
  misc_feature 1..2670: note = Variant of RNA polymerase
  source 1..2670: mol_type = other DNA
atgcaccatcaccatcaccatatgaacacgattaacattgctaagaacgacttctctgacatcgaactggctgctatcccgttcaacactctggctgaccattacggtgagcgtttagcttcggaacagttggcccttgagcatgagtcttacgagatgggtgaagcacgcttccgcaagatgtttgagcgtcaacttaaagctggtgaggttgcggataacgctgccgccaagcctctcatcactaccctactccctaagatgattgcacgcatcaacgactggtttgaggaagtgaaagctaagcgcggcaagcgcccgacagccttccagttcctgcaagaaatcaagccggaagccgtagcgtacatcaccattaagaccactctggcttgcctaaccagtgcggacaatacaaccgttcaggctgtagcaagcgcaatcggtcgggccattgaggacgaggctcgcttcggtcgtatccgtgaccttgaagctaagcacttcaagaagaacgttgaggaacaactcaacaagcgcgtagggcacgtctacaagaaagcatttatgcaagttgtcgagcacgacatgctctctaagggtctactcggtggcgaggcgtggtcttcgtggcataaggaagactctattcatgtaggagtacgctgcatcgagatgctcattgagtcaaccggaatggttagcttacaccgccaaaatgctggcgtagtaggtcaagactctgagactatcgaactcgcacctgaatacgctgaggctatcgcaacccgtgcaggtgcgctggctggcatctctccgatgttccaaccttgcgtagttcctcctaagccgtggactggcattactggtggtggctattgggctgcggggcgcaaacccctgcagttagtacgtactcgcagtctggcggcgcttcgccgctatgaagaagtgtcgatgccggaggtcatcaaagcagtcaacattgcgcagaatacagcatggcgtattaacaagaaagttctcgacgtagcgaataccatcacccaatggcagcactgtccagtcgcggatgtgcctgcgatggatcgtggcgaaatgccagctcgtccgttggacatcgataccaacgagattgcacttaaagcgtggaagaaagaagcttccgcgttctaccgcaaagacaaagcacgcgttagccgtcgtctgtcaatggagtttatgttatctcaggcgaacaagtttgcgaattataaagcaatctggtttccgcaaaacatggattggcgtgggcgcgtgtacgctgtcccgatgttcaatcctcagggcaacgatatgacgaaaggcctgctgacctttgcgcaggagaaacccattggtgaagacggcttctattggctcaagattcatggcgcaaatacagctggagtggataaagtaccgtttccacaacgcatcaaatttgttgaggataaccatacgaatattatggaatgcgcgaaagcaccgctggaaaacacttggtgggcggaacaggactcgccgttctgttttctggcgttctgctttgagtatgctggcgtcatcaatagtggtctgtcgtacaactgtagcttgcctctggcatttgatggtagttgctccggcctgcaacatttctcagcgatgttacgcgacgaaattggcggcaaagctgtgaatctcctcccatctgcggaataccaggatatttatcgtatcgtcagcgacaaagttaacgagatgctgaaacaagatctgattaacggtacctctaccaccgtggaaacggtgactgataagaagacaggcgaaattacccaacgcacgaaatacgggaccaaagttatggcacagtggtggttagaacacggtgtgaatcgtggcgtcacgaaacgctcggttatgactttggtgtatgggagcaaagagtttggattccgcgatcaagtgctgagtgacaccattcaaccggcgatcgataacggcaaaggtgacatgtttctgaatccgaatcaggctgctggttacatggcgaaactgatctggaacgcagtgtccgggaccgtagtcgcagcagttgaggcgatgaactggctgaaaagtgcggcgaaattacttgctgctgaagtgaaggatcctaagacggatacagttctgcgtggccgctgcgcagtacattgggtgactcccgacggcttccctgtgtggcaggaatacaagaagcctattcagacgcgcttgaacctgatgttcctcggtcagttccgcttacagcctaccattaacaccaacaaagatagcgagattgatgcacacaaacaggagtctggtatcgctcctaactttgtacacagccaagacggtaaccaccttcgtatgactgtagtgtgggcacacgagaagtacggaatcgaatcttttgcactgattcacgactccttcggtaccattccggctgacgctgcgaacctgttcaaagcagtgcgcgaaactatggtttcgacatatgagtcttgtgatgtactggctgatttctacgaccagttcgctgaccagttgcacgagtctcaattggacaaaatgccagcacttccggctaaaggtaacttgaacctccgtgacatcttaaaatcggacttcgcgttcgcg

SEQ ID NO: 982 - protein, 890 aa, synthetic construct
  REGION 1..890: note = Variant of RNA polymerase
MHHHHHHMNTINIAKNDFSDIELAAIPFNTLADHYGERLASEQLALEHESYEMGEARFRKMFERQLKAGEVADNAAAKPLITTLLPKMIARINDWFEEVKAKRGKRPTAFQFLQEIKPEAVAYITIKTTLACLTSADNTTVQAVASAIGRAIEDEARFGRIRDLEAKHFKKNVEEQLNKRVGHVYKKAFMQVVEHDMLSKGLLGGEAWSSWHKEDSIHVGVRCIEMLIESTGMVSLHRQNAGVVGQDSETIELAPEYAEAIATRAGALAGISPMFQPCVVPPKPWTGITGGGYWAAGRKPLQLVRTRSLAALRRYEEVSMPEVIKAVNIAQNTAWRINKKVLDVANTITQWQHCPVADVPAMDRGEMPARPLDIDTNEIALKAWKKEASAFYRKDKARVSRRLSMEFMLSQANKFANYKAIWFPQNMDWRGRVYAVPMFNPQGNDMTKGLLTFAQEKPIGEDGFYWLKIHGANTAGVDKVPFPQRIKFVEDNHTNIMECAKAPLENTWWAEQDSPFCFLAFCFEYAGVINSGLSYNCSLPLAFDGSCSGLQHFSAMLRDEIGGKAVNLLPSAEYQDIYRIVSDKVNEMLKQDLINGTSTTVETVTDKKTGEITQRTKYGTKVMAQWWLEHGVNRGVTKRSVMTLVYGSKEFGFRDQVLSDTIQPAIDNGKGDMFLNPNQAAGYMAKLIWNAVSGTVVAAVEAMNWLKSAAKLLAAEVKDPKTDTVLRGRCAVHWVTPDGFPVWQEYKKPIQTRLNLMFLGQFRLQPTINTNKDSEIDAHKQESGIAPNFVHSQDGNHLRMTVVWAHEKYGIESFALIHDSFGTIPADAANLFKAVRETMVSTYESCDVLADFYDQFADQLHESQLDKMPALPAKGNLNLRDILKSDFAFA

SEQ ID NO: 983 - DNA, 2670 bp, synthetic construct
  misc_feature 1..2670: note = Variant of RNA polymerase
  source 1..2670: mol_type = other DNA
atgcaccatcaccatcaccatatgaacacgattaacattgctaagaacgacttctctgacatcgaactggctgctatcccgttcaactatctggctgaccattacggtgagcgtttagctcgcgaacagttggcccttgagcatgagtcttacgagatgggtgaagcacgcttccgcaagatgtttgagcgtcaacttaaagctggtgaggttgcggataacgctgccgccaagcctctcatcactaccctactccctaagatgattgcacgcatcaacgactggtttgaggaagtgaaagctaagcgcggcaagcgcccgacagccttccagttcctgcaagaaatcaagccggaagccgtagcgtacatcaccattaagaccactctggcttgcctaaccagtgcggacaatacaaccgttcaggctgtagcaagcgcaatcggtcgggccattgaggacgaggctcgcttcggtcgtatccgtgaccttgaagctaagcacttcaagaagaacgttgaggaacaactcaacaagcgcgtagggcacgtctacaagaaagcatttatgcaagttgtcgagcacgacatgctctctaagggtctactcggtggcgaggcgtggtcttcgtggcataaggaagactctattcatgtaggagtacgctgcatcgagatgctcattgagtcaaccggaatggttagcttacaccgccaaaatgctggcgtagtaggtcaagactctgagactatcgaactcgcacctgaatacgctgaggctatcgcaacccgtgcaggtgcgctggctggcatctctccgatgttccaaccttgcgtagttcctcctaagccgtggactggcattactggtggtggctattgggctgcggggcgcaaacccctgcagttagtacgtactcgcagtctggcggcgcttcgccgctatgaagaagtgtcgatgccggaggtcatcaaagcagtcaacattgcgcagaatacagcatggcgtattaacaagaaagttctcgacgtagcgaataccatcacccaatggcagcactgtccagtcgcggatgtgcctgcgatggatcgtggcgaaatgccagctcgtccgttggacatcgataccaacgagattgcacttaaagcgtggaagaaagaagcttccgcgttctaccgcaaagacaaagcacgcgttagccgtcgtctgtcaatggagtttatgttatctcaggcgaacaagtttgcgaattataaagcaatctggtttccgcaaaacatggattggcgtgggcgcgtgtacgctgtcccgatgttcaatcctcagggcaacgatatgacgaaaggcctgctgacctttgcgcaggagaaacccattggtgaagacggcttctattggctcaagattcatggcgcaaatacagctggagtggataaagtaccgtttccacaacgcatcaaatttgttgaggataaccatacgaatattatggaatgcgcgaaagcaccgctggaaaacacttggtgggcggaacaggactcgccgttctgttttctggcgttctgctttgagtatgctggcgtcatcaatagtggtctgtcgtacaactgtagcttgcctctggcatttgatggtagttgctccggcctgcaacatttctcagcgatgttacgcgacgaaattggcggcaaagctgtgaatctcctcccatctgcggaataccaggatatttatcgtatcgtcagcgacaaagttaacgagatgctgaaacaagatctgattaacggtacctctaccaccgtggaaacggtgactgataagaagacaggcgaaattacccaacgcacgaaatacgggaccaaagttatggcacagtggtggttagaacacggtgtgaatcgtggcgtcacgaaacgctcggttatgactttggtgtatgggagcaaagagtttggattccgcgatcaagtgctgagtgacaccattcaaccggcgatcgataacggcaaaggtgacatgtttctgaatccgaatcaggctgctggttacatggcgaaactgatctggaacgcagtgtccgggaccgtagtcgcagcagttgaggcgatgaactggctgaaaagtgcggcgaaattacttgctgctgaagtgaaggatcctaagacggatacagttctgcgtggccgctgcgcagtacattgggtgactcccgacggcttccctgtgtggcaggaatacaagaagcctattcagacgcgcttgaacctgatgttcctcggtcagttccgcttacagcctaccattaacaccaacaaagatagcgagattgatgcacacaaacaggagtctggtatcgctcctaactttgtacacagccaagacggtaaccaccttcgtatgactgtagtgtgggcacacgagaagtacggaatcgaatcttttgcactgattcacgactccttcggtaccattccggctgacgctgcgaacctgttcaaagcagtgcgcgaaactatggtttcgacatatgagtcttgtgatgtactggctgatttctacgaccagttcgctgaccagttgcacgagtctcaattggacaaaatgccagcacttccggctaaaggtaacttgaacctccgtgacatcttaaaatcggacttcgcgttcgcg

SEQ ID NO: 984 - protein, 890 aa, synthetic construct
  REGION 1..890: note = Variant of RNA polymerase
MHHHHHHMNTINIAKNDFSDIELAAIPFNYLADHYGERLAREQLALEHESYEMGEARFRKMFERQLKAGEVADNAAAKPLITTLLPKMIARINDWFEEVKAKRGKRPTAFQFLQEIKPEAVAYITIKTTLACLTSADNTTVQAVASAIGRAIEDEARFGRIRDLEAKHFKKNVEEQLNKRVGHVYKKAFMQVVEHDMLSKGLLGGEAWSSWHKEDSIHVGVRCIEMLIESTGMVSLHRQNAGVVGQDSETIELAPEYAEAIATRAGALAGISPMFQPCVVPPKPWTGITGGGYWAAGRKPLQLVRTRSLAALRRYEEVSMPEVIKAVNIAQNTAWRINKKVLDVANTITQWQHCPVADVPAMDRGEMPARPLDIDTNEIALKAWKKEASAFYRKDKARVSRRLSMEFMLSQANKFANYKAIWFPQNMDWRGRVYAVPMFNPQGNDMTKGLLTFAQEKPIGEDGFYWLKIHGANTAGVDKVPFPQRIKFVEDNHTNIMECAKAPLENTWWAEQDSPFCFLAFCFEYAGVINSGLSYNCSLPLAFDGSCSGLQHFSAMLRDEIGGKAVNLLPSAEYQDIYRIVSDKVNEMLKQDLINGTSTTVETVTDKKTGEITQRTKYGTKVMAQWWLEHGVNRGVTKRSVMTLVYGSKEFGFRDQVLSDTIQPAIDNGKGDMFLNPNQAAGYMAKLIWNAVSGTVVAAVEAMNWLKSAAKLLAAEVKDPKTDTVLRGRCAVHWVTPDGFPVWQEYKKPIQTRLNLMFLGQFRLQPTINTNKDSEIDAHKQESGIAPNFVHSQDGNHLRMTVVWAHEKYGIESFALIHDSFGTIPADAANLFKAVRETMVSTYESCDVLADFYDQFADQLHESQLDKMPALPAKGNLNLRDILKSDFAFA

SEQ ID NO: 985 - DNA, 2670 bp, synthetic construct
  misc_feature 1..2670: note = Variant of RNA polymerase
  source 1..2670: mol_type = other DNA
atgcaccatcaccatcaccatatgaacacgattaacattgctaagaacgacttctctgacatcgaactggctgctatcccgttcaacactctggctgaccattacggtgagcgtttagctcgcgaacagttggcccttgagcatgagtcttacgagatgggtgaagcacgcttccgcaagatgtttgagcgtcaacttaaagctggtgaggttgcggataacgctgccgccaagcctctcatcactaccctactccctaagatgattgcacgcatcaacgactggtttgaggaagtgaaagctaagcgcggcaagcgcccgacagccttccagttcctgcaagaaatcaagccggaagccgtagcgtacatcaccattaagaccactctggcttgcctaaccagtgcggacaatacaaccgttcaggctgtagcaagcgcaatcggtcgggccattgaggacgaggctcgcttcggtcgtatccgtgaccttgaagctaagcacttcaagaagaacgttgaggaacaactcaacaagcgcgtagggcacgtctacaagaaagcatttatgcaagttgtcgagcacgacatgctctctaagggtctactcggtggcgaggcgtggtcttcgtggcataaggaagactctattcatgtaggagtacgctgcatcgagatgctcattgagtcaaccggaatggttagcttacaccgccaaaatgctggcgtagtaggtcaagactctgagactatcgaactcgcacctgaatacgctgaggctatcgcaacccgtgcaggtgcgctggctggcatctctccgatgttccaaccttgcgtagttcctcctaagccgtggactggcattactggtggtggctattgggctgcggggcgcaaacccctgcagttagtacgtactcgcagtctggcggcgcttcgccgctatgaagaagtgtcgatgccggaggtcatcaaagcagtcaacattgcgcagaatacagcatggcgtattaacaagaaagttctcgacgtagcgaataccatcacccaatggcagcactgtccagtcgcggatgtgcctgcgatggatcgtggcgaaatgccagctcgtccgttggacatcgataccaacgagattgcacttaaagcgtggaagaaagaagcttccgcgttctaccgcaaagacaaagcacgcgttagccgtcgtctgtcaatggagtttatgttatctcaggcgaacaagtttgcgaattataaagcaatctggtttccgcaaaacatggattggcgtgggcgcgtgtacgctgtcccgatgttcaatcctcagggcaacgatatgacgaaaggcctgctgacctttgcgcaggagaaacccattggtgaagacggcttctattggctcaagattcatggcgcaaatacagctggagtggataaagtaccgtttccacaacgcatcaaatttgttgaggataaccatacggcgattatggaatgcgcgaaagcaccgctggaaaacacttggtgggcggaacaggactcgccgttctgttttctggcgttctgctttgagtatgctggcgtcatcaatagtggtctgtcgtacaactgtagcttgcctctggcatttgatggtagttgctccggcctgcaacatttctcagcgatgttacgcgacgaaattggcggcaaagctgtgaatctcctcccatctgcggaataccaggatatttatcgtatcgtcagcgacaaagttaacgagatgctgaaacaagatctgattaacggtacctctaccaccgtggaaacggtgactgataagaagacaggcgaaattacccaacgcacgaaatacgggaccaaagttatggcacagtggtggttagaacacggtgtgaatcgtggcgtcacgaaacgctcggttatgactttggtgtatgggagcaaagagtttggattccgcgatcaagtgctgagtgacaccattcaaccggcgatcgataacggcaaaggtgacatgtttctgaatccgaatcaggctgctggttacatggcgaaactgatctggaacgcagtgtccgggaccgtagtcgcagcagttgaggcgatgaactggctgaaaagtgcggcgaaattacttgctgctgaagtgaaggatcctaagacggatacagttctgcgtggccgctgcgcagtacattgggtgactcccgacggcttccctgtgtggcaggaatacaagaagcctattcagacgcgcttgaacctgatgttcctcggtcagttccgcttacagcctaccattaacaccaacaaagatagcgagattgatgcacacaaacaggagtctggtatcgctcctaactttgtacacagccaagacggtaaccaccttcgtatgactgtagtgtgggcacacgagaagtacggaatcgaatcttttgcactgattcacgactccttcggtaccattccggctgacgctgcgaacctgttcaaagcagtgcgcgaaactatggtttcgacatatgagtcttgtgatgtactggctgatttctacgaccagttcgctgaccagttgcacgagtctcaattggacaaaatgccagcacttccggctaaaggtaacttgaacctccgtgacatcttaaaatcggacttcgcgttcgcg

SEQ ID NO: 986 - protein, 890 aa, synthetic construct
  REGION 1..890: note = Variant of RNA polymerase
MHHHHHHMNTINIAKNDFSDIELAAIPFNTLADHYGERLAREQLALEHESYEMGEARFRKMFERQLKAGEVADNAAAKPLITTLLPKMIARINDWFEEVKAKRGKRPTAFQFLQEIKPEAVAYITIKTTLACLTSADNTTVQAVASAIGRAIEDEARFGRIRDLEAKHFKKNVEEQLNKRVGHVYKKAFMQVVEHDMLSKGLLGGEAWSSWHKEDSIHVGVRCIEMLIESTGMVSLHRQNAGVVGQDSETIELAPEYAEAIATRAGALAGISPMFQPCVVPPKPWTGITGGGYWAAGRKPLQLVRTRSLAALRRYEEVSMPEVIKAVNIAQNTAWRINKKVLDVANTITQWQHCPVADVPAMDRGEMPARPLDIDTNEIALKAWKKEASAFYRKDKARVSRRLSMEFMLSQANKFANYKAIWFPQNMDWRGRVYAVPMFNPQGNDMTKGLLTFAQEKPIGEDGFYWLKIHGANTAGVDKVPFPQRIKFVEDNHTAIMECAKAPLENTWWAEQDSPFCFLAFCFEYAGVINSGLSYNCSLPLAFDGSCSGLQHFSAMLRDEIGGKAVNLLPSAEYQDIYRIVSDKVNEMLKQDLINGTSTTVETVTDKKTGEITQRTKYGTKVMAQWWLEHGVNRGVTKRSVMTLVYGSKEFGFRDQVLSDTIQPAIDNGKGDMFLNPNQAAGYMAKLIWNAVSGTVVAAVEAMNWLKSAAKLLAAEVKDPKTDTVLRGRCAVHWVTPDGFPVWQEYKKPIQTRLNLMFLGQFRLQPTINTNKDSEIDAHKQESGIAPNFVHSQDGNHLRMTVVWAHEKYGIESFALIHDSFGTIPADAANLFKAVRETMVSTYESCDVLADFYDQFADQLHESQLDKMPALPAKGNLNLRDILKSDFAFA

SEQ ID NO: 987 - DNA, 2670 bp, synthetic construct
  misc_feature 1..2670: note = Variant of RNA polymerase
  source 1..2670: mol_type = other DNA
atgcaccatcaccatcaccatatgaacacgattaacattgctaagaacgacttctctgacatcgaactggctgctatcccgttcaacactctggctgaccattacggtgagcgtttagctcgcgaacagttggcccttgagcatgagtcttacgagatgggtgaagcacgcttccgcaagatgtttgagcgtcaacttaaagctggtgaggttgcggataacgctgccgccaagcctctcatcactaccctactccctaagatgattgcacgcatcaacgactggtttgaggaagtgaaagctaagcgcggcaagcgcccgacagccttccagttcctgcaagaaatcaagccggaagccgtagcgtacatcaccattaagaccactctggcttgcctaaccagtgcggacaatacaaccgttcaggctgtagcaagcgcaatcggtcgggccattgaggacgaggctcgcttcggtcgtatccgtgaccttgaagctaagcacttcaagaagaacgttgaggaacaactcaacaagcgcgtagggcacgtctacaagaaagcatttatgcaagttgtcgagcacgacatgctctctaagggtctactcggtggcgaggcgtggtcttcgtggcataaggaagactctattcatgtaggagtacgctgcatcgagatgctcattgagtcaaccggaatggttagcttacaccgccaaaatgctggcgtagtaggtcaagactctgagactatcgaactcgcacctgaatacgctgaggctatcgcaacccgtgcaggtgcgctggctggcatctctccgatgttccaaccttgcgtagttcctcctaagccgtggactggcattactggtggtggctattgggctgcggggcgcaaacccctgcagttagtacgtactcgcagtctggcggcgcttcgccgctatgaagaagtgtcgatgccggaggtcatcaaagcagtcaacattgcgcagaatacagcatggcgtattaacaagaaagttctcgacgtagcgaataccatcacccaatggcagcactgtccagtcgcggatgtgcctgcgatggatcgtggcgaaatgccagctcgtccgttggacatcgataccaacgagattgcacttaaagcgtggaagaaagaagcttccgcgttctaccgcaaagacaaagcacgcgttagccgtcgtctgtcaatggagtttatgttatctcaggcgaacaagtttgcgaattataaagcaatctggtttccgcaaaacatggattggcgtgggcgcgtgtacgctgtcccgatgttcaatcctcagggcaacgatatgacgaaaggcctgctgacctttgcgcaggagaaacccattggtgaagacggcttctattggctcaagattcatggcgcaaatacagctggagtggataaagtaccgtttccacaacgcatcaaatttgttgaggataaccatacgaggattatggaatgcgcgaaagcaccgctggaaaacacttggtgggcggaacaggactcgccgttctgttttctggcgttctgctttgagtatgctggcgtcatcaatagtggtctgtcgtacaactgtagcttgcctctggcatttgatggtagttgctccggcctgcaacatttctcagcgatgttacgcgacgaaattggcggcaaagctgtgaatctcctcccatctgcggaataccaggatatttatcgtatcgtcagcgacaaagttaacgagatgctgaaacaagatctgattaacggtacctctaccaccgtggaaacggtgactgataagaagacaggcgaaattacccaacgcacgaaatacgggaccaaagttatggcacagtggtggttagaacacggtgtgaatcgtggcgtcacgaaacgctcggttatgactttggtgtatgggagcaaagagtttggattccgcgatcaagtgctgagtgacaccattcaaccggcgatcgataacggcaaaggtgacatgtttctgaatccgaatcaggctgctggttacatggcgaaactgatctggaacgcagtgtccgggaccgtagtcgcagcagttgaggcgatgaactggctgaaaagtgcggcgaaattacttgctgctgaagtgaaggatcctaagacggatacagttctgcgtggccgctgcgcagtacattgggtgactcccgacggcttccctgtgtggcaggaatacaagaagcctattcagacgcgcttgaacctgatgttcctcggtcagttccgcttacagcctaccattaacaccaacaaagatagcgagattgatgcacacaaacaggagtctggtatcgctcctaactttgtacacagccaagacggtaaccaccttcgtatgactgtagtgtgggcacacgagaagtacggaatcgaatcttttgcactgattcacgactccttcggtaccattccggctgacgctgcgaacctgttcaaagcagtgcgcgaaactatggtttcgacatatgagtcttgtgatgtactggctgatttctacgaccagttcgctgaccagttgcacgagtctcaattggacaaaatgccagcacttccggctaaaggtaacttgaacctccgtgacatcttaaaatcggacttcgcgttcgcg

SEQ ID NO: 988 - protein, 890 aa, synthetic construct
  REGION 1..890: note = Variant of RNA polymerase
MHHHHHHMNTINIAKNDFSDIELAAIPFNTLADHYGERLAREQLALEHESYEMGEARFRKMFERQLKAGEVADNAAAKPLITTLLPKMIARINDWFEEVKAKRGKRPTAFQFLQEIKPEAVAYITIKTTLACLTSADNTTVQAVASAIGRAIEDEARFGRIRDLEAKHFKKNVEEQLNKRVGHVYKKAFMQVVEHDMLSKGLLGGEAWSSWHKEDSIHVGVRCIEMLIESTGMVSLHRQNAGVVGQDSETIELAPEYAEAIATRAGALAGISPMFQPCVVPPKPWTGITGGGYWAAGRKPLQLVRTRSLAALRRYEEVSMPEVIKAVNIAQNTAWRINKKVLDVANTITQWQHCPVADVPAMDRGEMPARPLDIDTNEIALKAWKKEASAFYRKDKARVSRRLSMEFMLSQANKFANYKAIWFPQNMDWRGRVYAVPMFNPQGNDMTKGLLTFAQEKPIGEDGFYWLKIHGANTAGVDKVPFPQRIKFVEDNHTRIMECAKAPLENTWWAEQDSPFCFLAFCFEYAGVINSGLSYNCSLPLAFDGSCSGLQHFSAMLRDEIGGKAVNLLPSAEYQDIYRIVSDKVNEMLKQDLINGTSTTVETVTDKKTGEITQRTKYGTKVMAQWWLEHGVNRGVTKRSVMTLVYGSKEFGFRDQVLSDTIQPAIDNGKGDMFLNPNQAAGYMAKLIWNAVSGTVVAAVEAMNWLKSAAKLLAAEVKDPKTDTVLRGRCAVHWVTPDGFPVWQEYKKPIQTRLNLMFLGQFRLQPTINTNKDSEIDAHKQESGIAPNFVHSQDGNHLRMTVVWAHEKYGIESFALIHDSFGTIPADAANLFKAVRETMVSTYESCDVLADFYDQFADQLHESQLDKMPALPAKGNLNLRDILKSDFAFA

SEQ ID NO: 989 - DNA, 2670 bp, synthetic construct
  misc_feature 1..2670: note = Variant of RNA polymerase
  source 1..2670: mol_type = other DNA
atgcaccatcaccatcaccatatgaacacgattaacattgctaagaacgacttctctgacatcgaactggctgctatcccgttcaacactctggctgaccattacggtgagcgtttagctcgcgaacagttggcccttgagcatgagtcttacgagatgggtgaagcacgcttccgcaagatgtttgagcgtcaacttaaagctggtgaggttgcggataaccgtgccgccaagcctctcatcactaccctactccctaagatgattgcacgcatcaacgactggtttgaggaagtgaaagctaagcgcggcaagcgcccgacagccttccagttcctgcaagaaatcaagccggaagccgtagcgtacatcaccattaagaccactctggcttgcctaaccagtgcggacaatacaaccgttcaggctgtagcaagcgcaatcggtcgggccattgaggacgaggctcgcttcggtcgtatccgtgaccttgaagctaagcacttcaagaagaacgttgaggaacaactcaacaagcgcgtagggcacgtctacaagaaagcatttatgcaagttgtcgagcacgacatgctctctaagggtctactcggtggcgaggcgtggtcttcgtggcataaggaagactctattcatgtaggagtacgctgcatcgagatgctcattgagtcaaccggaatggttagcttacaccgccaaaatgctggcgtagtaggtcaagactctgagactatcgaactcgcacctgaatacgctgaggctatcgcaacccgtgcaggtgcgctggctggcatctctccgatgttccaaccttgcgtagttcctcctaagccgtggactggcattactggtggtggctattgggctgcggggcgcaaacccctgcagttagtacgtactcgcagtctggcggcgcttcgccgctatgaagaagtgtcgatgccggaggtcatcaaagcagtcaacattgcgcagaatacagcatggcgtattaacaagaaagttctcgacgtagcgaataccatcacccaatggcagcactgtccagtcgcggatgtgcctgcgatggatcgtggcgaaatgccagctcgtccgttggacatcgataccaacgagattgcacttaaagcgtggaagaaagaagcttccgcgttctaccgcaaagacaaagcacgcgttagccgtcgtctgtcaatggagtttatgttatctcaggcgaacaagtttgcgaattataaagcaatctggtttccgcaaaacatggattggcgtgggcgcgtgtacgctgtcccgatgttcaatcctcagggcaacgatatgacgaaaggcctgctgacctttgcgcaggagaaacccattggtgaagacggcttctattggctcaagattcatggcgcaaatacagctggagtggataaagtaccgtttccacaacgcatcaaatttgttgaggataaccatacgaatattatggaatgcgcgaaagcaccgctggaaaacacttggtgggcggaacaggactcgccgttctgttttctggcgttctgctttgagtatgctggcgtcatcaatagtggtctgtcgtacaactgtagcttgcctctggcatttgatggtagttgctccggcctgcaacatttctcagcgatgttacgcgacgaaattggcggcaaagctgtgaatctcctcccatctgcggaataccaggatatttatcgtatcgtcagcgacaaagttaacgagatgctgaaacaagatctgattaacggtacctctaccaccgtggaaacggtgactgataagaagacaggcgaaattacccaacgcacgaaatacgggaccaaagttatggcacagtggtggttagaacacggtgtgaatcgtggcgtcacgaaacgctcggttatgactttggtgtatgggagcaaagagtttggattccgcgatcaagtgctgagtgacaccattcaaccggcgatcgataacggcaaaggtgacatgtttctgaatccgaatcaggctgctggttacatggcgaaactgatctggaacgcagtgtccgggaccgtagtcgcagcagttgaggcgatgaactggttgaaaagtgcggcgaaattacttgctgctgaagtgaaggatcctaagacggatacagttctgcgtggccgctgcgcagtacattgggtgactcccgacggcttccctgtgtggcaggaatacaagaagcctattcagacgcgcttgaacctgatgttcctcggtcagttccgcttacagcctaccattaacaccaacaaagatagcgagattgatgcacacaaacaggagtctggtatcgctcctaactttgtacacagccaagacggtaaccaccttcgtatgactgtagtgtgggcacacgagaagtacggaatcgaatcttttgcactgattcacgactccttcggtaccattccggctgacgctgcgaacctgttcaaagcagtgcgcgaaactatggtttcgacatatgagtcttgtgatgtactggctgatttctacgaccagttcgctgaccagttgcacgagtctcaattggacaaaatgccagcacttccggctaaaggtaacttgaacctccgtgacatcttaaaatcggacttcgcgttcgcg

SEQ ID NO: 990 - protein, 890 aa, synthetic construct
  REGION 1..890: note = Variant of RNA polymerase
MHHHHHHMNTINIAKNDFSDIELAAIPFNTLADHYGERLAREQLALEHESYEMGEARFRKMFERQLKAGEVADNRAAKPLITTLLPKMIARINDWFEEVKAKRGKRPTAFQFLQEIKPEAVAYITIKTTLACLTSADNTTVQAVASAIGRAIEDEARFGRIRDLEAKHFKKNVEEQLNKRVGHVYKKAFMQVVEHDMLSKGLLGGEAWSSWHKEDSIHVGVRCIEMLIESTGMVSLHRQNAGVVGQDSETIELAPEYAEAIATRAGALAGISPMFQPCVVPPKPWTGITGGGYWAAGRKPLQLVRTRSLAALRRYEEVSMPEVIKAVNIAQNTAWRINKKVLDVANTITQWQHCPVADVPAMDRGEMPARPLDIDTNEIALKAWKKEASAFYRKDKARVSRRLSMEFMLSQANKFANYKAIWFPQNMDWRGRVYAVPMFNPQGNDMTKGLLTFAQEKPIGEDGFYWLKIHGANTAGVDKVPFPQRIKFVEDNHTNIMECAKAPLENTWWAEQDSPFCFLAFCFEYAGVINSGLSYNCSLPLAFDGSCSGLQHFSAMLRDEIGGKAVNLLPSAEYQDIYRIVSDKVNEMLKQDLINGTSTTVETVTDKKTGEITQRTKYGTKVMAQWWLEHGVNRGVTKRSVMTLVYGSKEFGFRDQVLSDTIQPAIDNGKGDMFLNPNQAAGYMAKLIWNAVSGTVVAAVEAMNWLKSAAKLLAAEVKDPKTDTVLRGRCAVHWVTPDGFPVWQEYKKPIQTRLNLMFLGQFRLQPTINTNKDSEIDAHKQESGIAPNFVHSQDGNHLRMTVVWAHEKYGIESFALIHDSFGTIPADAANLFKAVRETMVSTYESCDVLADFYDQFADQLHESQLDKMPALPAKGNLNLRDILKSDFAFA

SEQ ID NO: 991 - DNA, 2670 bp, synthetic construct
  misc_feature 1..2670: note = Variant of RNA polymerase
  source 1..2670: mol_type = other DNA
atgcaccatcaccatcaccatatgaacacgattaacattgctaagaacgacttctctgacatcgaactggctgctatcccgttcaacactctggctgaccattacggtgagcgtttagctcgcgaacagttggcccttgagcatgagtcttacgagatgggtgaagcacgcttccgcaagatgtttgagcgtcaacttaaagctggtgaggttgcggataacgctgccgccaagcctctcatcactaccctactccctaagatgattgcacgcatcaacgactggtttgaggaagtgaaagctaagcgcggcaagcgcccgacagccttccagttcctgcaagaaatcaagccggaagccgtagcgtacatcaccattaagaccactctggcttgcctaaccagtgcggacaatacaaccgttcaggctgtagcaagcgcaatcggtcgggccattgaggacgaggctcgcttcggtcgtatccgtgaccttgaagctaagcacttcaagaagaacgttgaggaacaactcaacaagcgcgtagggcacgtctacaagaaagcatttatgcaagttgtcgagcacgacatgctctctaagggtctactcggtggcgaggcgtggtcttcgtggcataaggaagactctattcatgtaggagtacgctgcatcgagatgctcattgagtcaaccggaatggttagcttacaccgccaaaatgctggcgtagtaggtcaagactctgagactatcgaactcgcacctgaatacgctgaggctatcgcaacccgtgcaggtgcgctggctggcatctctccgatgttccaaccttgcgtagttcctcctaagccgtggactggcattactggtggtggctattgggctgcggggcgcaaacccctgcagttagtacgtactcgcagtctggcggcgcttcgccgctatgaagaagtgtcgatgccggaggtcatcaaagcagtcaacattgcgcagaatacagcatggcgtattaacaagaaagttctcgacgtagcgaataccatcacccaatggcagcactgtccagtcgcggatgtgcctgcgatggatcgtggcgaaatgccagctcgtccgttggacatcgataccaacgagattgcacttaaagcgtggaagaaagaagcttccgcgttctaccgcaaagacaaagcacgcgttagccgtcgtctgtcaatggagtttatgttatctcaggcgaacaagtttgcgaattataaagcaatctggtttccgcaaaacatggattggcgtgggcgcgtgtacgctgtcccgatgttcaatcctcagggcaacgatatgacgaaaggcctgctgacctttgcgcaggagaaacccattggtgaagacggcttctattggctcaagattcatggcgcaaatacagctggagtggataaagtaccgtttgggcaacgcatcaaatttgttgaggataaccatacgaatattatggaatgcgcgaaagcaccgctggaaaacacttggtgggcggaacaggactcgccgttctgttttctggcgttctgctttgagtatgctggcgtcatcaatagtggtctgtcgtacaactgtagcttgcctctggcatttgatggtagttgctccggcctgcaacatttctcagcgatgttacgcgacgaaattggcggcaaagctgtgaatctcctcccatctgcggaataccaggatatttatcgtatcgtcagcgacaaagttaacgagatgctgaaacaagatctgattaacggtacctctaccaccgtggaaacggtgactgataagaagacaggcgaaattacccaacgcacgaaatacgggaccaaagttatggcacagtggtggttagaacacggtgtgaatcgtggcgtcacgaaacgctcggttatgactttggtgtatgggagcaaagagtttggattccgcgatcaagtgctgagtgacaccattcaaccggcgatcgataacggcaaaggtgacatgtttctgaatccgaatcaggctgctggttacatggcgaaactgatctggaacgcagtgtccgggaccgtagtcgcagcagttgaggcgatgaactggctgaaaagtgcggcgaaattacttgctgctgaagtgaaggatcctaagacggatacagttctgcgtggccgctgcgcagtacattgggtgactcccgacggcttccctgtgtggcaggaatacaagaagcctattcagacgcgcttgaacctgatgttcctcggtcagttccgcttacagcctaccattaacaccaacaaagatagcgagattgatgcacacaaacaggagtctggtatcgctcctaactttgtacacagccaagacggtaaccaccttcgtatgactgtagtgtgggcacacgagaagtacggaatcgaatcttttgcactgattcacgactccttcggtaccattccggctgacgctgcgaacctgttcaaagcagtgcgcgaaactatggtttcgacatatgagtcttgtgatgtactggctgatttctacgaccagttcgctgaccagttgcacgagtctcaattggacaaaatgccagcacttccggctaaaggtaacttgaacctccgtgacatcttaaaatcggacttcgcgttcgcg

SEQ ID NO: 992 - protein, 890 aa, synthetic construct
  REGION 1..890: note = Variant of RNA polymerase
MHHHHHHMNTINIAKNDFSDIELAAIPFNTLADHYGERLAREQLALEHESYEMGEARFRKMFERQLKAGEVADNAAAKPLITTLLPKMIARINDWFEEVKAKRGKRPTAFQFLQEIKPEAVAYITIKTTLACLTSADNTTVQAVASAIGRAIEDEARFGRIRDLEAKHFKKNVEEQLNKRVGHVYKKAFMQVVEHDMLSKGLLGGEAWSSWHKEDSIHVGVRCIEMLIESTGMVSLHRQNAGVVGQDSETIELAPEYAEAIATRAGALAGISPMFQPCVVPPKPWTGITGGGYWAAGRKPLQLVRTRSLAALRRYEEVSMPEVIKAVNIAQNTAWRINKKVLDVANTITQWQHCPVADVPAMDRGEMPARPLDIDTNEIALKAWKKEASAFYRKDKARVSRRLSMEFMLSQANKFANYKAIWFPQNMDWRGRVYAVPMFNPQGNDMTKGLLTFAQEKPIGEDGFYWLKIHGANTAGVDKVPFGQRIKFVEDNHTNIMECAKAPLENTWWAEQDSPFCFLAFCFEYAGVINSGLSYNCSLPLAFDGSCSGLQHFSAMLRDEIGGKAVNLLPSAEYQDIYRIVSDKVNEMLKQDLINGTSTTVETVTDKKTGEITQRTKYGTKVMAQWWLEHGVNRGVTKRSVMTLVYGSKEFGFRDQVLSDTIQPAIDNGKGDMFLNPNQAAGYMAKLIWNAVSGTVVAAVEAMNWLKSAAKLLAAEVKDPKTDTVLRGRCAVHWVTPDGFPVWQEYKKPIQTRLNLMFLGQFRLQPTINTNKDSEIDAHKQESGIAPNFVHSQDGNHLRMTVVWAHEKYGIESFALIHDSFGTIPADAANLFKAVRETMVSTYESCDVLADFYDQFADQLHESQLDKMPALPAKGNLNLRDILKSDFAFA

SEQ ID NO: 993 - DNA, 2670 bp, synthetic construct
  misc_feature 1..2670: note = Variant of RNA polymerase
  source 1..2670: mol_type = other DNA
atgcaccatcaccatcaccatatgaacacgattaacattgctaagaacgacttctctgacatcgaactggctgctatcccgttcaacactctggctgaccattacggtgagcgtttagctcgcgaacagttggcccttgagcatgagtcttacgagatgggtgaagcacgcttccgcaagatgtttgagcgtcaacttaaagctggtgaggttgcggataacgctgccgccaagcctctcatcactaccctactccctaagatgattgcacgcatcaacgactggtttgaggaagtgaaagctaagcgcggcaagcgcccgacagccttccagttcctgcaagaaatcaagccggaagccgtagcgtacatcaccattaagaccactctggcttgcctaaccagtgcggacaatacaaccgttcaggctgtagcaagcgcaatcggtcgggccattgaggacgaggctcgcttcggtcgtatccgtgaccttgaagctaagcacttcaagaagaacgttgaggaacaactcaacaagcgcgtagggcacgtctacaagaaagcatttatgcaagttgtcgagcacgacatgctctctaagggtctactcggtggcgaggcgtggtcttcgtggcataaggaagactctattcatgtaggagtacgctgcatcgagatgctcattgagtcaaccggaatggttagcttacaccgccaaaatgctggcgtagtaggtcaagactctgagactatcgaactcgcacctgaatacgctgaggctatcgcaacccgtgcaggtgcgctggctggcatctctccgatgttccaaccttgcgtagttcctcctaagccgtggactggcattactggtggtggctattgggctgcggggcgcaaacccctgcagttagtacgtactcgcagtctggcggcgcttcgccgctatgaagaagtgtcgatgccggaggtcatcaaagcagtcaacattgcgcagaatacagcatggcgtattaacaagaaagttctcgacgtagcgaataccatcacccaatggcagcactgtccagtcgcggatgtgcctgcgatggatcgtggcgaaatgccagctcgtccgttggacatcgataccaacgagattgcacttaaagcgtggaagaaagaagcttccgcgttctaccgcaaagacaaagcacgcgttagccgtcgtctgtcaatggagtttatgttatctcaggcgaacaagtttgcgaattataaacatatctggtttccgcaaaacatggattggcgtgggcgcgtgtacgctgtcccgatgttcaatcctcagggcaacgatatgacgaaaggcctgctgacctttgcgcaggagaaacccattggtgaagacggcttctattggctcaagattcatggcgcaaatacagctggagtggataaagtaccgtttccacaacgcatcaaatttgttgaggataaccatacgaatattatggaatgcgcgaaagcaccgctggaaaacacttggtgggcggaacaggactcgccgttctgttttctggcgttctgctttgagtatgctggcgtcatcaatagtggtctgtcgtacaactgtagcttgcctctggcatttgatggtagttgctccggcctgcaacatttctcagcgatgttacgcgacgaaattggcggcaaagctgtgaatctcctcccatctgcggaataccaggatatttatcgtatcgtcagcgacaaagttaacgagatgctgaaacaagatctgattaacggtacctctaccaccgtggaaacggtgactgataagaagacaggcgaaattacccaacgcacgaaatacgggaccaaagttatggcacagtggtggttagaacacggtgtgaatcgtggcgtcacgaaacgctcggttatgactttggtgtatgggagcaaagagtttggattccgcgatcaagtgctgagtgacaccattcaaccggcgatcgataacggcaaaggtgacatgtttctgaatccgaatcaggctgctggttacatggcgaaactgatctggaacgcagtgtccgggaccgtagtcgcagcagttgaggcgatgaactggctgaaaagtgcggcgaaattacttgctgctgaagtgaaggatcctaagacggatacagttctgcgtggccgctgcgcagtacattgggtgactcccgacggcttccctgtgtggcaggaatacaagaagcctattcagacgcgcttgaacctgatgttcctcggtcagttccgcttacagcctaccattaacaccaacaaagatagcgagattgatgcacacaaacaggagtctggtatcgctcctaactttgtacacagccaagacggtaaccaccttcgtatgactgtagtgtgggcacacgagaagtacggaatcgaatcttttgcactgattcacgactccttcggtaccattccggctgacgctgcgaacctgttcaaagcagtgcgcgaaactatggtttcgacatatgagtcttgtgatgtactggctgatttctacgaccagttcgctgaccagttgcacgagtctcaattggacaaaatgccagcacttccggctaaaggtaacttgaacctccgtgacatcttaaaatcggacttcgcgttcgcg

SEQ ID NO: 994 - protein, 890 aa, synthetic construct
  REGION 1..890: note = Variant of RNA polymerase
MHHHHHHMNTINIAKNDFSDIELAAIPFNTLADHYGERLAREQLALEHESYEMGEARFRKMFERQLKAGEVADNAAAKPLITTLLPKMIARINDWFEEVKAKRGKRPTAFQFLQEIKPEAVAYITIKTTLACLTSADNTTVQAVASAIGRAIEDEARFGRIRDLEAKHFKKNVEEQLNKRVGHVYKKAFMQVVEHDMLSKGLLGGEAWSSWHKEDSIHVGVRCIEMLIESTGMVSLHRQNAGVVGQDSETIELAPEYAEAIATRAGALAGISPMFQPCVVPPKPWTGITGGGYWAAGRKPLQLVRTRSLAALRRYEEVSMPEVIKAVNIAQNTAWRINKKVLDVANTITQWQHCPVADVPAMDRGEMPARPLDIDTNEIALKAWKKEASAFYRKDKARVSRRLSMEFMLSQANKFANYKHIWFPQNMDWRGRVYAVPMFNPQGNDMTKGLLTFAQEKPIGEDGFYWLKIHGANTAGVDKVPFPQRIKFVEDNHTNIMECAKAPLENTWWAEQDSPFCFLAFCFEYAGVINSGLSYNCSLPLAFDGSCSGLQHFSAMLRDEIGGKAVNLLPSAEYQDIYRIVSDKVNEMLKQDLINGTSTTVETVTDKKTGEITQRTKYGTKVMAQWWLEHGVNRGVTKRSVMTLVYGSKEFGFRDQVLSDTIQPAIDNGKGDMFLNPNQAAGYMAKLIWNAVSGTVVAAVEAMNWLKSAAKLLAAEVKDPKTDTVLRGRCAVHWVTPDGFPVWQEYKKPIQTRLNLMFLGQFRLQPTINTNKDSEIDAHKQESGIAPNFVHSQDGNHLRMTVVWAHEKYGIESFALIHDSFGTIPADAANLFKAVRETMVSTYESCDVLADFYDQFADQLHESQLDKMPALPAKGNLNLRDILKSDFAFA

SEQ ID NO: 995 - DNA, 2670 bp, synthetic construct
  misc_feature 1..2670: note = Variant of RNA polymerase
  source 1..2670: mol_type = other DNA
atgcaccatcaccatcaccatatgaacacgattaacattgctaagaacgacttctctgacatcgaactggctgctatcccgttcaacactctggctgaccattacggtgagcgtttagctcgcgaacagttggcccttgagcatgagtcttacgagatgggtgaagcacgcttccgcaagatgtttgagcgtcaacttaaagctggtgaggttgcggataacgctgccgccaagcctctcatcactaccctactccctaagatgattgcacgcatcaacgactggtttgaggaagtgaaagctaagcgcggcaagcgcccgacagccttccagttcctgcaagaaatcaagccggaagccgtagcgtacatcaccattaagaccactctggcttgcctaaccagtgcggacaatacaaccgttcaggctgtagcaagcgcaatcggtcgggccattgaggacgaggctcgcttcggtcgtatccgtgaccttgaagctaagcacttcaagaagaacgttgaggaacaactcaacaagcgcgtagggcacgtctacaagaaagcatttatgcaagttgtcgagcacgacatgctctctaagggtctactcggtggcgaggcgtggtcttcgtggcataaggaagactctattcatgtaggagtacgctgcatcgagatgctcattgagtcaaccggaatggttagcttacaccgccaaaatgctggcgtagtaggtcaagactctgagactatcgaactcgcacctgaatacgctgaggctatcgcaacccgtgcaggtgcgctggctggcatctctccgatgttccaaccttgcgtagttcctcctaagccgtggactggcattactggtggtggctattgggctgcggggcgcaaacccctgcagttagtacgtactcgcagtctggcggcgcttcgccgctatgaagaagtgtcgatgccggaggtcatcaaagcagtcaacattgcgcagaatacagcatggcgtattaacaagaaagttctcgacgtagcgaataccatcacccaatggcagcactgtccagtcgcggatgtgcctgcgatggatcgtggcgaaatgccagctcgtccgttggacatcgataccaacgagattgcacttaaagcgtggaagaaagaagcttccgcgttctaccgcaaagacaaagcacgcgttagccgtcgtctgtcaatggagtttatgttatctcaggcgaacaagttttcgaattataaagcaatctggtttccgcaaaacatggattggcgtgggcgcgtgtacgctgtcccgatgttcaatcctcagggcaacgatatgacgaaaggcctgctgacctttgcgcaggagaaacccattggtgaagacggcttctattggctcaagattcatggcgcaaatacagctggagtggataaagtaccgtttccacaacgcatcaaatttgttgaggataaccatacgaatattatggaatgcgcgaaagcaccgctggaaaacacttggtgggcggaacaggactcgccgttctgttttctggcgttctgctttgagtatgctggcgtcatcaatagtggtctgtcgtacaactgtagcttgcctctggcatttgatggtagttgctccggcctgcaacatttctcagcgatgttacgcgacgaaattggcggcaaagctgtgaatctcctcccatctgcggaataccaggatatttatcgtatcgtcagcgacaaagttaacgagatgctgaaacaagatctgattaacggtacctctaccaccgtggaaacggtgactgataagaagacaggcgaaattacccaacgcacgaaatacgggaccaaagttatggcacagtggtggttagaacacggtgtgaatcgtggcgtcacgaaacgctcggttatgactttggtgtatgggagcaaagagtttggattccgcgatcaagtgctgagtgacaccattcaaccggcgatcgataacggcaaaggtgacatgtttctgaatccgaatcaggctgctggttacatggcgaaactgatctggaacgcagtgtccgggaccgtagtcgcagcagttgaggcgatgaactggctgaaaagtgcggcgaaattacttgctgctgaagtgaaggatcctaagacggatacagttctgcgtggccgctgcgcagtacattgggtgactcccgacggcttccctgtgtggcaggaatacaagaagcctattcagacgcgcttgaacctgatgttcctcggtcagttccgcttacagcctaccattaacaccaacaaagatagcgagattgatgcacacaaacaggagtctggtatcgctcctaactttgtacacagccaagacggtaaccaccttcgtatgactgtagtgtgggcacacgagaagtacggaatcgaatcttttgcactgattcacgactccttcggtaccattccggctgacgctgcgaacctgttcaaagcagtgcgcgaaactatggtttcgacatatgagtcttgtgatgtactggctgatttctacgaccagttcgctgaccagttgcacgagtctcaattggacaaaatgccagcacttccggctaaaggtaacttgaacctccgtgacatcttaaaatcggacttcgcgttcgcg

SEQ ID NO: 996 - protein, 890 aa, synthetic construct
  REGION 1..890: note = Variant of RNA polymerase
MHHHHHHMNTINIAKNDFSDIELAAIPFNTLADHYGERLAREQLALEHESYEMGEARFRKMFERQLKAGEVADNAAAKPLITTLLPKMIARINDWFEEVKAKRGKRPTAFQFLQEIKPEAVAYITIKTTLACLTSADNTTVQAVASAIGRAIEDEARFGRIRDLEAKHFKKNVEEQLNKRVGHVYKKAFMQVVEHDMLSKGLLGGEAWSSWHKEDSIHVGVRCIEMLIESTGMVSLHRQNAGVVGQDSETIELAPEYAEAIATRAGALAGISPMFQPCVVPPKPWTGITGGGYWAAGRKPLQLVRTRSLAALRRYEEVSMPEVIKAVNIAQNTAWRINKKVLDVANTITQWQHCPVADVPAMDRGEMPARPLDIDTNEIALKAWKKEASAFYRKDKARVSRRLSMEFMLSQANKFSNYKAIWFPQNMDWRGRVYAVPMFNPQGNDMTKGLLTFAQEKPIGEDGFYWLKIHGANTAGVDKVPFPQRIKFVEDNHTNIMECAKAPLENTWWAEQDSPFCFLAFCFEYAGVINSGLSYNCSLPLAFDGSCSGLQHFSAMLRDEIGGKAVNLLPSAEYQDIYRIVSDKVNEMLKQDLINGTSTTVETVTDKKTGEITQRTKYGTKVMAQWWLEHGVNRGVTKRSVMTLVYGSKEFGFRDQVLSDTIQPAIDNGKGDMFLNPNQAAGYMAKLIWNAVSGTVVAAVEAMNWLKSAAKLLAAEVKDPKTDTVLRGRCAVHWVTPDGFPVWQEYKKPIQTRLNLMFLGQFRLQPTINTNKDSEIDAHKQESGIAPNFVHSQDGNHLRMTVVWAHEKYGIESFALIHDSFGTIPADAANLFKAVRETMVSTYESCDVLADFYDQFADQLHESQLDKMPALPAKGNLNLRDILKSDFAFA

SEQ ID NO: 997 - DNA, 2670 bp, synthetic construct
  misc_feature 1..2670: note = Variant of RNA polymerase
  source 1..2670: mol_type = other DNA
atgcaccatcaccatcaccatatgaacacgattaacattgctaagaacgacttctctgacatcgaactggctgctcagccgttcaacactctggctgaccattacggtgagcgtttagctcgcgaacagttggcccttgagcatgagtcttacgagatgggtgaagcacgcttccgcaagatgtttgagcgtcaacttaaagctggtgaggttgcggataacgctgccgccaagcctctcatcactaccctactccctaagatgattgcacgcatcaacgactggtttgaggaagtgaaagctaagcgcggcaagcgcccgacagccttccagttcctgcaagaaatcaagccggaagccgtagcgtacatcaccattaagaccactctggcttgcctaaccagtgcggacaatacaaccgttcaggctgtagcaagcgcaatcggtcgggccattgaggacgaggctcgcttcggtcgtatccgtgaccttgaagctaagcacttcaagaagaacgttgaggaacaactcaacaagcgcgtagggcacgtctacaagaaagcatttatgcaagttgtcgagcacgacatgctctctaagggtctactcggtggcgaggcgtggtcttcgtggcataaggaagactctattcatgtaggagtacgctgcatcgagatgctcattgagtcaaccggaatggttagcttacaccgccaaaatgctggcgtagtaggtcaagactctgagactatcgaactcgcacctgaatacgctgaggctatcgcaacccgtgcaggtgcgctggctggcatctctccgatgttccaaccttgcgtagttcctcctaagccgtggactggcattactggtggtggctattgggctgcggggcgcaaacccctgcagttagtacgtactcgcagtctggcggcgcttcgccgctatgaagaagtgtcgatgccggaggtcatcaaagcagtcaacattgcgcagaatacagcatggcgtattaacaagaaagttctcgacgtagcgaataccatcacccaatggcagcactgtccagtcgcggatgtgcctgcgatggatcgtggcgaaatgccagctcgtccgttggacatcgataccaacgagattgcacttaaagcgtggaagaaagaagcttccgcgttctaccgcaaagacaaagcacgcgttagccgtcgtctgtcaatggagtttatgttatctcaggcgaacaagtttgcgaattataaagcaatctggtttccgcaaaacatggattggcgtgggcgcgtgtacgctgtcccgatgttcaatcctcagggcaacgatatgacgaaaggcctgctgacctttgcgcaggagaaacccattggtgaagacggcttctattggctcaagattcatggcgcaaatacagctggagtggataaagtaccgtttccacaacgcatcaaatttgttgaggataaccatacgaatattatggaatgcgcgaaagcaccgctggaaaacacttggtgggcggaacaggactcgccgttctgttttctggcgttctgctttgagtatgctggcgtcatcaatagtggtctgtcgtacaactgtagcttgcctctggcatttgatggtagttgctccggcctgcaacatttctcagcgatgttacgcgacgaaattggcggcaaagctgtgaatctcctcccatctgcggaataccaggatatttatcgtatcgtcagcgacaaagttaacgagatgctgaaacaagatctgattaacggtacctctaccaccgtggaaacggtgactgataagaagacaggcgaaattacccaacgcacgaaatacgggaccaaagttatggcacagtggtggttagaacacggtgtgaatcgtggcgtcacgaaacgctcggttatgactttggtgtatgggagcaaagagtttggattccgcgatcaagtgctgagtgacaccattcaaccggcgatcgataacggcaaaggtgacatgtttctgaatccgaatcaggctgctggttacatggcgaaactgatctggaacgcagtgtccgggaccgtagtcgcagcagttgaggcgatgaactggctgaaaagtgcggcgaaattacttgctgctgaagtgaaggatcctaagacggatacagttctgcgtggccgctgcgcagtacattgggtgactcccgacggcttccctgtgtggcaggaatacaagaagcctattcagacgcgcttgaacctgatgttcctcggtcagttccgcttacagcctaccattaacaccaacaaagatagcgagattgatgcacacaaacaggagtctggtatcgctcctaactttgtacacagccaagacggtaaccaccttcgtatgactgtagtgtgggcacacgagaagtacggaatcgaatcttttgcactgattcacgactccttcggtaccattccggctgacgctgcgaacctgttcaaagcagtgcgcgaaactatggtttcgacatatgagtcttgtgatgtactggctgatttctacgaccagttcgctgaccagttgcacgagtctcaattggacaaaatgccagcacttccggctaaaggtaacttgaacctccgtgacatcttaaaatcggacttcgcgttcgcg

SEQ ID NO: 998 - protein, 890 aa, synthetic construct
  REGION 1..890: note = Variant of RNA polymerase
MHHHHHHMNTINIAKNDFSDIELAAQPFNTLADHYGERLAREQLALEHESYEMGEARFRKMFERQLKAGEVADNAAAKPLITTLLPKMIARINDWFEEVKAKRGKRPTAFQFLQEIKPEAVAYITIKTTLACLTSADNTTVQAVASAIGRAIEDEARFGRIRDLEAKHFKKNVEEQLNKRVGHVYKKAFMQVVEHDMLSKGLLGGEAWSSWHKEDSIHVGVRCIEMLIESTGMVSLHRQNAGVVGQDSETIELAPEYAEAIATRAGALAGISPMFQPCVVPPKPWTGITGGGYWAAGRKPLQLVRTRSLAALRRYEEVSMPEVIKAVNIAQNTAWRINKKVLDVANTITQWQHCPVADVPAMDRGEMPARPLDIDTNEIALKAWKKEASAFYRKDKARVSRRLSMEFMLSQANKFANYKAIWFPQNMDWRGRVYAVPMFNPQGNDMTKGLLTFAQEKPIGEDGFYWLKIHGANTAGVDKVPFPQRIKFVEDNHTNIMECAKAPLENTWWAEQDSPFCFLAFCFEYAGVINSGLSYNCSLPLAFDGSCSGLQHFSAMLRDEIGGKAVNLLPSAEYQDIYRIVSDKVNEMLKQDLINGTSTTVETVTDKKTGEITQRTKYGTKVMAQWWLEHGVNRGVTKRSVMTLVYGSKEFGFRDQVLSDTIQPAIDNGKGDMFLNPNQAAGYMAKLIWNAVSGTVVAAVEAMNWLKSAAKLLAAEVKDPKTDTVLRGRCAVHWVTPDGFPVWQEYKKPIQTRLNLMFLGQFRLQPTINTNKDSEIDAHKQESGIAPNFVHSQDGNHLRMTVVWAHEKYGIESFALIHDSFGTIPADAANLFKAVRETMVSTYESCDVLADFYDQFADQLHESQLDKMPALPAKGNLNLRDILKSDFAFA

SEQ ID NO: 999 - DNA, 2670 bp, synthetic construct
  misc_feature 1..2670: note = Variant of RNA polymerase
  source 1..2670: mol_type = other DNA
atgcaccatcaccatcaccatatgaacacgattaacattgctaagaacgacttctctgacatcgaactggctgctatcccgttcaacactctggctgaccattacggtgagcgtttagctcgcgaacagttggcccttgagcatgagtcttacgagatgggtgaagcacgcttccgcaagatgtttgagcgtcaacttaaagctggtgaggttgcggataacgctgccgccaagcctctcatcactaccctactccctaagatgattgcacgcatcaacgactggtttgaggaagtgaaagctaagcgcggcaagcgcccgacagccttccagttcctgcaagaaatcaagccggaagccgtagcgtacatcaccattaagaccactctggcttgcctaaccagtgcggacaatacaaccgttcaggctgtagcaagcgcaatcggtcgggccattgaggacgaggctcgcttcggtcgtatccgtgaccttgaagctaagcacttcaagaagaacgttgaggaacaactcaacaagcgcgtagggcacgtctacaagaaagcatttatgcaagttgtcgagcacgacatgctctctaagggtctactcggtggcgaggcgtggtcttcgtggcataaggaagactctattcatgtaggagtacgctgcatcgagatgctcattgagtcaaccggaatggttagcttacaccgccaaaatgctggcgtagtaggtcaagactctgagactatcgaactcgcacctgaatacgctgaggctatcgcaacccgtgcaggtgcgctggctggcatctctccgatgttccaaccttgcgtagttcctcctaagccgtggactggcattactggtggtggctattgggctgcggggcgcaaacccctgcagttagtacgtactcgcagtctggcggcgcttcgccgctatgaagaagtgtcgatgccggaggtcatcaaagcagtcaacattgcgcagaatacagcatggcgtattaacaagaaagttctcgacgtagcgaataccatcacccaatggcagcactgtccagtcgcggatgtgcctgcgatggatcgtggcgaaatgccagctcgtccgttggacatcgataccaacgagattgcacttaaagcgtggaagaaagaagcttccgcgttctaccgcaaagacaaagcacgcgttagccgtcgtctgtcaatggagtttatgttatctcaggcgaacaagtttgcgaattataaagcaatctggtttccgcaaaacatggattggcgtgggcgcgtgtacgctgtcccgatgttcaatcctcagggcaacgatatgacgaaaggcctgctgacctttgcgcaggagaaacccattggtgaagacggcttctattggctcaagattcatggcgcaaatacagctggagtggataaagtaccgtttccacaacgcatcaaatttgttgaggataaccatacgaatattatggaatgcgcgaaagcaccgctggaaaacacttggtgggcggaacaggactcgccgttctgttttctggcgttctgctttgagtatgctggcgtcatcaatagtggtctgtcgtacaactgtagcttgcctctggcatttgatggtagttgctccggcctgcaacatttctcagcgatgttacgcgacgaaattggcggcaaagctgtgaatctcctcccatctgcggaataccaggatatttatcgtatcgtcagcgacaaagttaacgagatgctgaaacaagatctgattaacggtacctctaccaccgtggaaacggtgactgataagaagacaggcgaaattacccaacgcacgaaatacgggaccaaagttatggcacagtggtggttagaacacggtgtgaatcgtggcgtcacgaaacgctcggttatgactttggtgtatgggagcaaagagtttggattccgcgatcaagtgctgagtgacaccattcaaccggcgatcgataacggcaggggtgacatgtttctgaatccgaatcaggctgctggttacatggcgaaactgatctggaacgcagtgtccgggaccgtagtcgcagcagttgaggcgatgaactggctgaaaagtgcggcgaaattacttgctgctgaagtgaaggatcctaagacggatacagttctgcgtggccgctgcgcagtacattgggtgactcccgacggcttccctgtgtggcaggaatacaagaagcctattcagacgcgcttgaacctgatgttcctcggtcagttccgcttacagcctaccattaacaccaacaaagatagcgagattgatgcacacaaacaggagtctggtatcgctcctaactttgtacacagccaagacggtaaccaccttcgtatgactgtagtgtgggcacacgagaagtacggaatcgaatcttttgcactgattcacgactccttcggtaccattccggctgacgctgcgaacctgttcaaagcagtgcgcgaaactatggtttcgacatatgagtcttgtgatgtactggctgatttctacgaccagttcgctgaccagttgcacgagtctcaattggacaaaatgccagcacttccggctaaaggtaacttgaacctccgtgacatcttaaaatcggacttcgcgttcgcg

SEQ ID NO: 1000 - protein, 890 aa, synthetic construct
  REGION 1..890: note = Variant of RNA polymerase
MHHHHHHMNTINIAKNDFSDIELAAIPFNTLADHYGERLAREQLALEHESYEMGEARFRKMFERQLKAGEVADNAAAKPLITTLLPKMIARINDWFEEVKAKRGKRPTAFQFLQEIKPEAVAYITIKTTLACLTSADNTTVQAVASAIGRAIEDEARFGRIRDLEAKHFKKNVEEQLNKRVGHVYKKAFMQVVEHDMLSKGLLGGEAWSSWHKEDSIHVGVRCIEMLIESTGMVSLHRQNAGVVGQDSETIELAPEYAEAIATRAGALAGISPMFQPCVVPPKPWTGITGGGYWAAGRKPLQLVRTRSLAALRRYEEVSMPEVIKAVNIAQNTAWRINKKVLDVANTITQWQHCPVADVPAMDRGEMPARPLDIDTNEIALKAWKKEASAFYRKDKARVSRRLSMEFMLSQANKFANYKAIWFPQNMDWRGRVYAVPMFNPQGNDMTKGLLTFAQEKPIGEDGFYWLKIHGANTAGVDKVPFPQRIKFVEDNHTNIMECAKAPLENTWWAEQDSPFCFLAFCFEYAGVINSGLSYNCSLPLAFDGSCSGLQHFSAMLRDEIGGKAVNLLPSAEYQDIYRIVSDKVNEMLKQDLINGTSTTVETVTDKKTGEITQRTKYGTKVMAQWWLEHGVNRGVTKRSVMTLVYGSKEFGFRDQVLSDTIQPAIDNGRGDMFLNPNQAAGYMAKLIWNAVSGTVVAAVEAMNWLKSAAKLLAAEVKDPKTDTVLRGRCAVHWVTPDGFPVWQEYKKPIQTRLNLMFLGQFRLQPTINTNKDSEIDAHKQESGIAPNFVHSQDGNHLRMTVVWAHEKYGIESFALIHDSFGTIPADAANLFKAVRETMVSTYESCDVLADFYDQFADQLHESQLDKMPALPAKGNLNLRDILKSDFAFA

SEQ ID NO: 1001 - DNA, 2670 bp, synthetic construct
  misc_feature 1..2670: note = Variant of RNA polymerase
  source 1..2670: mol_type = other DNA
atgcaccatcaccatcaccatatgaacacgattaacattgctaagaacgacttctctgacatcgaactggctgctatcccgttcaacactctggctgaccattacggtgagcgtttagctcgcgaacagttggcccttgagcatgagtcttacgagatgggtgaagcacgcttccgcaagatgtttgagcgtcaacttaaagctggtgaggttgcggataacgctgccgccaagcctctcatcactaccctactccctaagatgattgcacgcatcaacgactggtttgaggaagtgaaagctaagcgcggcaagcgcccgacagccttccagttcctgcaagaaatcaagccggaagccgtagcgtacatcaccattaagaccactctggcttgcctaaccagtgcggacaatacaaccgttcaggctgtagcaagcgcaatcggtcgggccattgaggacgaggctcgcttcggtcgtatccgtgaccttgaagctaagcacttcaagaagaacgttgaggaacaactcaacaaggtggtagggcacgtctacaagaaagcatttatgcaagttgtcgagcacgacatgctctctaagggtctactcggtggcgaggcgtggtcttcgtggcataaggaagactctattcatgtaggagtacgctgcatcgagatgctcattgagtcaaccggaatggttagcttacaccgccaaaatgctggcgtagtaggtcaagactctgagactatcgaactcgcacctgaatacgctgaggctatcgcaacccgtgcaggtgcgctggctggcatctctccgatgttccaaccttgcgtagttcctcctaagccgtggactggcattactggtggtggctattgggctgcggggcgcaaacccctgcagttagtacgtactcgcagtctggcggcgcttcgccgctatgaagaagtgtcgatgccggaggtcatcaaagcagtcaacattgcgcagaatacagcatggcgtattaacaagaaagttctcgacgtagcgaataccatcacccaatggcagcactgtccagtcgcggatgtgcctgcgatggatcgtggcgaaatgccagctcgtccgttggacatcgataccaacgagattgcacttaaagcgtggaagaaagaagcttccgcgttctaccgcaaagacaaagcacgcgttagccgtcgtctgtcaatggagtttatgttatctcaggcgaacaagtttgcgaattataaagcaatctggtttccgcaaaacatggattggcgtgggcgcgtgtacgctgtcccgatgttcaatcctcagggcaacgatatgacgaaaggcctgctgacctttgcgcaggagaaacccattggtgaagacggcttctattggctcaagattcatggcgcaaatacagctggagtggataaagtaccgtttccacaacgcatcaaatttgttgaggataaccatacgaatattatggaatgcgcgaaagcaccgctggaaaacacttggtgggcggaacaggactcgccgttctgttttctggcgttctgctttgagtatgctggcgtcatcaatagtggtctgtcgtacaactgtagcttgcctctggcatttgatggtagttgctccggcctgcaacatttctcagcgatgttacgcgacgaaattggcggcaaagctgtgaatctcctcccatctgcggaataccaggatatttatcgtatcgtcagcgacaaagttaacgagatgctgaaacaagatctgattaacggtacctctaccaccgtggaaacggtgactgataagaagacaggcgaaattacccaacgcacgaaatacgggaccaaagttatggcacagtggtggttagaacacggtgtgaatcgtggcgtcacgaaacgctcggttatgactttggtgtatgggagcaaagagtttggattccgcgatcaagtgctgagtgacaccattcaaccggcgatcgataacggcaaaggtgacatgtttctgaatccgaatcaggctgctggttacatggcgaaactgatctggaacgcagtgtccgggaccgtagtcgcagcagttgaggcgatgaactggctgaaaagtgcggcgaaattacttgctgctgaagtgaaggatcctaagacggatacagttctgcgtggccgctgcgcagtacattgggtgactcccgacggcttccctgtgtggcaggaatacaagaagcctattcagacgcgcttgaacctgatgttcctcggtcagttccgcttacagcctaccattaacaccaacaaagatagcgagattgatgcacacaaacaggagtctggtatcgctcctaactttgtacacagccaagacggtaaccaccttcgtatgactgtagtgtgggcacacgagaagtacggaatcgaatcttttgcactgattcacgactccttcggtaccattccggctgacgctgcgaacctgttcaaagcagtgcgcgaaactatggtttcgacatatgagtcttgtgatgtactggctgatttctacgaccagttcgctgaccagttgcacgagtctcaattggacaaaatgccagcacttccggctaaaggtaacttgaacctccgtgacatcttaaaatcggacttcgcgttcgcg

SEQ ID NO: 1002 - protein, 890 aa, synthetic construct
  REGION 1..890: note = Variant of RNA polymerase
MHHHHHHMNTINIAKNDFSDIELAAIPFNTLADHYGERLAREQLALEHESYEMGEARFRKMFERQLKAGEVADNAAAKPLITTLLPKMIARINDWFEEVKAKRGKRPTAFQFLQEIKPEAVAYITIKTTLACLTSADNTTVQAVASAIGRAIEDEARFGRIRDLEAKHFKKNVEEQLNKVVGHVYKKAFMQVVEHDMLSKGLLGGEAWSSWHKEDSIHVGVRCIEMLIESTGMVSLHRQNAGVVGQDSETIELAPEYAEAIATRAGALAGISPMFQPCVVPPKPWTGITGGGYWAAGRKPLQLVRTRSLAALRRYEEVSMPEVIKAVNIAQNTAWRINKKVLDVANTITQWQHCPVADVPAMDRGEMPARPLDIDTNEIALKAWKKEASAFYRKDKARVSRRLSMEFMLSQANKFANYKAIWFPQNMDWRGRVYAVPMFNPQGNDMTKGLLTFAQEKPIGEDGFYWLKIHGANTAGVDKVPFPQRIKFVEDNHTNIMECAKAPLENTWWAEQDSPFCFLAFCFEYAGVINSGLSYNCSLPLAFDGSCSGLQHFSAMLRDEIGGKAVNLLPSAEYQDIYRIVSDKVNEMLKQDLINGTSTTVETVTDKKTGEITQRTKYGTKVMAQWWLEHGVNRGVTKRSVMTLVYGSKEFGFRDQVLSDTIQPAIDNGKGDMFLNPNQAAGYMAKLIWNAVSGTVVAAVEAMNWLKSAAKLLAAEVKDPKTDTVLRGRCAVHWVTPDGFPVWQEYKKPIQTRLNLMFLGQFRLQPTINTNKDSEIDAHKQESGIAPNFVHSQDGNHLRMTVVWAHEKYGIESFALIHDSFGTIPADAANLFKAVRETMVSTYESCDVLADFYDQFADQLHESQLDKMPALPAKGNLNLRDILKSDFAFA

SEQ ID NO: 1003 - DNA, 2670 bp, synthetic construct
  misc_feature 1..2670: note = Variant of RNA polymerase
  source 1..2670: mol_type = other DNA
atgcaccatcaccatcaccatatgaacacgattaacattgctaagaacgacttctctgacatcgaactggctgctatcccgttcaacactctggctgaccattacggtgagcgtttagctcgcgaacagttggcccttgagcatgagtcttacgagatgggtgaagcacgcttccgcaagatgtttgagcgtcaacttaaagctggtgaggttgcggataacgctgccgccaagcctctcatcactaccctactccctaagatgattgcacgcatcaacgactggtttgaggaagtgaaagctaagcgcggcaagcgcccgacagccttccagttcctgcaagaaatcaagccggaagccgtagcgtacatcaccattaagaccactctggcttgcctaaccagtgcggacaatacaaccgttcaggctgtagcaagcgcaatcggtcgggccattgaggacgaggctcgcttcggtcgtatccgtgaccttgaagctaagcacttcaagaagaacgttgaggaacaactcaacaagcgcgtagggcacgtctacaagaaagcatttatgcaagttgtcgagcacgacatgctctctaagggtctactcggtggcgaggcgtggtcttcgtggcataaggaagactctattcatgtaggagtacgctgcatcgagatgctcattgagtcaaccggaatggttagcttacaccgccaaaatgctggcgtagtaggtcaagactctgagactatcgaactcgcacctgaatacgctgaggctatcgcaacccgtgcaggtgcgctggttggcatctctccgatgttccaaccttgcgtagttcctcctaagccgtggactggcattactggtggtggctattgggctgcggggcgcaaacccctgcagttagtacgtactcgcagtctggcggcgcttcgccgctatgaagaagtgtcgatgccggaggtcatcaaagcagtcaacattgcgcagaatacagcatggcgtattaacaagaaagttctcgacgtagcgaataccatcacccaatggcagcactgtccagtcgcggatgtgcctgcgatggatcgtggcgaaatgccagctcgtccgttggacatcgataccaacgagattgcacttaaagcgtggaagaaagaagcttccgcgttctaccgcaaagacaaagcacgcgttagccgtcgtctgtcaatggagtttatgttatctcaggcgaacaagtttgcgaattataaagcaatctggtttccgcaaaacatggattggcgtgggcgcgtgtacgctgtcccgatgttcaatcctcagggcaacgatatgacgaaaggcctgctgacctttgcgcaggagaaacccattggtgaagacggcttctattggctcaagattcatggcgcaaatacagctggagtggataaagtaccgtttccacaacgcatcaaatttgttgaggataaccatacgaatattatggaatgcgcgaaagcaccgctggaaaacacttggtgggcggaacaggactcgccgttctgttttctggcgttctgctttgagtatgctggcgtcatcaatagtggtctgtcgtacaactgtagcttgcctctggcatttgatggtagttgctccggcctgcaacatttctcagcgatgttacgcgacgaaattggcggcaaagctgtgaatctcctcccatctgcggaataccaggatatttatcgtatcgtcagcgacaaagttaacgagatgctgaaacaagatctgattaacggtacctctaccaccgtggaaacggtgactgataagaagacaggcgaaattacccaacgcacgaaatacgggaccaaagttatggcacagtggtggttagaacacggtgtgaatcgtggcgtcacgaaacgctcggttatgactttggtgtatgggagcaaagagtttggattccgcgatcaagtgctgagtgacaccattcaaccggcgatcgataacggcaaaggtgacatgtttctgaatccgaatcaggctgctggttacatggcgaaactgatctggaacgcagtgtccgggaccgtagtcgcagcagttgaggcgatgaactggctgaaaagtgcggcgaaattacttgctgctgaagtgaaggatcctaagacggatacagttctgcgtggccgctgcgcagtacattgggtgactcccgacggcttccctgtgtggcaggaatacaagaagcctattcagacgcgcttgaacctgatgttcctcggtcagttccgcttacagcctaccattaacaccaacaaagatagcgagattgatgcacacaaacaggagtctggtatcgctcctaactttgtacacagccaagacggtaaccaccttcgtatgactgtagtgtgggcacacgagaagtacggaatcgaatcttttgcactgattcacgactccttcggtaccattccggctgacgctgcgaacctgttcaaagcagtgcgcgaaactatggtttcgacatatgagtcttgtgatgtactggctgatttctacgaccagttcgctgaccagttgcacgagtctcaattggacaaaatgccagcacttccggctaaaggtaacttgaacctccgtgacatcttaaaatcggacttcgcgttcgcg

SEQ ID NO: 1004 - protein, 890 aa, synthetic construct
  REGION 1..890: note = Variant of RNA polymerase
MHHHHHHMNTINIAKNDFSDIELAAIPFNTLADHYGERLAREQLALEHESYEMGEARFRKMFERQLKAGEVADNAAAKPLITTLLPKMIARINDWFEEVKAKRGKRPTAFQFLQEIKPEAVAYITIKTTLACLTSADNTTVQAVASAIGRAIEDEARFGRIRDLEAKHFKKNVEEQLNKRVGHVYKKAFMQVVEHDMLSKGLLGGEAWSSWHKEDSIHVGVRCIEMLIESTGMVSLHRQNAGVVGQDSETIELAPEYAEAIATRAGALVGISPMFQPCVVPPKPWTGITGGGYWAAGRKPLQLVRTRSLAALRRYEEVSMPEVIKAVNIAQNTAWRINKKVLDVANTITQWQHCPVADVPAMDRGEMPARPLDIDTNEIALKAWKKEASAFYRKDKARVSRRLSMEFMLSQANKFANYKAIWFPQNMDWRGRVYAVPMFNPQGNDMTKGLLTFAQEKPIGEDGFYWLKIHGANTAGVDKVPFPQRIKFVEDNHTNIMECAKAPLENTWWAEQDSPFCFLAFCFEYAGVINSGLSYNCSLPLAFDGSCSGLQHFSAMLRDEIGGKAVNLLPSAEYQDIYRIVSDKVNEMLKQDLINGTSTTVETVTDKKTGEITQRTKYGTKVMAQWWLEHGVNRGVTKRSVMTLVYGSKEFGFRDQVLSDTIQPAIDNGKGDMFLNPNQAAGYMAKLIWNAVSGTVVAAVEAMNWLKSAAKLLAAEVKDPKTDTVLRGRCAVHWVTPDGFPVWQEYKKPIQTRLNLMFLGQFRLQPTINTNKDSEIDAHKQESGIAPNFVHSQDGNHLRMTVVWAHEKYGIESFALIHDSFGTIPADAANLFKAVRETMVSTYESCDVLADFYDQFADQLHESQLDKMPALPAKGNLNLRDILKSDFAFA

SEQ ID NO: 1005 - DNA, 2670 bp, synthetic construct
  misc_feature 1..2670: note = Variant of RNA polymerase
  source 1..2670: mol_type = other DNA
atgcaccatcaccatcaccatatgaacacgattaacattgctaagaacgacttctctgacatcgaactggctgctatcccgttcaacactctggctgaccattacggtgagcgtttagctcgcgaacagttggcccttgagcatgagtcttacgagatgggtgaagcacgcttccgcaagatgtttgagcgtcaacttaaagctggtgaggttgcggataacgctgccgccaagcctctcatcactaccctactccctaagatgattgcacgcatcaacgactggtttgaggaagtgaaagctaagcgcggcaagcgcccgacagccttccagttcctgcaagaaatcaagccggaagccgtagcgtacatcaccattaagaccactctggcttgcctaaccagtgcggacaatacaaccgttcaggctgtagcaagcgcaatcggtcgggccattgaggacgaggctcgcttcggtcgtatccgtgaccttgaagctaagcacttcaagaagaacgttgaggaacaactcaacaagcgcgtagggcacgtctacaagaaagcatttatgcaagttgtcgagcacgacatgctctctaagggtctactcggtggcgaggcgtggtcttcgtggcataaggaagactctattcatgtaggagtacgctgcatcgagatgctcattgagtcaaccggaatggttagcttacaccgccaaaatgctggcgtagtgggtgcagactctgagactatcgaactcgcacctgaatacgctgaggctatcgcaacccgtgcaggtgcgctggctggcatctctccgatgttccaaccttgcgtagttcctcctaagccgtggactggcattactggtggtggctattgggctgcggggcgcaaacccctgcagttagtacgtactcgcagtctggcggcgcttcgccgctatgaagaagtgtcgatgccggaggtcatcaaagcagtcaacattgcgcagaatacagcatggcgtattaacaagaaagttctcgacgtagcgaataccatcacccaatggcagcactgtccagtcgcggatgtgcctgcgatggatcgtggcgaaatgccagctcgtccgttggacatcgataccaacgagattgcacttaaagcgtggaagaaagaagcttccgcgttctaccgcaaagacaaagcacgcatgagccgtcgtctgtcgatggagtttatgttatctcaggcgaacaagtttgcgaattatgaggcaatctggtttccgcaaaacatggattggcgtgggcgcgtgtacgctgtcccgatgttcaatcctcagggcaacgatatgacgaaaggcctgctgacctttgcgcaggagaaacccattggtgaagacggcttctattggctcaagattcatggcgcaaatacagctggagtggataaagtaccgtttccacaacgcatcaaatttgttgaggataaccatacgaatattatggaatgcgcgaaagcaccgctggaaaacacttggtgggcggaacaggactcgccgttccgctttctggcgttctgctttgagtatgctggcgtcatcaatagtggtctgtcgtacaactgtagcttgcctctggcatttgatggtagttgctccggcctgcaacatttctcagcgatgttacgcgacgaaattggcggcaaagctgtgaatctcctcccatctgcggaataccaggatatttatcgtatcgtcagcgacaaagttaacgagatgctgaaacaagatctgattaacggtacctctaccaccgtggaaacggtgactgattataagacaggcgaaattacccaacgcacgaaatacgggaccaaagttatggcacagtggtggttagaacacggtgtgaatcgtggcgtcacgaaacgctcggttatgactttggtgtatgggagcaaagagtttggattccgcgatcaagtgctgagtgacaccattcaaccggcgatcgataacggcaaaggtgacatgtttctgaatccgaatcaggctgctggttacatggcgaaactgatctggaacgcagtgtccgggaccgtagtcgcagcagttgaggcgatgaactggctgaaaagtgcggcgaaattacttgctgctgaagtgaaggatcctaagacggatacagttctgcgtggccgctgcgcagtacattgggtgactcccgacggcttccctgtgtggcaggaatacaagaagcctattcaaacgcgcttgaacctgatgttcctcggtcagttccgcttacagcctaccattaacaccaacaaagatagcgagattgatgcacacaaacaggtgtctggtatcgctcctaactttgtacacagccaggacggtaaccaccttcgtatgactgtagtgtgggcacacgagaagtacggaatcgaatcttttgcactgattcacgactccttcggtaccattccggctgacgctgcgaacctgttcaaagcagtgcgcgaaactttcgttgacacatatgagtcttgtgatgtactggctgatttctacgaccagattgctgaccagttgcacgagtctcaacgcgacaaaatgccagcacttccggctaaaggtaagttgaacctccgtgacatcttaaaatcggacttcgcgttcgcg

SEQ ID NO: 1006 - protein, 890 aa, synthetic construct
  REGION 1..890: note = Variant of RNA polymerase
MHHHHHHMNTINIAKNDFSDIELAAIPFNTLADHYGERLAREQLALEHESYEMGEARFRKMFERQLKAGEVADNAAAKPLITTLLPKMIARINDWFEEVKAKRGKRPTAFQFLQEIKPEAVAYITIKTTLACLTSADNTTVQAVASAIGRAIEDEARFGRIRDLEAKHFKKNVEEQLNKRVGHVYKKAFMQVVEHDMLSKGLLGGEAWSSWHKEDSIHVGVRCIEMLIESTGMVSLHRQNAGVVGADSETIELAPEYAEAIATRAGALAGISPMFQPCVVPPKPWTGITGGGYWAAGRKPLQLVRTRSLAALRRYEEVSMPEVIKAVNIAQNTAWRINKKVLDVANTITQWQHCPVADVPAMDRGEMPARPLDIDTNEIALKAWKKEASAFYRKDKARMSRRLSMEFMLSQANKFANYEAIWFPQNMDWRGRVYAVPMFNPQGNDMTKGLLTFAQEKPIGEDGFYWLKIHGANTAGVDKVPFPQRIKFVEDNHTNIMECAKAPLENTWWAEQDSPFRFLAFCFEYAGVINSGLSYNCSLPLAFDGSCSGLQHFSAMLRDEIGGKAVNLLPSAEYQDIYRIVSDKVNEMLKQDLINGTSTTVETVTDYKTGEITQRTKYGTKVMAQWWLEHGVNRGVTKRSVMTLVYGSKEFGFRDQVLSDTIQPAIDNGKGDMFLNPNQAAGYMAKLIWNAVSGTVVAAVEAMNWLKSAAKLLAAEVKDPKTDTVLRGRCAVHWVTPDGFPVWQEYKKPIQTRLNLMFLGQFRLQPTINTNKDSEIDAHKQVSGIAPNFVHSQDGNHLRMTVVWAHEKYGIESFALIHDSFGTIPADAANLFKAVRETFVDTYESCDVLADFYDQIADQLHESQRDKMPALPAKGKLNLRDILKSDFAFA

SEQ ID NO: 1007 - DNA, 2670 bp, synthetic construct
  misc_feature 1..2670: note = Variant of RNA polymerase
  source 1..2670: mol_type = other DNA
atgcaccatcaccatcaccatatgaacacgattaacattgctaagaacgacttctctgacatcgaactggctgctatcccgttcaacactctggctgaccattacggtgagcgtttagctcgcgaacagttggcccttgagcatgagtcttacgagatgggtgaagcacgcttccgcaagatgtttgagcgtcaacttaaagctggtgaggttgcggataacgctgccgccaagcctctcatcactaccctactccctaagatgattgcacgcatcaacgactggtttgaggaagtgaaagctaagcgcggcaagcgcccgacagccttccagttcctgcaagaaatcaagccggaagccgtagcgtacatcaccattaagaccactctggcttgcctaaccagtgcggacaatacaaccgttcaggctgtagcaagcgcaatcggtcgggccattgaggacgaggctcgcttcggtcgtatccgtgaccttgaagctaagcacttcaagaagaacgttgaggaacaactcaacaagcgcgtagggcacgtctacaagaaagcatttatgcaagttgtcgagcacgacatgctctctaagggtctactcggtggcgaggcgtggtcttcgtggcataaggaagactctattcatgtaggagtacgctgcatcgagatgctcattgagtcaaccggaatggttagcttacaccgccaaaatgctggcgtagtaggtcaagactctgagactatcgaactcgcacctgaatacgctgaggctatcgcaacccgtgcaggtgcgctggctggcatctctccgatgttccaaccttgcgtagttcctcctaagccgtggactggcattactggtggtggctattgggctgcggggcgcaaacccctgcagttagtacgtactcgcagtctggcggcgcttcgccgctatgaagaagtgtcgatgccggaggtcatcaaagcagtcaacattgcgcagaatacagcatggcgtattaacaagaaagttctcgacgtagcgaataccatcacccaatggcagcactgtccagtcgcggatgtgcctgcgatggatcgtggcgaaatgccagctcgtccgttggacatcgataccaacgagattgcacttaaagcgtggaagaaagaagcttccgcgttctaccgcaaagacaaagcacgcgtgagccgtcgtctgtcgatggagtttatgttatctcaggcgaacaagtttgcgaattatgaggcaatctggtttccgcaaaacatggattggcgtgggcgcgtgtacgctgtcccgatgttcaatcctcagggcaacgatatgacgaaaggcctgctgacctttgcgcaggagaaacccattggtgaagacggcttctattggctcaagattcatggcgcaaatacagctggagtggataaagtaccgtttccacaacgcatcaaatttgttgaggataaccatacgaatattatggaatgcgcgaaagcaccgctggaaaacacttggtgggcggaacaggactcgccgttccgctttctggcgttctgctttgagtatgctggcgtcatcaatagtggtctgtcgtacaactgtagcttgcctctggcatttgatggtagttgctccggcctgcaacatttctcagcgatgttacgcgacgaaattggcggcaaagctgtgaatctcctcccatctgcggaataccaggatatttatcgtatcgtcagcgacaaagttaacgagatgctgaaacaagatctgattaacggtacctctaccaccgtggaaacggtgactgataaaaagacaggcgaaattacccaacgcacgaaatacgggaccaaagttatggcacagtggtggttagaacacggtgtgaatcgtggcgtcacgaaacgcccggttatgactttggtgtatgggagcaaagagtttggattccgcgatcaagtgctgagtgacaccattcaaccggcgatcgataacggcaacggtgacatgtttctgaatccgaatcaggctgctggttacatggcgaaactgatctggaacgcagtgtccgggaccgtagtcgcagcagttgaggcgatgaactggctgaaaagtgcggcgaaattacttgctgctgaagtgaaggatgagaagacggatacagttctgcgtggccgctgcgcagtacattgggtgactcccgacggcttccctgtgtggcaggaatacaagaagcctattcagacgcgcttgaacctgatgttcctcggtcagttccgcttacagcctaccattaacaccaacaaagatagcgagattgatgcacgcaaacaggtgtctggtatcgctcctaactttgtacacagccaagacggtaaccaccttcgtatgactgtagtgtgggcacacgagaagtacggaatcgaatcttttgcactgattcacgactccttcggtaccattccggctgacgctgcgaacctgttcaaagcagtgcgcgaaactttcgttgacacatatgagtcttgtgatgtactggctgatttctacgaccagttcgctgaccagttgcacgagtctcaacgcgacaaaatgccagcacttccggctaaaggtaatttgaacctccgtgacatcttaaaatcggacttcgcgttcgcg

SEQ ID NO: 1008 - protein, 890 aa, synthetic construct
  REGION 1..890: note = Variant of RNA polymerase
MHHHHHHMNTINIAKNDFSDIELAAIPFNTLADHYGERLAREQLALEHESYEMGEARFRKMFERQLKAGEVADNAAAKPLITTLLPKMIARINDWFEEVKAKRGKRPTAFQFLQEIKPEAVAYITIKTTLACLTSADNTTVQAVASAIGRAIEDEARFGRIRDLEAKHFKKNVEEQLNKRVGHVYKKAFMQVVEHDMLSKGLLGGEAWSSWHKEDSIHVGVRCIEMLIESTGMVSLHRQNAGVVGQDSETIELAPEYAEAIATRAGALAGISPMFQPCVVPPKPWTGITGGGYWAAGRKPLQLVRTRSLAALRRYEEVSMPEVIKAVNIAQNTAWRINKKVLDVANTITQWQHCPVADVPAMDRGEMPARPLDIDTNEIALKAWKKEASAFYRKDKARVSRRLSMEFMLSQANKFANYEAIWFPQNMDWRGRVYAVPMFNPQGNDMTKGLLTFAQEKPIGEDGFYWLKIHGANTAGVDKVPFPQRIKFVEDNHTNIMECAKAPLENTWWAEQDSPFRFLAFCFEYAGVINSGLSYNCSLPLAFDGSCSGLQHFSAMLRDEIGGKAVNLLPSAEYQDIYRIVSDKVNEMLKQDLINGTSTTVETVTDKKTGEITQRTKYGTKVMAQWWLEHGVNRGVTKRPVMTLVYGSKEFGFRDQVLSDTIQPAIDNGNGDMFLNPNQAAGYMAKLIWNAVSGTVVAAVEAMNWLKSAAKLLAAEVKDEKTDTVLRGRCAVHWVTPDGFPVWQEYKKPIQTRLNLMFLGQFRLQPTINTNKDSEIDARKQVSGIAPNFVHSQDGNHLRMTVVWAHEKYGIESFALIHDSFGTIPADAANLFKAVRETFVDTYESCDVLADFYDQFADQLHESQRDKMPALPAKGNLNLRDILKSDFAFA

SEQ ID NO: 1009 - DNA, 2670 bp, synthetic construct
  misc_feature 1..2670: note = Variant of RNA polymerase
  source 1..2670: mol_type = other DNA
atgcaccatcaccatcaccatatgaacacgattaacattgctaagaacgacttctctgacatcgaactggctgctatcccgttcaacactctggctgaccattacggtgagcgtttagctcgcgaacagttggcccttgagcatgagtcttacgagatgggtgaagcacgcttccgcaagatgtttgagcgtcaacttaaagctggtgaggttgcggataacgctgccgccaagcctctcatcactaccctactccctaagatgattgcacgcatcaacgactggtttgaggaagtgaaagctaagcgcggcaagcgcccgacagccttccagttcctgcaagaaatcaagccggaagccgtagcgtacatcaccattaagaccactctggcttgcctaaccagtgcggacaatacaaccgttcaggctgtagcaagcgcaatcggtcgggccattgaggacgaggctcgcttcggtcgtatccgtgaccttgaagctaagcacttcaagaagaacgttgaggaacaactcaacaagcgcgtagggcacgtctacaagaaagcatttatgcaagttgtcgagcacgacatgctctctaagggtctactcggtggcgaggcgtggtcttcgtggcataaggaagactctattcatgtaggagtacgctgcatcgagatgctcattgagtcaaccggaatggttagcttacaccgccaaaatgctggcgtagtgggtgcagactctgagactatcgaactcgcacctgaatacgctgaggctatcgcaacccgtgcaggtgcgctggctggcatctctccgatgttccaaccttgcgtagttcctcctaagccgtggactggcattactggtggtggctattgggctgcggggcgcaaacccctgcagttagtacgtactcgcagtctggcggcgcttcgccgctatgaagaagtgtcgatgccggaggtcatcaaagcagtcaacattgcgcagaatacagcatggcgtattaacaagaaagttctcgacgtagcgaataccatcacccaatggcagcactgtccagtcgcggatgtgcctgcgatggatcgtggcgaaatgccagctcgtccgttggacatcgataccaacgagattgcacttaaagcgtggaagaaagaagcttccgcgttctaccgcaaagacaaagcacgcgttagccgtcgtctgtcaatggagtttatgttatctcaggcgaacaagtttgcgaattatgaggcaatctggtttccgcaaaacatggattggcgtgggcgcgtgtacgctgtcccgatgttcaatcctcagggcaacgatatgacgaaaggcctgctgacctttgcgcaggagaaacccattggtgaagacggcttctattggctcaagattcatggcgcaaatacagctggagtggataaagtaccgtttccacaacgcatcaaatttgttgaggataaccatacgaatattatggaatgcgcgaaagcaccgctggaaaacacttggtgggcggaacaggactcgccgttctgctttctggcgttctgctttgagtatgctggcgtcatcaatagtggtctgtcgtacaactgtagcttgcctctggcatttgatggtagttgctccggcctgcaacatttctcagcgatgttacgcgacgaaattggcggcaaagctgtgaatctcctcccatctgcggaataccaggatatttatcgtatcgtcagcgacaaagttaacgagatgctgaaacaagatctgattaacggtacctctaccaccgtggaaacggtgactgataagaagacaggcgaaattacccaacgcacgaaatacgggaccaaagttatggcacagtggtggttagaacacggtgtgaatcgtggcgtcacgaaacgctcggttatgactttggtgtatgggagcaaagagtttggattccgcgatcaagtgctgagtgacaccattcaaccggcgatcgataacggcaaaggtgacatgtttctgaatccgaatcaggctgctggttacatggcgaaactgatctggaacgcagtgtccgggaccgtagtcgcagcagttgaggcgatgaactggctgaaaagtgcggcgaaattacttgctgctgaagtgaaggatcctaagacggatacagttctgcgtggccgctgcgcagtacattgggtgactcccgacggcttccctgtgtggcaggaatacaagaagcctattcgtacgcgcttgaacctgatgttcctcggtcagttccgcttacagcctaccattaacaccaacaaagatagcgagattgatgcacgcaaacaggtgtctggtatcgctcctaactttgtacacagccaagacggtaaccaccttcgtatgactgtagtgtgggcacacgagaagtacggaatcgaatcttttgcactgattcacgactccttcggtaccattccggctgacgctgcgaacctgttcaaagcagtgcgcgaaactttcgttgacacatatgagtcttgtgatgtactggctgatttctacgaccagtttgctgaccagttgcacgagtctcaacgcgacaaaatgccagcacttccggctaaaggtaatttgaacctccgtgacatcttaaaatcggacttcgcgttcgcg

SEQ ID NO: 1010 - protein, 890 aa, synthetic construct
  REGION 1..890: note = Variant of RNA polymerase
MHHHHHHMNTINIAKNDFSDIELAAIPFNTLADHYGERLAREQLALEHESYEMGEARFRKMFERQLKAGEVADNAAAKPLITTLLPKMIARINDWFEEVKAKRGKRPTAFQFLQEIKPEAVAYITIKTTLACLTSADNTTVQAVASAIGRAIEDEARFGRIRDLEAKHFKKNVEEQLNKRVGHVYKKAFMQVVEHDMLSKGLLGGEAWSSWHKEDSIHVGVRCIEMLIESTGMVSLHRQNAGVVGADSETIELAPEYAEAIATRAGALAGISPMFQPCVVPPKPWTGITGGGYWAAGRKPLQLVRTRSLAALRRYEEVSMPEVIKAVNIAQNTAWRINKKVLDVANTITQWQHCPVADVPAMDRGEMPARPLDIDTNEIALKAWKKEASAFYRKDKARVSRRLSMEFMLSQANKFANYEAIWFPQNMDWRGRVYAVPMFNPQGNDMTKGLLTFAQEKPIGEDGFYWLKIHGANTAGVDKVPFPQRIKFVEDNHTNIMECAKAPLENTWWAEQDSPFCFLAFCFEYAGVINSGLSYNCSLPLAFDGSCSGLQHFSAMLRDEIGGKAVNLLPSAEYQDIYRIVSDKVNEMLKQDLINGTSTTVETVTDKKTGEITQRTKYGTKVMAQWWLEHGVNRGVTKRSVMTLVYGSKEFGFRDQVLSDTIQPAIDNGKGDMFLNPNQAAGYMAKLIWNAVSGTVVAAVEAMNWLKSAAKLLAAEVKDPKTDTVLRGRCAVHWVTPDGFPVWQEYKKPIRTRLNLMFLGQFRLQPTINTNKDSEIDARKQVSGIAPNFVHSQDGNHLRMTVVWAHEKYGIESFALIHDSFGTIPADAANLFKAVRETFVDTYESCDVLADFYDQFADQLHESQRDKMPALPAKGNLNLRDILKSDFAFA

SEQ ID NO: 1011 - DNA, 2670 bp, synthetic construct
  misc_feature 1..2670: note = Variant of RNA polymerase
  source 1..2670: mol_type = other DNA
atgcaccatcaccatcaccatatgaacacgattaacattgctaagaacgacttctctgacatcgaactggctgctatcccgttcaacactctggctgaccattacggtgagcgtttagctcgcgaacagttggcccttgagcatgagtcttacgagatgggtgaagcacgcttccgcaagatgtttgagcgtcaacttaaagctggtgaggttgcggataacgctgccgccaagcctctcatcactaccctactccctaagatgattgcacgcatcaacgactggtttgaggaagtgaaagctaagcgcggcaagcgcccgacagccttccagttcctgcaagaaatcaagccggaagccgtagcgtacatcaccattaagaccactctggcttgcctaaccagtgcggacaatacaaccgttcaggctgtagcaagcgcaatcggtcgggccattgaggacgaggctcgcttcggtcgtatccgtgaccttgaagctaagcacttcaagaagaacgttgaggaacaactcaacaagcgcgtagggcacgtctacaagaaagcatttatgcaagttgtcgagcacgacatgctctctaagggtctactcggtggcgaggcgtggtcttcgtggcataaggaagactctattcatgtaggagtacgctgcatcgagatgctcattgagtcaaccggaatggttagcttacaccgccaaaatgctggcgtagtaggtcaagactctgagactatcgaactcgcacctgaatacgctgaggctatcgcaacccgtgcaggtgcgctggctggcatctctccgatgttccaaccttgcgtagttcctcctaagccgtggactggcattactggtggtggctattgggctgcggggcgcaaacccctgcagttagtacgtactcgcagtctggcggcgcttcgccgctatgaagaagtgtcgatgccggaggtcatcaaagcagtcaacattgcgcagaatacagcatggcgtattaacaagaaagttctcgacgtagcgaataccatcacccaatggcagcactgtccagtcgcggatgtgcctgcgatggatcgtggcgaaatgccagctcgtccgttggacatcgataccaacgagattgcacttaaagcgtggaagaaagaagcttccgcgttctaccgcaaagacaaagcacgcgtgagccgtcgtctgctgatggagtttatgttatctcaggcgaacaagtttgcgaattatgaggcaatctggtttccgcaaaacatggattggcgtgggcgcgtgtacgctgtcccgatgttcaatcctcagggcaacgatatgacgaaaggcctgctgacctttgcgcaggagaaacccattggtgaagacggcttctattggctcaagattcatggcgcaaatacagctggagtggataaagtaccgtttccacaacgcatcaaatttgttgaggataaccatacgaatattatggaatgcgcgaaagcaccgctggaaaacacttggtgggcggaacaggactcgccgttctgctttctggcgttctgctttgagtatgctggcgtcatcaatagtggtctgtcgtacaactgtagcttgcctctggcatttgatggtagttgctccggcctgcaacatttctcagcgatgttacgcgacgaaattggcggcaaagctgtgaatctcctcccatctgcggaataccaggatatttatcgtatcgtcagcgacaaagttaacgagatgctgaaacaagatctgattaacggtacctctaccaccgtggaaacggtgactgattataagacaggcgaaattacccaacgcacgaaatacgggaccaaagttatggcacagtggtggttagaacacggtgtgaatcgtggcgtcacgaaacgctcggttatgactttggtgtatgggagcaaagagtttggattccgcgatcaagtgctgagtgacaccattcaaccggcgatcgataacggcaaaggtgacatgtttctgaatccgaatcaggctgctggttacatggcgaaactgatctggaacgcagtgtccgggaccgtagtcgcagcagttgaggcgatgaactggctgaaaagtgcggcgaaattacttgctgctgaagtgaaggatcctaagacggatacagttctgcgtggccgctgcgcagtacattgggtgactcccgacggcttccctgtgtggcaggaatacaagaagcctattcaaacgcgcttgaacctgatgttcctcggtcagttccgcttacagcctaccattaacaccaacaaagatagcgagattgatgcacacaaacaggagtctggtatcgctcctaactttgtacacagccaggacggtaaccaccttcgtatgactgtagtgtgggcacacgagaagtacggaatcgaatcttttgcactgattcacgactccttcggtaccattccggctgacgctgcgaacctgttcaaagcagtgcgcgaaactttcgttgacacatatgagtcttgtgatgtactggctgatttctacgaccagattgctgaccagttgcacgagtctcaacgcgacaaaatgccagcacttccggctaaaggtaagttgaacctccgtgacatcttaaaatcggacttcgcgttcgcg

SEQ ID NO: 1012 - protein, 890 aa, synthetic construct
  REGION 1..890: note = Variant of RNA polymerase
MHHHHHHMNTINIAKNDFSDIELAAIPFNTLADHYGERLAREQLALEHESYEMGEARFRKMFERQLKAGEVADNAAAKPLITTLLPKMIARINDWFEEVKAKRGKRPTAFQFLQEIKPEAVAYITIKTTLACLTSADNTTVQAVASAIGRAIEDEARFGRIRDLEAKHFKKNVEEQLNKRVGHVYKKAFMQVVEHDMLSKGLLGGEAWSSWHKEDSIHVGVRCIEMLIESTGMVSLHRQNAGVVGQDSETIELAPEYAEAIATRAGALAGISPMFQPCVVPPKPWTGITGGGYWAAGRKPLQLVRTRSLAALRRYEEVSMPEVIKAVNIAQNTAWRINKKVLDVANTITQWQHCPVADVPAMDRGEMPARPLDIDTNEIALKAWKKEASAFYRKDKARVSRRLLMEFMLSQANKFANYEAIWFPQNMDWRGRVYAVPMFNPQGNDMTKGLLTFAQEKPIGEDGFYWLKIHGANTAGVDKVPFPQRIKFVEDNHTNIMECAKAPLENTWWAEQDSPFCFLAFCFEYAGVINSGLSYNCSLPLAFDGSCSGLQHFSAMLRDEIGGKAVNLLPSAEYQDIYRIVSDKVNEMLKQDLINGTSTTVETVTDYKTGEITQRTKYGTKVMAQWWLEHGVNRGVTKRSVMTLVYGSKEFGFRDQVLSDTIQPAIDNGKGDMFLNPNQAAGYMAKLIWNAVSGTVVAAVEAMNWLKSAAKLLAAEVKDPKTDTVLRGRCAVHWVTPDGFPVWQEYKKPIQTRLNLMFLGQFRLQPTINTNKDSEIDAHKQESGIAPNFVHSQDGNHLRMTVVWAHEKYGIESFALIHDSFGTIPADAANLFKAVRETFVDTYESCDVLADFYDQIADQLHESQRDKMPALPAKGKLNLRDILKSDFAFA

SEQ ID NO: 1013 - DNA, 2670 bp, synthetic construct
  misc_feature 1..2670: note = Variant of RNA polymerase
  source 1..2670: mol_type = other DNA
atgcaccatcaccatcaccatatgaacacgattaacattgctaagaacgacttctctgacatcgaactggctgctatcccgttcaacactctggctgaccattacggtgagcgtttagctcgcgaacagttggcccttgagcatgagtcttacgagatgggtgaagcacgcttccgcaagatgtttgagcgtcaacttaaagctggtgaggttgcggataacgctgccgccaagcctctcatcactaccctactccctaagatgattgcacgcatcaacgactggtttgaggaagtgaaagctaagcgcggcaagcgcccgacagccttccagttcctgcaagaaatcaagccggaagccgtagcgtacatcaccattaagaccactctggcttgcctaaccagtgcggacaatacaaccgttcaggctgtagcaagcgcaatcggtcgggccattgaggacgaggctcgcttcggtcgtatccgtgaccttgaagctaagcacttcaagaagaacgttgaggaacaactcaacaagcgcgtagggcacgtctacaagaaagcatttatgcaagttgtcgagcacgacatgctctctaagggtctactcggtggcgaggcgtggtcttcgtggcataaggaagactctattcatgtaggagtacgctgcatcgagatgctcattgagtcaaccggaatggttagcttacaccgccaaaatgctggcgtagtgggtgcagactctgagactatcgaactcgcacctgaatacgctgaggctatcgcaacccgtgcaggtgcgctggctggcatctctccgatgttccaaccttgcgtagttcctcctaagccgtggactggcattactggtggtggctattgggctgcggggcgcaaacccctgcagttagtacgtactcgcagtctggcggcgcttcgccgctatgaagaagtgtcgatgccggaggtcatcaaagcagtcaacattgcgcagaatacagcatggcgtattaacaagaaagttctcgacgtagcgaataccatcacccaatggcagcactgtccagtcgcggatgtgcctgcgatggatcgtggcgaaatgccagctcgtccgttggacatcgataccaacgagattgcacttaaagcgtggaagaaagaagcttccgcgttctaccgcaaagacaaagcacgcgttagccgtcgtctgtcaatggagtttatgttatctcaggcgaacaagtttgcgaattatgaggcaatctggtttccgcaaaacatggattggcgtgggcgcgtgtacgctgtcccgatgttcaatcctcagggcaacgatatgacgaaaggcctgctgacctttgcgcaggagaaacccattggtgaagacggcttctattggctcaagattcatggcgcaaatacagctggagtggataaagtaccgtttccacaacgcatcaaatttgttgaggataaccatacgaatattatggaatgcgcgaaagcaccgctggaaaacacttggtgggcggaacaggactcgccgttccgctttctggcgttctgctttgagtatgctggcgtcatcaatagtggtctgtcgtacaactgtagcttgcctctggcatttgatggtagttgctccggcctgcaacatttctcagcgatgttacgcgacgaaattggcggcaaagctgtgaatctcctcccatctgcggaataccaggatatttatcgtatcgtcagcgacaaagttaacgagatgctgaaacaagatctgattaacggtacctctaccaccgtggaaacggtgactgataaaaagacaggcgaaattacccaacgcacgaaatacgggaccaaagttatggcacagtggtggttagaacacggtgtgaatcgtggcgtcacgaaacgctcggttatgactttggtgtatgggagcaaagagtttggattccgcgatcaagtgctgagtgacaccattcaaaaagcgatcgataacggcaaaggtgacatgtttctgaatccgaatcaggctgctggttacatggcgaaactgatctggaacgcagtgtccgggaccgtagtcgcagcagttgaggcgatgaactggctgaaaagtgcggcgaaattacttgctgctgaagtgaaggatcctaagacggatacagttctgcgtggccgctgcgcagtacattgggtgactcccgacggcttccctgtgtggcaggaatacaagaagcctattcgtacgcgcttgaacctgatgttcctcggtcagttccgcttacagcctaccattaacaccaacaaagatagcgagattgatgcacgcaaacaggagtctggtatcgctcctaactttgtacacagccaagacggtaaccaccttcgtatgactgtagtgtgggcacacgagaagtacggaatcgaatcttttgcactgattcacgactccttcggtaccattccggctgacgctgcgaacctgttcaaagcagtgcgcgaaactttcgttgacacatatgagtcttgtgatgtactggctgatttctacgaccagttcgctgaccagttgcacgagtctcaacgcgacaaaatgccagcacttccggctaaaggtaatttgaacctccgtgacatcttaaaatcggacttcgcgttcgcg

SEQ ID NO: 1014 - protein, 890 aa, synthetic construct
  REGION 1..890: note = Variant of RNA polymerase
MHHHHHHMNTINIAKNDFSDIELAAIPFNTLADHYGERLAREQLALEHESYEMGEARFRKMFERQLKAGEVADNAAAKPLITTLLPKMIARINDWFEEVKAKRGKRPTAFQFLQEIKPEAVAYITIKTTLACLTSADNTTVQAVASAIGRAIEDEARFGRIRDLEAKHFKKNVEEQLNKRVGHVYKKAFMQVVEHDMLSKGLLGGEAWSSWHKEDSIHVGVRCIEMLIESTGMVSLHRQNAGVVGADSETIELAPEYAEAIATRAGALAGISPMFQPCVVPPKPWTGITGGGYWAAGRKPLQLVRTRSLAALRRYEEVSMPEVIKAVNIAQNTAWRINKKVLDVANTITQWQHCPVADVPAMDRGEMPARPLDIDTNEIALKAWKKEASAFYRKDKARVSRRLSMEFMLSQANKFANYEAIWFPQNMDWRGRVYAVPMFNPQGNDMTKGLLTFAQEKPIGEDGFYWLKIHGANTAGVDKVPFPQRIKFVEDNHTNIMECAKAPLENTWWAEQDSPFRFLAFCFEYAGVINSGLSYNCSLPLAFDGSCSGLQHFSAMLRDEIGGKAVNLLPSAEYQDIYRIVSDKVNEMLKQDLINGTSTTVETVTDKKTGEITQRTKYGTKVMAQWWLEHGVNRGVTKRSVMTLVYGSKEFGFRDQVLSDTIQKAIDNGKGDMFLNPNQAAGYMAKLIWNAVSGTVVAAVEAMNWLKSAAKLLAAEVKDPKTDTVLRGRCAVHWVTPDGFPVWQEYKKPIRTRLNLMFLGQFRLQPTINTNKDSEIDARKQESGIAPNFVHSQDGNHLRMTVVWAHEKYGIESFALIHDSFGTIPADAANLFKAVRETFVDTYESCDVLADFYDQFADQLHESQRDKMPALPAKGNLNLRDILKSDFAFA

SEQ ID NO: 1015 - DNA, 2670 bp, synthetic construct
  misc_feature 1..2670: note = Variant of RNA polymerase
  source 1..2670: mol_type = other DNA
atgcaccatcaccatcaccatatgaacacgattaacattgctaagaacgacttctctgacatcgaactggctgctatcccgttcaacactctggctgaccattacggtgagcgtttagctcgcgaacagttggcccttgagcatgagtcttacgagatgggtgaagcacgcttccgcaagatgtttgagcgtcaacttaaagctggtgaggttgcggataacgctgccgccaagcctctcatcactaccctactccctaagatgattgcacgcatcaacgactggtttgaggaagtgaaagctaagcgcggcaagcgcccgacagccttccagttcctgcaagaaatcaagccggaagccgtagcgtacatcaccattaagaccactctggcttgcctaaccagtgcggacaatacaaccgttcaggctgtagcaagcgcaatcggtcgggccattgaggacgaggctcgcttcggtcgtatccgtgaccttgaagctaagcacttcaagaagaacgttgaggaacaactcaacaagcgcgtagggcacgtctacaagaaagcatttatgcaagttgtcgagcacgacatgctctctaagggtctactcggtggcgaggcgtggtcttcgtggcataaggaagactctattcatgtaggagtacgctgcatcgagatgctcattgagtcaaccggaatggttagcttacaccgccaaaatgctggcgtagtaggtcaagactctgagactatcgaactcgcacctgaatacgctgaggctatcgcaacccgtgcaggtgcgctggctggcatctctccgatgttccaaccttgcgtagttcctcctaagccgtggactggcattactggtggtggctattgggctgcggggcgcaaacccctgcagttagtacgtactcgcagtctggcggcgcttcgccgctatgaagaagtgtcgatgccggaggtcatcaaagcagtcaacattgcgcagaatacagcatggcgtattaacaagaaagttctcgacgtagcgaataccatcacccaatggcagcactgtccagtcgcggatgtgcctgcgatggatcgtggcgaaatgccagctcgtccgttggacatcgataccaacgagattgcacttaaagcgtggaagaaagaagcttccgcgttctaccgcaaagacaaagcacgcgttagccgtcgtctgtcaatggagtttatgttatctcaggcgaacaagtttgcgaattatgaggcaatctggtttccgcaaaacatggattggcgtgggcgcgtgtacgctgtcccgatgttcaatcctcagggcaacgatatgacgaaaggcctgctgacctttgcgcaggagaaacccattggtgaagacggcttctattggctcaagattcatggcgcaaatacagctggagtggataaagtaccgtttccacaacgcatcaaatttgttgaggataaccatacgaatattatggaatgcgcgaaagcaccgctggaaaacacttggtgggcggaacaggactcgccgttctgctttctggcgttctgctttgagtatgctggcgtcatcaatagtggtctgtcgtacaactgtagcttgcctctggcatttgatggtagttgctccggcctgcaacatttctcagcgatgttacgcgacgaaattggcggcaaagctgtgaatctcctcccatctgcggaataccaggatatttatcgtatcgtcagcgacaaagttaacgagatgctgaaacaagatctgattaacggtacctctaccaccgtggaaacggtgactgataaaaagacaggcgaaattacccaacgcacgaaatacgggaccaaagttatggcacagtggtggttagaacacggtgtgaatcgtggcgtcacgaaacgcccggttatgactttggtgtatgggagcaaagagtttggattccgcgatcaagtgctgagtgacaccattcaacgtgcgatcgataacggcaaaggtgacatgtttctgaatccgaatcaggctgctggttacatggcgaaactgatctggaacgcagtgtccgggaccgtagtcgcagcagttgaggcgatgaactggctgaaaagtgcggcgaaattacttgctgctgaagtgaaggatcctaagacggatacagttctgcgtggccgctgcgcagtacattgggtgactcccgacggcttccctgtgtggcaggaatacaagaagcctattcagacgcgcttgaacctgatgttcctcggtcagttccgcttacagcctaccattaacaccaacaaagatagcgagattgatgcacgcaaacaggtgtctggtatcgctcctaactttgtacacagccaggacggtaaccaccttcgtatgactgtagtgtgggcacacgagaagtacggaatcgaatcttttgcactgattcacgactccttcggtaccattccggctgacgctgcgaacctgttcaaagcagtgcgcgaaactttcgttgacacatatgagtcttgtgatgtactggctgatttctacgaccagttcgctgaccagttgcacgagtctcaacgcgacaaaatgccagcacttccggctaaaggtaacttgaacctccgtgacatcttaaaatcggacttcgcgttcgcg

SEQ ID NO: 1016 - protein, 890 aa, synthetic construct
  REGION 1..890: note = Variant of RNA polymerase
MHHHHHHMNTINIAKNDFSDIELAAIPFNTLADHYGERLAREQLALEHESYEMGEARFRKMFERQLKAGEVADNAAAKPLITTLLPKMIARINDWFEEVKAKRGKRPTAFQFLQEIKPEAVAYITIKTTLACLTSADNTTVQAVASAIGRAIEDEARFGRIRDLEAKHFKKNVEEQLNKRVGHVYKKAFMQVVEHDMLSKGLLGGEAWSSWHKEDSIHVGVRCIEMLIESTGMVSLHRQNAGVVGQDSETIELAPEYAEAIATRAGALAGISPMFQPCVVPPKPWTGITGGGYWAAGRKPLQLVRTRSLAALRRYEEVSMPEVIKAVNIAQNTAWRINKKVLDVANTITQWQHCPVADVPAMDRGEMPARPLDIDTNEIALKAWKKEASAFYRKDKARVSRRLSMEFMLSQANKFANYEAIWFPQNMDWRGRVYAVPMFNPQGNDMTKGLLTFAQEKPIGEDGFYWLKIHGANTAGVDKVPFPQRIKFVEDNHTNIMECAKAPLENTWWAEQDSPFCFLAFCFEYAGVINSGLSYNCSLPLAFDGSCSGLQHFSAMLRDEIGGKAVNLLPSAEYQDIYRIVSDKVNEMLKQDLINGTSTTVETVTDKKTGEITQRTKYGTKVMAQWWLEHGVNRGVTKRPVMTLVYGSKEFGFRDQVLSDTIQRAIDNGKGDMFLNPNQAAGYMAKLIWNAVSGTVVAAVEAMNWLKSAAKLLAAEVKDPKTDTVLRGRCAVHWVTPDGFPVWQEYKKPIQTRLNLMFLGQFRLQPTINTNKDSEIDARKQVSGIAPNFVHSQDGNHLRMTVVWAHEKYGIESFALIHDSFGTIPADAANLFKAVRETFVDTYESCDVLADFYDQFADQLHESQRDKMPALPAKGNLNLRDILKSDFAFA

SEQ ID NO: 1017 - DNA, 2670 bp, synthetic construct
  misc_feature 1..2670: note = Variant of RNA polymerase
  source 1..2670: mol_type = other DNA
atgcaccatcaccatcaccatatgaacacgattaacattgctaagaacgacttctctgacatcgaactggctgctatcccgttcaacactctggctgaccattacggtgagcgtttagctcgcgaacagttggcccttgagcatgagtcttacgagatgggtgaagcacgcttccgcaagatgtttgagcgtcaacttaaagctggtgaggttgcggataacgctgccgccaagcctctcatcactaccctactccctaagatgattgcacgcatcaacgactggtttgaggaagtgaaagctaagcgcggcaagcgcccgacagccttccagttcctgcaagaaatcaagccggaagccgtagcgtacatcaccattaagaccactctggcttgcctaaccagtgcggacaatacaaccgttcaggctgtagcaagcgcaatcggtcgggccattgaggacgaggctcgcttcggtcgtatccgtgaccttgaagctaagcacttcaagaagaacgttgaggaacaactcaacaagcgcgtagggcacgtctacaagaaagcatttatgcaagttgtcgagcacgacatgctctctaagggtctactcggtggcgaggcgtggtcttcgtggcataaggaagactctattcatgtaggagtacgctgcatcgagatgctcattgagtcaaccggaatggttagcttacaccgccaaaatgctggcgtagtaggtcaagactctgagactatcgaactcgcacctgaatacgctgaggctatcgcaacccgtgcaggtgcgctggctggcatctctccgatgttccaaccttgcgtagttcctcctaagccgtggactggcattactggtggtggctattgggctgcggggcgcaaacccctgcagttagtacgtactcgcagtctggcggcgcttcgccgctatgaagaagtgtcgatgccggaggtcatcaaagcagtcaacattgcgcagaatacagcatggcgtattaacaagaaagttctcgacgtagcgaataccatcacccaatggcagcactgtccagtcgcggatgtgcctgcgatggatcgtggcgaaatgccagctcgtccgttggacatcgataccaacgagattgcacttaaagcgtggaagaaagaagcttccgcgttctaccgcaaagacaaagcacgcatgagccgtcgtctgtcgatggagtttatgttatctcaggcgaacaagtttgcgaattatgaggcaatctggtttccgcaaaacatggattggcgtgggcgcgtgtacgctgtcccgatgttcaatcctcagggcaacgatatgacgaaaggcctgctgacctttgcgcaggagaaacccattggtgaagacggcttctattggctcaagattcatggcgcaaatacagctggagtggataaagtaccgtttccacaacgcatcaaatttgttgaggataaccatacgaatattatggaatgcgcgaaagcaccgctggaaaacacttggtgggcggaacaggactcgccgttccgctttctggcgttctgctttgagtatgctggcgtcatcaatagtggtctgtcgtacaactgtagcttgcctctggcatttgatggtagttgctccggcctgcaacatttctcagcgatgttacgcgacgaaattggcggcaaagctgtgaatctcctcccatctgcggaataccaggatatttatcgtatcgtcagcgacaaagttaacgagatgctgaaacaagatctgattaacggtacctctaccaccgtggaaacggtgactgataaaaagacaggcgaaattacccaacgcacgaaatacgggaccaaagttatggcacagtggtggttagaacacggtgtgaatcgtggcgtcacgaaacgctcggttatgactttggtgtatgggagcaaagagtttggattccgcgatcaagtgctgagtgacaccattcaaaaagcgatcgataacggcaaaggtgacatgtttctgaatccgaatcaggctgctggttacatggcgaaactgatctggaacgcagtgtccgggaccgtagtcgcagcagttgaggcgatgaactggctgaaaagtgcggcgaaattacttgctgctgaagtgaaggatcctaagacggatacagttctgcgtggccgctgcgcagtacattgggtgactcccgacggcttccctgtgtggcaggaatacaagaagcctattcagacgcgcttgaacctgatgttcctcggtcagttccgcttacagcctaccattaacaccaacaaagatagcgagattgatgcacacaaacaggagtctggtatcgctcctaactttgtacacagccaagacggtaaccaccttcgtatgactgtagtgtgggcacacgagaagtacggaatcgaatcttttgcactgattcacgactccttcggtaccattccggctgacgctgcgaacctgttcaaagcagtgcgcgaaactttcgttgacacatatgagtcttgtgatgtactggctgatttctacgaccagattgctgaccagttgcacgagtctcaacgcgacaaaatgccagcacttccggctaaaggtaagttgaacctccgtgacatcttaaaatcggacttcgcgttcgcg

SEQ ID NO: 1018 - protein, 890 aa, synthetic construct
  REGION 1..890: note = Variant of RNA polymerase
MHHHHHHMNTINIAKNDFSDIELAAIPFNTLADHYGERLAREQLALEHESYEMGEARFRKMFERQLKAGEVADNAAAKPLITTLLPKMIARINDWFEEVKAKRGKRPTAFQFLQEIKPEAVAYITIKTTLACLTSADNTTVQAVASAIGRAIEDEARFGRIRDLEAKHFKKNVEEQLNKRVGHVYKKAFMQVVEHDMLSKGLLGGEAWSSWHKEDSIHVGVRCIEMLIESTGMVSLHRQNAGVVGQDSETIELAPEYAEAIATRAGALAGISPMFQPCVVPPKPWTGITGGGYWAAGRKPLQLVRTRSLAALRRYEEVSMPEVIKAVNIAQNTAWRINKKVLDVANTITQWQHCPVADVPAMDRGEMPARPLDIDTNEIALKAWKKEASAFYRKDKARMSRRLSMEFMLSQANKFANYEAIWFPQNMDWRGRVYAVPMFNPQGNDMTKGLLTFAQEKPIGEDGFYWLKIHGANTAGVDKVPFPQRIKFVEDNHTNIMECAKAPLENTWWAEQDSPFRFLAFCFEYAGVINSGLSYNCSLPLAFDGSCSGLQHFSAMLRDEIGGKAVNLLPSAEYQDIYRIVSDKVNEMLKQDLINGTSTTVETVTDKKTGEITQRTKYGTKVMAQWWLEHGVNRGVTKRSVMTLVYGSKEFGFRDQVLSDTIQKAIDNGKGDMFLNPNQAAGYMAKLIWNAVSGTVVAAVEAMNWLKSAAKLLAAEVKDPKTDTVLRGRCAVHWVTPDGFPVWQEYKKPIQTRLNLMFLGQFRLQPTINTNKDSEIDAHKQESGIAPNFVHSQDGNHLRMTVVWAHEKYGIESFALIHDSFGTIPADAANLFKAVRETFVDTYESCDVLADFYDQIADQLHESQRDKMPALPAKGKLNLRDILKSDFAFA

SEQ ID NO: 1019 - DNA, 2670 bp, synthetic construct
  misc_feature 1..2670: note = Variant of RNA polymerase
  source 1..2670: mol_type = other DNA
atgcaccatcaccatcaccatatgaacacgattaacattgctaagaacgacttctctgacatcgaactggctgctatcccgttcaacactctggctgaccattacggtgagcgtttagctcgcgaacagttggcccttgagcatgagtcttacgagatgggtgaagcacgcttccgcaagatgtttgagcgtcaacttaaagctggtgaggttgcggataacgctgccgccaagcctctcatcactaccctactccctaagatgattgcacgcatcaacgactggtttgaggaagtgaaagctaagcgcggcaagcgcccgacagccttccagttcctgcaagaaatcaagccggaagccgtagcgtacatcaccattaagaccactctggcttgcctaaccagtgcggacaatacaaccgttcaggctgtagcaagcgcaatcggtcgggccattgaggacgaggctcgcttcggtcgtatccgtgaccttgaagctaagcacttcaagaagaacgttgaggaacaactcaacaagcgcgtagggcacgtctacaagaaagcatttatgcaagttgtcgagcacgacatgctctctaagggtctactcggtggcgaggcgtggtcttcgtggcataaggaagactctattcatgtaggagtacgctgcatcgagatgctcattgagtcaaccggaatggttagcttacaccgccaaaatgctggcgtagtgggtgcagactctgagactatcgaactcgcacctgaatacgctgaggctatcgcaacccgtgcaggtgcgctggctggcatctctccgatgttccaaccttgcgtagttcctcctaagccgtggactggcattactggtggtggctattgggctgcggggcgcaaacccctgcagttagtacgtactcgcagtctggcggcgcttcgccgctatgaagaagtgtcgatgccggaggtcatcaaagcagtcaacattgcgcagaatacagcatggcgtattaacaagaaagttctcgacgtagcgaataccatcacccaatggcagcactgtccagtcgcggatgtgcctgcgatggatcgtggcgaaatgccagctcgtccgttggacatcgataccaacgagagtgcacttaaagcgtggaagaaagaagcttccgcgttctaccgcaaagacaaagcacgcatgagccgtcgtctgtcgatggagtttatgttatctcaggcgaacaagtttgcgaattatgaggcaatctggtttccgcaaaacatggattggcgtgggcgcgtgtacgctgtcccgatgttcaatcctcagggcaacgatatgacgaaaggcctgctgacctttgcgcaggagaaacccattggtgaagacggcttctattggctcaagattcatggcgcaaatacagctggagtggataaagtaccgtttccacaacgcatcaaatttgttgaggataaccatacgaatattatggaatgcgcgaaagcaccgctggaaaacacttggtgggcggaacaggactcgccgttccgctttctggcgttctgctttgagtatgctggcgtcatcaatagtggtctgtcgtacaactgtagcttgcctctggcatttgatggtagttgctccggcctgcaacatttctcagcgatgttacgcgacgaaattggcggcaaagctgtgaatctcctcccatctgcggaataccaggatatttatcgtatcgtcagcgacaaagttaacgagatgctgaaacaagatctgattaacggtacctctaccaccgtggaaacggtgactgataaaaagacaggcgaaattacccaacgcacgaaatacgggaccaaagttatggcacagtggtggttagaacacggtgtgaatcgtggcgtcacgaaacgctcggttatgactttggtgtatgggagcaaagagtttggattccgcgatcaagtgctgagtgacaccattcaaccggcgatcgataacggcaaaggtgacatgtttctgaatccgaatcaggctgctggttacatggcgaaactgatctggaacgcagtgtccgggaccgtagtcgcagcagttgaggcgatgaactggctgaaaagtgcggcgaaattacttgctgctgaagtgaaggatcctaagacggatacagttctgcgtggccgctgcgcagtacattgggtgactcccgacggcttccctgtgtggcaggaatacaagaagcctattcgtacgcgcttgaacctgatgttcctcggtcagttccgcttacagcctaccattaacaccaacaaagatagcgagattgatgcacacaaacaggagtctggtatcgctcctaactttgtacacagccaagacggtaaccaccttcgtatgactgtagtgtgggcacacgagaagtacggaatcgaatcttttgcactgattcacgactccttcggtaccattccggctgacgctgcgaacctgttcaaagcagtgcgcgaaactttcgttgacacatatgagtcttgtgatgtactggctgatttctacgaccagttcgctgaccagttgcacgagtctcaacgcgacaaaatgccagcacttccggctaaaggtaacttgaacctccgtgacatcttaaaatcggacttcgcgttcgcg

SEQ ID NO: 1020 - protein, 890 aa, synthetic construct
  REGION 1..890: note = Variant of RNA polymerase
MHHHHHHMNTINIAKNDFSDIELAAIPFNTLADHYGERLAREQLALEHESYEMGEARFRKMFERQLKAGEVADNAAAKPLITTLLPKMIARINDWFEEVKAKRGKRPTAFQFLQEIKPEAVAYITIKTTLACLTSADNTTVQAVASAIGRAIEDEARFGRIRDLEAKHFKKNVEEQLNKRVGHVYKKAFMQVVEHDMLSKGLLGGEAWSSWHKEDSIHVGVRCIEMLIESTGMVSLHRQNAGVVGADSETIELAPEYAEAIATRAGALAGISPMFQPCVVPPKPWTGITGGGYWAAGRKPLQLVRTRSLAALRRYEEVSMPEVIKAVNIAQNTAWRINKKVLDVANTITQWQHCPVADVPAMDRGEMPARPLDIDTNESALKAWKKEASAFYRKDKARMSRRLSMEFMLSQANKFANYEAIWFPQNMDWRGRVYAVPMFNPQGNDMTKGLLTFAQEKPIGEDGFYWLKIHGANTAGVDKVPFPQRIKFVEDNHTNIMECAKAPLENTWWAEQDSPFRFLAFCFEYAGVINSGLSYNCSLPLAFDGSCSGLQHFSAMLRDEIGGKAVNLLPSAEYQDIYRIVSDKVNEMLKQDLINGTSTTVETVTDKKTGEITQRTKYGTKVMAQWWLEHGVNRGVTKRSVMTLVYGSKEFGFRDQVLSDTIQPAIDNGKGDMFLNPNQAAGYMAKLIWNAVSGTVVAAVEAMNWLKSAAKLLAAEVKDPKTDTVLRGRCAVHWVTPDGFPVWQEYKKPIRTRLNLMFLGQFRLQPTINTNKDSEIDAHKQESGIAPNFVHSQDGNHLRMTVVWAHEKYGIESFALIHDSFGTIPADAANLFKAVRETFVDTYESCDVLADFYDQFADQLHESQRDKMPALPAKGNLNLRDILKSDFAFA

SEQ ID NO: 1021 - DNA, 2670 bp, synthetic construct
  misc_feature 1..2670: note = Variant of RNA polymerase
  source 1..2670: mol_type = other DNA
atgcaccatcaccatcaccatatgaacacgattaacattgctaagaacgacttctctgacatcgaactggctgctatcccgttcaacactctggctgaccattacggtgagcgtttagctcgcgaacagttggcccttgagcatgagtcttacgagatgggtgaagcacgcttccgcaagatgtttgagcgtcaacttaaagctggtgaggttgcggataacgctgccgccaagcctctcatcactaccctactccctaagatgattgcacgcatcaacgactggtttgaggaagtgaaagctaagcgcggcaagcgcccgacagccttccagttcctgcaagaaatcaagccggaagccgtagcgtacatcaccattaagaccactctggcttgcctaaccagtgcggacaatacaaccgttcaggctgtagcaagcgcaatcggtcgggccattgaggacgaggctcgcttcggtcgtatccgtgaccttgaagctaagcacttcaagaagaacgttgaggaacaactcaacaagcgcgtagggcacgtctacaagaaagcatttatgcaagttgtcgagcacgacatgctctctaagggtctactcggtggcgaggcgtggtcttcgtggcataaggaagactctattcatgtaggagtacgctgcatcgagatgctcattgagtcaaccggaatggttagcttacaccgccaaaatgctggcgtagtaggtcaagactctgagactatcgaactcgcacctgaatacgctgaggctatcgcaacccgtgcaggtgcgctggctggcatctctccgatgttccaaccttgcgtagttcctcctaagccgtggactggcattactggtggtggctattgggctgcggggcgcaaacccctgcagttagtacgtactcgcagtctggcggcgcttcgccgctatgaagaagtgtcgatgccggaggtcatcaaagcagtcaacattgcgcagaatacagcatggcgtattaacaagaaagttctcgacgtagcgaataccatcacccaatggcagcactgtccagtcgcggatgtgcctgcgatggatcgtggcgaaatgccagctcgtccgttggacatcgataccaacgagattgcacttaaagcgtggaagaaagaagcttccgcgttctaccgcaaagacaaagcacgcgtgagccgtcgtctgctgatggagtttatgttatctcaggcgaacaagtttgcgaattatgaggcaatctggtttccgcaaaacatggattggcgtgggcgcgtgtacgctgtcccgatgttcaatcctcagggcaacgatatgacgaaaggcctgctgacctttgcgcaggagaaacccattggtgaagacggcttctattggctcaagattcatggcgcaaatacagctggagtggataaagtaccgtttccacaacgcatcaaatttgttgaggataaccatacgaatattatggaatgcgcgaaagcaccgctggaaaacacttggtgggcggaacaggactcgccgttccgctttctggcgttctgctttgagtatgctggcgtcatcaatagtggtctgtcgtacaactgtagcttgcctctggcatttgatggtagttgctccggcctgcaacatttctcagcgatgttacgcgacgaaattggcggcaaagctgtgaatctcctcccatctgcggaataccaggatatttatcgtatcgtcagcgacaaagttaacgagatgctgaaacaagatctgattaacggtacctctaccaccgtggaaacggtgactgataaaaagacaggcgaaattacccaacgcacgaaatacgggaccaaagttatggcacagtggtggttagaacacggtgtgaatcgtggcgtcacgaaacgcccggttatgactttggtgtatgggagcaaagagtttggattccgcgatcaagtgctgagtgacaccattcaaaaagcgatcgataacggcaaaggtgacatgtttctgaatccgaatcaggctgctggttacatggcgaaactgatctggaacgcagtgtccgggaccgtagtcgcagcagttgaggcgatgaactggctgaaaagtgcggcgaaattacttgctgctgaagtgaaggatcctaagacggatacagttctgcgtggccgctgcgcagtacattgggtgactcccgacggcttccctgtgtggcaggaatacaagaagcctattcgtacgcgcttgaacctgatgttcctcggtcagttccgcttacagcctaccattaacaccaacaaagatagcgagattgatgcacacaaacaggagtctggtatcgctcctaactttgtacacagcctggacggtaaccaccttcgtatgactgtagtgtgggcacacgagaagtacggaatcgaatcttttgcactgattcacgactccttcggtaccattccggctgacgctgcgaacctgttcaaagcagtgcgcgaaactttcgttgacacatatgagtcttgtgatgtactggctgatttctacgaccagtttgctgaccagttgcacgagtctcaacgcgacaaaatgccagcacttccggctaaaggtaagttgaacctccgtgacatcttaaaatcggacttcgcgttcgcg

SEQ ID NO: 1022 - protein, 890 aa, synthetic construct
  REGION 1..890: note = Variant of RNA polymerase
MHHHHHHMNTINIAKNDFSDIELAAIPFNTLADHYGERLAREQLALEHESYEMGEARFRKMFERQLKAGEVADNAAAKPLITTLLPKMIARINDWFEEVKAKRGKRPTAFQFLQEIKPEAVAYITIKTTLACLTSADNTTVQAVASAIGRAIEDEARFGRIRDLEAKHFKKNVEEQLNKRVGHVYKKAFMQVVEHDMLSKGLLGGEAWSSWHKEDSIHVGVRCIEMLIESTGMVSLHRQNAGVVGQDSETIELAPEYAEAIATRAGALAGISPMFQPCVVPPKPWTGITGGGYWAAGRKPLQLVRTRSLAALRRYEEVSMPEVIKAVNIAQNTAWRINKKVLDVANTITQWQHCPVADVPAMDRGEMPARPLDIDTNEIALKAWKKEASAFYRKDKARVSRRLLMEFMLSQANKFANYEAIWFPQNMDWRGRVYAVPMFNPQGNDMTKGLLTFAQEKPIGEDGFYWLKIHGANTAGVDKVPFPQRIKFVEDNHTNIMECAKAPLENTWWAEQDSPFRFLAFCFEYAGVINSGLSYNCSLPLAFDGSCSGLQHFSAMLRDEIGGKAVNLLPSAEYQDIYRIVSDKVNEMLKQDLINGTSTTVETVTDKKTGEITQRTKYGTKVMAQWWLEHGVNRGVTKRPVMTLVYGSKEFGFRDQVLSDTIQKAIDNGKGDMFLNPNQAAGYMAKLIWNAVSGTVVAAVEAMNWLKSAAKLLAAEVKDPKTDTVLRGRCAVHWVTPDGFPVWQEYKKPIRTRLNLMFLGQFRLQPTINTNKDSEIDAHKQESGIAPNFVHSLDGNHLRMTVVWAHEKYGIESFALIHDSFGTIPADAANLFKAVRETFVDTYESCDVLADFYDQFADQLHESQRDKMPALPAKGKLNLRDILKSDFAFA

SEQ ID NO: 1023 - DNA, 2670 bp, synthetic construct
  misc_feature 1..2670: note = Variant of RNA polymerase
  source 1..2670: mol_type = other DNA
atgcaccatcaccatcaccatatgaacacgattaacattgctaagaacgacttctctgacatcgaactggctgctatcccgttcaacactctggctgaccattacggtgagcgtttagctcgcgaacagttggcccttgagcatgagtcttacgagatgggtgaagcacgcttccgcaagatgtttgagcgtcaacttaaagctggtgaggttgcggataacgctgccgccaagcctctcatcactaccctactccctaagatgattgcacgcatcaacgactggtttgaggaagtgaaagctaagcgcggcaagcgcccgacagccttccagttcctgcaagaaatcaagccggaagccgtagcgtacatcaccattaagaccactctggcttgcctaaccagtgcggacaatacaaccgttcaggctgtagcaagcgcaatcggtcgggccattgaggacgaggctcgcttcggtcgtatccgtgaccttgaagctaagcacttcaagaagaacgttgaggaacaactcaacaagcgcgtagggcacgtctacaagaaagcatttatgcaagttgtcgagcacgacatgctctctaagggtctactcggtggcgaggcgtggtcttcgtggcataaggaagactctattcatgtaggagtacgctgcatcgagatgctcattgagtcaaccggaatggttagcttacaccgccaaaatgctggcgtagtaggtcaagactctgagactatcgaactcgcacctgaatacgctgaggctatcgcaacccgtgcaggtgcgctggctggcatctctccgatgttccaaccttgcgtagttcctcctaagccgtggactggcattactggtggtggctattgggctgcggggcgcaaacccctgcagttagtacgtactcgcagtctggcggcgcttcgccgctatgaagaagtgtcgatgccggaggtcatcaaagcagtcaacattgcgcagaatacagcatggcgtattaacaagaaagttctcgacgtagcgaataccatcacccaatggcagcactgtccagtcgcggatgtgcctgcgatggatcgtggcgaaatgccagctcgtccgttggacatcgataccaacgagattgcacttaaagcgtggaagaaagaagcttccgcgttctaccgcaaagacaaagcacgcgtgagccgtcgtctgtcgatggagtttatgttatctcaggcgaacaagtttgcgaattatgaggcaatctggtttccgcaaaacatggattggcgtgggcgcgtgtacgctgtcccgatgttcaatcctcagggcaacgatatgacgaaaggcctgctgacctttgcgcaggagaaacccattggtgaagacggcttctattggctcaagattcatggcgcaaatacagctggagtggataaagtaccgtttccacaacgcatcaaatttgttgaggataaccatacgaatattatggaatgcgcgaaagcaccgctggaaaacacttggtgggcggaacaggactcgccgttctattttctggcgttctgctttgagtatgctggcgtcatcaatagtggtctgtcgtacaactgtagcttgcctctggcatttgatggtagttgctccggcctgcaacatttctcagcgatgttacgcgacgaaattggcggcaaagctgtgaatctcctcccatctgcggaataccaggatatttatcgtatcgtcagcgacaaagttaacgagatgctgaaacaagatctgattaacggtacctctaccaccgtggaaacggtgactgataagaagacaggcgaaattacccaacgcacgaaatacgggaccaaagttatggcacagtggtggttagaacacggtgtgaatcgtggcgtcacgaaacgcccggttatgactttggtgtatgggagcaaagagtttggattccgcgatcaagtgctgagtgacaccattcaaccggcgatcgataacggcaacggtgacatgtttctgaatccgaatcaggctgctggttacatggcgaaactgatctggaacgcagtgtccgggaccgtagtcgcagcagttgaggcgatgaactggctgaaaagtgcggcgaaattacttgctgctgaagtgaaggatcgtaagacggatacagttctgcgtggccgctgcgcagtacattgggtgactcccgacggcttccctgtgtggcaggaatacaagaagcctattcgtacgcgcttgaacctgatgttcctcggtcagttccgcttacagcctaccattaacaccaacaaagatagcgagattgatgcacgcaaacaggtgtctggtatcgctcctaactttgtacacagccaagacggtaaccaccttcgtatgactgtagtgtgggcacacgagaagtacggaatcgaatcttttgcactgattcacgactccttcggtaccattccggctgacgctgcgaacctgttcaaagcagtgcgcgaaactttcgttgacacatatgagtcttgtgatgtactggctgatttctacgaccagtttgctgaccagttgcacgagtctcaacgcgacaaaatgccagcacttccggctaaaggtaatttgaacctccgtgacatcttaaaatcggacttcgcgttcgcg

SEQ ID NO: 1024 - protein, 890 aa, synthetic construct
  REGION 1..890: note = Variant of RNA polymerase
MHHHHHHMNTINIAKNDFSDIELAAIPFNTLADHYGERLAREQLALEHESYEMGEARFRKMFERQLKAGEVADNAAAKPLITTLLPKMIARINDWFEEVKAKRGKRPTAFQFLQEIKPEAVAYITIKTTLACLTSADNTTVQAVASAIGRAIEDEARFGRIRDLEAKHFKKNVEEQLNKRVGHVYKKAFMQVVEHDMLSKGLLGGEAWSSWHKEDSIHVGVRCIEMLIESTGMVSLHRQNAGVVGQDSETIELAPEYAEAIATRAGALAGISPMFQPCVVPPKPWTGITGGGYWAAGRKPLQLVRTRSLAALRRYEEVSMPEVIKAVNIAQNTAWRINKKVLDVANTITQWQHCPVADVPAMDRGEMPARPLDIDTNEIALKAWKKEASAFYRKDKARVSRRLSMEFMLSQANKFANYEAIWFPQNMDWRGRVYAVPMFNPQGNDMTKGLLTFAQEKPIGEDGFYWLKIHGANTAGVDKVPFPQRIKFVEDNHTNIMECAKAPLENTWWAEQDSPFYFLAFCFEYAGVINSGLSYNCSLPLAFDGSCSGLQHFSAMLRDEIGGKAVNLLPSAEYQDIYRIVSDKVNEMLKQDLINGTSTTVETVTDKKTGEITQRTKYGTKVMAQWWLEHGVNRGVTKRPVMTLVYGSKEFGFRDQVLSDTIQPAIDNGNGDMFLNPNQAAGYMAKLIWNAVSGTVVAAVEAMNWLKSAAKLLAAEVKDRKTDTVLRGRCAVHWVTPDGFPVWQEYKKPIRTRLNLMFLGQFRLQPTINTNKDSEIDARKQVSGIAPNFVHSQDGNHLRMTVVWAHEKYGIESFALIHDSFGTIPADAANLFKAVRETFVDTYESCDVLADFYDQFADQLHESQRDKMPALPAKGNLNLRDILKSDFAFA

SEQ ID NO: 1025 - DNA, 2670 bp, synthetic construct
  misc_feature 1..2670: note = Variant of RNA polymerase
  source 1..2670: mol_type = other DNA
atgcaccatcaccatcaccatatgaacacgattaacattgctaagaacgacttctctgacatcgaactggctgctatcccgttcaacactctggctgaccattacggtgagcgtttagctcgcgaacagttggcccttgagcatgagtcttacgagatgggtgaagcacgcttccgcaagatgtttgagcgtcaacttaaagctggtgaggttgcggataacgctgccgccaagcctctcatcactaccctactccctaagatgattgcacgcatcaacgactggtttgaggaagtgaaagctaagcgcggcaagcgcccgacagccttccagttcctgcaagaaatcaagccggaagccgtagcgtacatcaccattaagaccactctggcttgcctaaccagtgcggacaatacaaccgttcaggctgtagcaagcgcaatcggtcgggccattgaggacgaggctcgcttcggtcgtatccgtgaccttgaagctaagcacttcaagaagaacgttgaggaacaactcaacaagcgcgtagggcacgtctacaagaaagcatttatgcaagttgtcgagcacgacatgctctctaagggtctactcggtggcgaggcgtggtcttcgtggcataaggaagactctattcatgtaggagtacgctgcatcgagatgctcattgagtcaaccggaatggttagcttacaccgccaaaatgctggcgtagtaggtcaagactctgagactatcgaactcgcacctgaatacgctgaggctatcgcaacccgtgcaggtgcgctggctggcatctctccgatgttccaaccttgcgtagttcctcctaagccgtggactggcattactggtggtggctattgggctgcggggcgcaaacccctgcagttagtacgtactcgcagtctggcggcgcttcgccgctatgaagaagtgtcgatgccggaggtcatcaaagcagtcaacattgcgcagaatacagcatggcgtattaacaagaaagttctcgacgtagcgaataccatcacccaatggcagcactgtccagtcgcggatgtgcctgcgatggatcgtggcgaaatgccagctcgtccgttggacatcgataccaacgagattgcacttaaagcgtggaagaaagaagcttccgcgttctaccgcaaagacaaagcacgcgtgagccgtcgtctgtcgatggagtttatgttatctcaggcgaacaagtttgcgaattatgaggcaatctggtttccgcaaaacatggattggcgtgggcgcgtgtacgctgtcccgatgttcaatcctcagggcaacgatatgacgaaaggcctgctgacctttgcgcaggagaaacccattggtgaagacggcttctattggctcaagattcatggcgcaaatacagctggagtggataaagtaccgtttccacaacgcatcaaatttgttgaggataaccatacgaatattatggaatgcgcgaaagcaccgctggaaaacacttggtgggcggaacaggactcgccgttccgctttctggcgttctgctttgagtatgctggcgtcatcaatagtggtctgtcgtacaactgtagcttgcctctggcatttgatggtagttgctccggcctgcaacatttctcagcgatgttacgcgacgaaattggcggcaaagctgtgaatctcctcccatctgcggaataccaggatatttatcgtatcgtcagcgacaaagttaacgagatgctgaaacaagatctgattaacggtacctctaccaccgtggaaacggtgactgataaaaagacaggcgaaattacccaacgcacgaaatacgggaccaaagttatggcacagtggtggttagaacacggtgtgaatcgtggcgtcacgaaacgctcggttatgactttggtgtatgggagcaaagagtttggattccgcgatcaagtgctgagtgacaccattcaacctgcgatcgataacggcaaaggtgacatgtttctgaatccgaatcaggctgctggttacatggcgaaactgatctggaacgcagtgtccgggaccgtagtcgcagcagttgaggcgatgaactggctgaaaagtgcggcgaaattacttgctgctgaagtgaaggatcctaagacggatacagttctgcgtggccgctgcgcagtacattgggtgactcccgacggcttccctgtgtggcaggaatacaagaagcctattcagacgcgcttgaacctgatgttcctcggtcagttccgcttacagcctaccattaacaccaacaaagatagcgagattgatgcacacaaacaggagtctggtatcgctcctaactttgtacacagccaagacggtaaccaccttcgtatgactgtagtgtgggcacacgagaagtacggaatcgaatcttttgcactgattcacgactccttcggtaccattccggctgacgctgcgaacctgttcaaagcagtgcgcgaaactttcgttgacacatatgagtcttgtgatgtactggctgatttctacgaccagttcgctgaccagttgcacgagtctcaacgcgacaaaatgccagcacttccggctaaaggtaagttgaacctccgtgacatcttaaaatcggacttcgcgttcgcg

SEQ ID NO: 1026 - protein, 890 aa, synthetic construct
  REGION 1..890: note = Variant of RNA polymerase
MHHHHHHMNTINIAKNDFSDIELAAIPFNTLADHYGERLAREQLALEHESYEMGEARFRKMFERQLKAGEVADNAAAKPLITTLLPKMIARINDWFEEVKAKRGKRPTAFQFLQEIKPEAVAYITIKTTLACLTSADNTTVQAVASAIGRAIEDEARFGRIRDLEAKHFKKNVEEQLNKRVGHVYKKAFMQVVEHDMLSKGLLGGEAWSSWHKEDSIHVGVRCIEMLIESTGMVSLHRQNAGVVGQDSETIELAPEYAEAIATRAGALAGISPMFQPCVVPPKPWTGITGGGYWAAGRKPLQLVRTRSLAALRRYEEVSMPEVIKAVNIAQNTAWRINKKVLDVANTITQWQHCPVADVPAMDRGEMPARPLDIDTNEIALKAWKKEASAFYRKDKARVSRRLSMEFMLSQANKFANYEAIWFPQNMDWRGRVYAVPMFNPQGNDMTKGLLTFAQEKPIGEDGFYWLKIHGANTAGVDKVPFPQRIKFVEDNHTNIMECAKAPLENTWWAEQDSPFRFLAFCFEYAGVINSGLSYNCSLPLAFDGSCSGLQHFSAMLRDEIGGKAVNLLPSAEYQDIYRIVSDKVNEMLKQDLINGTSTTVETVTDKKTGEITQRTKYGTKVMAQWWLEHGVNRGVTKRSVMTLVYGSKEFGFRDQVLSDTIQPAIDNGKGDMFLNPNQAAGYMAKLIWNAVSGTVVAAVEAMNWLKSAAKLLAAEVKDPKTDTVLRGRCAVHWVTPDGFPVWQEYKKPIQTRLNLMFLGQFRLQPTINTNKDSEIDAHKQESGIAPNFVHSQDGNHLRMTVVWAHEKYGIESFALIHDSFGTIPADAANLFKAVRETFVDTYESCDVLADFYDQFADQLHESQRDKMPALPAKGKLNLRDILKSDFAFA

SEQ ID NO: 1027 - DNA, 2670 bp, synthetic construct
  misc_feature 1..2670: note = Variant of RNA polymerase
  source 1..2670: mol_type = other DNA
atgcaccatcaccatcaccatatgaacacgattaacattgctaagaacgacttctctgacatcgaactggctgctatcccgttcaacactctggctgaccattacggtgagcgtttagctcgcgaacagttggcccttgagcatgagtcttacgagatgggtgaagcacgcttccgcaagatgtttgagcgtcaacttaaagctggtgaggttgcggataacgctgccgccaagcctctcatcactaccctactccctaagatgattgcacgcatcaacgactggtttgaggaagtgaaagctaagcgcggcaagcgcccgacagccttccagttcctgcaagaaatcaagccggaagccgtagcgtacatcaccattaagaccactctggcttgcctgacccgtgcggacaatacaaccgttcaggctgtagcaagcgcaatcggtcgggccattgaggacgaggctcgcttcggtcgtatccgtgaccttgaagctaagcacttcaagaagaacgttgaggaacaactcaacaagcgcgtagggcacgtctacaagaaagcatttatgcaagttgtcgagcacgacatgctctctaagggtctactcggtggcgaggcgtggtcttcgtggcataaggaagactctattcatgtaggagtacgctgcatcgagatgctcattgagtcaaccggaatggttagcttacaccgccaaaatgctggcgtagtaggtcaagactctgagactatcgaactcgcacctgaatacgctgaggctatcgcaacccgtgcaggtgcgctggctggcatctctccgatgttccaaccttgcgtagttcctcctaagccgtggactggcattactggtggtggctattgggctgcggggcgcaaacccctgcagttagtacgtactcgcagtctggcggcgcttcgccgctatgaagaagtgtcgatgccggaggtcatcaaagcagtcaacattgcgcagaatacagcatggcgtattaacaaggaagttctcgacgtagcgaataccatcacccaatggcagcactgtccagtcgcggatgtgcctgcgatggatcgtggcgaaatgccagctcgtccgttggacatcgataccaacgagattgcacttaaagcgtggaagaaagaagcttccgcgttctaccgcaaagacaaagcacgcgtgagccgtcgtctgtcgatggagtttatgttatctcaggcgaacaagtttgcgaattatgaggcaatctggtttccgcaaaacatggattggcgtgggcgcgtgtacgctgtcccgatgttcaatcctcagggcaacgatatgacgaaaggcctgctgacctttgcgcaggagaaacccattggtgaagacggcttctattggctcaagattcatggcgcaaatacagctggagtggataaagtaccgtttccacaacgcatcaaatttgttgaggataaccatacgaatattatggaatgcgcgaaagcaccgctggaaaacacttggtgggcggaacaggactcgccgttctgttttctggcgttctgctttgagtatgctggcgtcatcaatagtggtctgtcgtacaactgtagcttgcctctggcatttgatggtagttgctccggcctgcaacatttctcagcgatgttacgcgacgaaattggcggcaaagctgtgaatctcctcccatctgcggaataccaggatatttatcgtatcgtcagcgacaaagttaacgagatgctgaaacaagatctgattaacggtacctctaccaccgtggaaacggtgactgataagaagacaggcgaaattacccaacgcacgaaatacgggaccaaagttatggcacagtggtggttagaacacggtgtgaatcgtggcgtcacgaaacgctcggttatgactttggtgtatgggagcaaagagtttggattccgcgatcaagtgctgagtgacaccattcaaccggcgatcgataacggcaaaggtgacatgtttctgaatccgaatcaggctgctggttacatggcgaaactgatctggaacgcagtgtccgggaccgtagtcgcagcagttgaggcgatgaactggctgaaaagtgcggcgaaattacttgctgctgaagtgaaggatcctaagacggatacagttctgcgtggccgctgcgcagtacattgggtgactcccgacggcttccctgtgtggcaggaatacaagaagcctattcagacgcgcttgaacctgatgttcctcggtcagttccgcttacagcctaccattaacaccaacaaagatagcgagattgatgcacacaaacaggagtctggtatcgctcctaactttgtacacagccaagacggtaaccaccttcgtatgactgtagtgtgggcacacgagaagtacggaatcgaatcttttgcactgattcacgactccttcggtaccattccggctgacgctgcgaacctgttcaaagcagtgcgcgaaactttcgttgacacatatgagtcttgtgatgtactggctgatttctacgaccagttcgctgaccagttgcacgagtctcaacgcgacaaaatgccagcacttccggctaaaggtaacttgaacctccgtgacatcttaaaatcggacttcgcgttcgcg

SEQ ID NO: 1028 - protein, 890 aa, synthetic construct
  REGION 1..890: note = Variant of RNA polymerase
MHHHHHHMNTINIAKNDFSDIELAAIPFNTLADHYGERLAREQLALEHESYEMGEARFRKMFERQLKAGEVADNAAAKPLITTLLPKMIARINDWFEEVKAKRGKRPTAFQFLQEIKPEAVAYITIKTTLACLTRADNTTVQAVASAIGRAIEDEARFGRIRDLEAKHFKKNVEEQLNKRVGHVYKKAFMQVVEHDMLSKGLLGGEAWSSWHKEDSIHVGVRCIEMLIESTGMVSLHRQNAGVVGQDSETIELAPEYAEAIATRAGALAGISPMFQPCVVPPKPWTGITGGGYWAAGRKPLQLVRTRSLAALRRYEEVSMPEVIKAVNIAQNTAWRINKEVLDVANTITQWQHCPVADVPAMDRGEMPARPLDIDTNEIALKAWKKEASAFYRKDKARVSRRLSMEFMLSQANKFANYEAIWFPQNMDWRGRVYAVPMFNPQGNDMTKGLLTFAQEKPIGEDGFYWLKIHGANTAGVDKVPFPQRIKFVEDNHTNIMECAKAPLENTWWAEQDSPFCFLAFCFEYAGVINSGLSYNCSLPLAFDGSCSGLQHFSAMLRDEIGGKAVNLLPSAEYQDIYRIVSDKVNEMLKQDLINGTSTTVETVTDKKTGEITQRTKYGTKVMAQWWLEHGVNRGVTKRSVMTLVYGSKEFGFRDQVLSDTIQPAIDNGKGDMFLNPNQAAGYMAKLIWNAVSGTVVAAVEAMNWLKSAAKLLAAEVKDPKTDTVLRGRCAVHWVTPDGFPVWQEYKKPIQTRLNLMFLGQFRLQPTINTNKDSEIDAHKQESGIAPNFVHSQDGNHLRMTVVWAHEKYGIESFALIHDSFGTIPADAANLFKAVRETFVDTYESCDVLADFYDQFADQLHESQRDKMPALPAKGNLNLRDILKSDFAFA

SEQ ID NO: 1029 - DNA, 2670 bp, synthetic construct
  misc_feature 1..2670: note = Variant of RNA polymerase
  source 1..2670: mol_type = other DNA
atgcaccatcaccatcaccatatgaacacgattaacattgctaagaacgacttctctgacatcgaactggctgctatcccgttcaacactctggctgaccattacggtgagcgtttagctcgcgaacagttggcccttgagcatgagtcttacgagatgggtgaagcacgcttccgcaagatgtttgagcgtcaacttaaagctggtgaggttgcggataacgctgccgccaagcctctcatcactaccctactccctaagatgattgcacgcatcaacgactggtttgaggaagtgaaagctaagcgcggcaagcgcccgacagccttccagttcctgcaagaaatcaagccggaagccgtagcgtacatcaccattaagaccactctggcttgcctaaccagtgcggacaatacaaccgttcaggctgtagcaagcgcaatcggtcgggccattgaggacgaggctcgcttcggtcgtatccgtgaccttgaagctaagcacttcaagaagaacgttgaggaacaactcaacaagcgcgtagggcacgtctacaagaaagcatttatgcaagttgtcgagcacgacatgctctctaagggtctactcggtggcgaggcgtggtcttcgtggcataaggaagactctattcatgtaggagtacgctgcatcgagatgctcattgagtcaaccggaatggttagcttacaccgccaaaatgctggcgtagtgggtgcagactctgagactatcgaactcgcacctgaatacgctgaggctatcgcaacccgtgcaggtgcgctggctggcatctctccgatgttccaaccttgcgtagttcctcctaagccgtggactggcattactggtggtggctattgggctgcggggcgcaaacccctgcagttagtacgtactcgcagtctggcggcgcttcgccgctatgaagaagtgtcgatgccggaggtcatcaaagcagtcaacattgcgcagaatacagcatggcgtattaacaagaaagttctcgacgtagcgaataccatcacccaatggcagcactgtccagtcgcggatgtgcctgcgatggatcgtggcgaaatgccagctcgtccgttggacatcgataccaacgagattgcacttaaagcgtggaagaaagaagcttccgcgttctaccgcaaagacaaagcacgcatgagccgtcgtctgtcgatggagtttatgttatctcaggcgaacaagtttgcgaattatgaggcaatctggtttccgcaaaacatggattggcgtgggcgcgtgtacgctgtcccgatgttcaatcctcagggcaacgatatgacgaaaggcctgctgacctttgcgcaggagaaacccattggtgaagacggcttctattggctcaagattcatggcgcaaatacagctggagtggataaagtaccgtttccacaacgcatcaaatttgttgaggataaccatacgaatattatggaatgcgcgaaagcaccgctggaaaacacttggtgggcggaacaggactcgccgttctgctttctggcgttctgctttgagtatgctggcgtcatcaatagtggtctgtcgtacaactgtagcttgcctctggcatttgatggtagttgctccggcctgcaacatttctcagcgatgttacgcgacgaaattggcggcaaagctgtgaatctcctcccatctgcggaataccaggatatttatcgtatcgtcagcgacaaagttaacgagatgctgaaacaagatctgattaacggtacctctaccaccgtggaaacggtgactgataaaaagacaggcgaaattacccaacgcacgaaatacgggaccaaagttatggcacagtggtggttagaacacggtgtgaatcgtggcgtcacgaaacgcccggttatgactttggtgtatgggagcaaagagtttggattccgcgatcaagtgctgagtgacaccattcaaccggcgatcgataacggcaagggtgacatgtttctgaatccgaatcaggctgctggttacatggcgaaactgatctggaacgcagtgtccgggaccgtagtcgcagcagttgaggcgatgaactggctgaaaagtgcggcgaaattacttgctgctgaagtgaaggatgagaagacggatacagttctgcgtggccgctgcgcagtacattgggtgactcccgacggcttccctgtgtggcaggaatacaagaagcctattcaaacgcgcttgaacctgatgttcctcggtcagttccgcttacagcctaccattaacaccaacaaagatagcgagattgatgcacgcaaacaggtgtctggtatcgctcctaactttgtacacagcctggacggtaaccaccttcgtatgactgtagtgtgggcacacgagaagtacggaatcgaatcttttgcactgattcacgactccttcggtaccattccggctgacgctgcgaacctgttcaaagcagtgcgcgaaactttcgttgacacatatgagtcttgtgatgtactggctgatttctacgaccagattgctgaccagttgcacgagtctcaacgcgacaaaatgccagcacttccggctaaaggtaagttgaacctccgtgacatcttaaaatcggacttcgcgttcgcg

SEQ ID NO: 1030 - protein, 890 aa, synthetic construct
  REGION 1..890: note = Variant of RNA polymerase
MHHHHHHMNTINIAKNDFSDIELAAIPFNTLADHYGERLAREQLALEHESYEMGEARFRKMFERQLKAGEVADNAAAKPLITTLLPKMIARINDWFEEVKAKRGKRPTAFQFLQEIKPEAVAYITIKTTLACLTSADNTTVQAVASAIGRAIEDEARFGRIRDLEAKHFKKNVEEQLNKRVGHVYKKAFMQVVEHDMLSKGLLGGEAWSSWHKEDSIHVGVRCIEMLIESTGMVSLHRQNAGVVGADSETIELAPEYAEAIATRAGALAGISPMFQPCVVPPKPWTGITGGGYWAAGRKPLQLVRTRSLAALRRYEEVSMPEVIKAVNIAQNTAWRINKKVLDVANTITQWQHCPVADVPAMDRGEMPARPLDIDTNEIALKAWKKEASAFYRKDKARMSRRLSMEFMLSQANKFANYEAIWFPQNMDWRGRVYAVPMFNPQGNDMTKGLLTFAQEKPIGEDGFYWLKIHGANTAGVDKVPFPQRIKFVEDNHTNIMECAKAPLENTWWAEQDSPFCFLAFCFEYAGVINSGLSYNCSLPLAFDGSCSGLQHFSAMLRDEIGGKAVNLLPSAEYQDIYRIVSDKVNEMLKQDLINGTSTTVETVTDKKTGEITQRTKYGTKVMAQWWLEHGVNRGVTKRPVMTLVYGSKEFGFRDQVLSDTIQPAIDNGKGDMFLNPNQAAGYMAKLIWNAVSGTVVAAVEAMNWLKSAAKLLAAEVKDEKTDTVLRGRCAVHWVTPDGFPVWQEYKKPIQTRLNLMFLGQFRLQPTINTNKDSEIDARKQVSGIAPNFVHSLDGNHLRMTVVWAHEKYGIESFALIHDSFGTIPADAANLFKAVRETFVDTYESCDVLADFYDQIADQLHESQRDKMPALPAKGKLNLRDILKSDFAFA

SEQ ID NO: 1031 - DNA, 2670 bp, synthetic construct
  misc_feature 1..2670: note = Variant of RNA polymerase
  source 1..2670: mol_type = other DNA
atgcaccatcaccatcaccatatgaacacgattaacattgctaagaacgacttctctgacatcgaactggctgctatcccgttcaacactctggctgaccattacggtgagcgtttagctcgcgaacagttggcccttgagcatgagtcttacgagatgggtgaagcacgcttccgcaagatgtttgagcgtcaacttaaagctggtgaggttgcggataacgctgccgccaagcctctcatcactaccctactccctaagatgattgcacgcatcaacgactggtttgaggaagtgaaagctaagcgcggcaagcgcccgacagccttccagttcctgcaagaaatcaagccggaagccgtagcgtacatcaccattaagaccactctggcttgcctaaccagtgcggacaatacaaccgttcaggctgtagcaagcgcaatcggtcgggccattgaggacgaggctcgcttcggtcgtatccgtgaccttgaagctaagcacttcaagaagaacgttgaggaacaactcaacaagcgcgtagggcacgtctacaagaaagcatttatgcaagttgtcgagcacgacatgctctctaagggtctactcggtggcgaggcgtggtcttcgtggcataaggaagactctattcatgtaggagtacgctgcatcgagatgctcattgagtcaaccggaatggttagcttacaccgccaaaatgctggcgtagtaggtcaagactctgagactatcgaactcgcacctgaatacgctgaggctatcgcaacccgtgcaggtgcgctggctggcatctctccgatgttccaaccttgcgtagttcctcctaagccgtggactggcattactggtggtggctattgggctgcggggcgcaaacccctgcagttagtacgtactcgcagtctggcggcgcttcgccgctatgaagaagtgtcgatgccggaggtcatcaaagcagtcaacattgcgcagaatacagcatggcgtattaacaaggaagttctcgacgtagcgaataccatcacccaatggcagcactgtccagtcgcggatgtgcctgcgatggatcgtggcgaaatgccagctcgtccgttggacatcgataccaacgagattgcacttaaagcgtggaagaaagaagcttccgcgttctaccgcaaagacaaagcacgcgttagccgtcgtctgtcaatggagtttatgttatctcaggcgaacaagtttgcgaattatgaggcaatctggtttccgcaaaacatggattggcgtgggcgcgtgtacgctgtcccgatgttcaatcctcagggcaacgatatgacgaaaggcctgctgacctttgcgcaggagaaacccattggtgaagacggcttctattggctcaagattcatggcgcaaatacagctggagtggataaagtaccgtttccacaacgcatcaaatttgttgaggataaccatacgaatattatggaatgcgcgaaagcaccgctggaaaacacttggtgggcggaacaggactcgccgttctgttttctggcgttctgctttgagtatgctggcgtcatcaatagtggtctgtcgtacaactgtagcttgcctctggcatttgatggtagttgctccggcctgcaacatttctcagcgatgttacgcgacgaaattggcggcaaagctgtgaatctcctcccatctgcggaataccaggatatttatcgtatcgtcagcgacaaagttaacgagatgctgaaacaagatctgattaacggtacctctaccaccgtggaaacggtgactgataagaagacaggcgaaattacccaacgcacgaaatacgggaccaaagttatggcacagtggtggttagaacacggtgtgaatcgtggcgtcacgaaacgctcggttatgactttggtgtatgggagcaaagagtttggattccgcgatcaagtgctgagtgacaccattcaaccggcgatcgataacggcaaaggtgacatgtttctgaatccgaatcaggctgctggttacatggcgaaactgatctggaacgcagtgtccgggaccgtagtcgcagcagttgaggcgatgaactggctgaaaagtgcggcgaaattacttgctgctgaagtgaaggatcctaagacggatacagttctgcgtggccgctgcgcagtacattgggtgactcccgacggcttccctgtgtggcaggaatacaagaagcctattcagacgcgcttgaacctgatgttcctcggtcagttccgcttacagcctaccattaacaccaacaaagatagcgagattgatgcacacaaacaggagtctggtatcgctcctaactttgtacacagccaagacggtaaccaccttcgtatgactgtagtgtgggcacacgagaagtacggaatcgaatcttttgcactgattcacgactccttcggtaccattccggctgacgctgcgaacctgttcaaagcagtgcgcgaaactttcgttgacacatatgagtcttgtgatgtactggctgatttctacgaccagttcgctgaccagttgcacgagtctcaacgcgacaaaatgccagcacttccggctaaaggtaacttgaacctccgtgacatcttaaaatcggacttcgcgttcgcg

SEQ ID NO: 1032 - protein, 890 aa, synthetic construct
  REGION 1..890: note = Variant of RNA polymerase
MHHHHHHMNTINIAKNDFSDIELAAIPFNTLADHYGERLAREQLALEHESYEMGEARFRKMFERQLKAGEVADNAAAKPLITTLLPKMIARINDWFEEVKAKRGKRPTAFQFLQEIKPEAVAYITIKTTLACLTSADNTTVQAVASAIGRAIEDEARFGRIRDLEAKHFKKNVEEQLNKRVGHVYKKAFMQVVEHDMLSKGLLGGEAWSSWHKEDSIHVGVRCIEMLIESTGMVSLHRQNAGVVGQDSETIELAPEYAEAIATRAGALAGISPMFQPCVVPPKPWTGITGGGYWAAGRKPLQLVRTRSLAALRRYEEVSMPEVIKAVNIAQNTAWRINKEVLDVANTITQWQHCPVADVPAMDRGEMPARPLDIDTNEIALKAWKKEASAFYRKDKARVSRRLSMEFMLSQANKFANYEAIWFPQNMDWRGRVYAVPMFNPQGNDMTKGLLTFAQEKPIGEDGFYWLKIHGANTAGVDKVPFPQRIKFVEDNHTNIMECAKAPLENTWWAEQDSPFCFLAFCFEYAGVINSGLSYNCSLPLAFDGSCSGLQHFSAMLRDEIGGKAVNLLPSAEYQDIYRIVSDKVNEMLKQDLINGTSTTVETVTDKKTGEITQRTKYGTKVMAQWWLEHGVNRGVTKRSVMTLVYGSKEFGFRDQVLSDTIQPAIDNGKGDMFLNPNQAAGYMAKLIWNAVSGTVVAAVEAMNWLKSAAKLLAAEVKDPKTDTVLRGRCAVHWVTPDGFPVWQEYKKPIQTRLNLMFLGQFRLQPTINTNKDSEIDAHKQESGIAPNFVHSQDGNHLRMTVVWAHEKYGIESFALIHDSFGTIPADAANLFKAVRETFVDTYESCDVLADFYDQFADQLHESQRDKMPALPAKGNLNLRDILKSDFAFA

SEQ ID NO: 1033 - DNA, 2670 bp, synthetic construct
  misc_feature 1..2670: note = Variant of RNA polymerase
  source 1..2670: mol_type = other DNA
atgcaccatcaccatcaccatatgaacacgattaacattgctaagaacgacttctctgacatcgaactggctgctatcccgttcaacactctggctgaccattacggtgagcgtttagctcgcgaacagttggcccttgagcatgagtcttacgagatgggtgaagcacgcttccgcaagatgtttgagcgtcaacttaaagctggtgaggttgcggataacgctgccgccaagcctctcatcactaccctactccctaagatgattgcacgcatcaacgactggtttgaggaagtgaaagctaagcgcggcaagcgcccgacagccttccagttcctgcaagaaatcaagccggaagccgtagcgtacatcaccattaagaccactctggcttgcctaaccagtgcggacaatacaaccgttcaggctgtagcaagcgcaatcggtcgggccattgaggacgaggctcgcttcggtcgtatccgtgaccttgaagctaagcacttcaagaagaacgttgaggaacaactcaacaagcgcgtagggcacgtctacaagaaagcatttatgcaagttgtcgagcacgacatgctctctaagggtctactcggtggcgaggcgtggtcttcgtggcataaggaagactctattcatgtaggagtacgctgcatcgagatgctcattgagtcaaccggaatggttagcttacaccgccaaaatgctggcgtagtgggtgcagactctgagactatcgaactcgcacctgaatacgctgaggctatcgcaacccgtgcaggtgcgctggctggcatctctccgatgttccaaccttgcgtagttcctcctaagccgtggactggcattactggtggtggctattgggctgcggggcgcaaacccctgcagttagtacgtactcgcagtctggcggcgcttcgccgctatgaagaagtgtcgatgccggaggtcatcaaagcagtcaacattgcgcagaatacagcatggcgtattaacaaggaagttctcgacgtagcgaataccatcacccaatggcagcactgtccagtcgcggatgtgcctgcgatggatcgtggcgaaatgccagctcgtccgttggacatcgataccaacgagattgcacttaaagcgtggaagaaagaagcttccgcgttctaccgcaaagacaaagcacgcgttagccgtcgtctgtcaatggagtttatgttatctcaggcgaacaagtttgcgaattatgaggcaatctggtttccgcaaaacatggattggcgtgggcgcgtgtacgctgtcccgatgttcaatcctcagggcaacgatatgacgaaaggcctgctgacctttgcgcaggagaaacccattggtgaagacggcttctattggctcaagattcatggcgcaaatacagctggagtggataaagtaccgtttccacaacgcatcaaatttgttgaggataaccatacgaatattatggaatgcgcgaaagcaccgctggaaaacacttggtgggcggaacaggactcgccgttctgttttctggcgttctgctttgagtatgctggcgtcatcaatagtggtctgtcgtacaactgtagcttgcctctggcatttgatggtagttgctccggcctgcaacatttctcagcgatgttacgcgacgaaattggcggcaaagctgtgaatctcctcccatctgcggaataccaggatatttatcgtatcgtcagcgacaaagttaacgagatgctgaaacaagatctgattaacggtacctctaccaccgtggaaacggtgactgataagaagacaggcgaaattacccaacgcacgaaatacgggaccaaagttatggcacagtggtggttagaacacggtgtgaatcgtggcgtcacgaaacgctcggttatgactttggtgtatgggagcaaagagtttggattccgcgatcaagtgctgagtgacaccattcaaccggcgatcgataacggcaaaggtgacatgtttctgaatccgaatcaggctgctggttacatggcgaaactgatctggaacgcagtgtccgggaccgtagtcgcagcagttgaggcgatgaactggctgaaaagtgcggcgaaattacttgctgctgaagtgaaggatcctaagacggatacagttctgcgtggccgctgcgcagtacattgggtgactcccgacggcttccctgtgtggcaggaatacaagaagcctattcagacgcgcttgaacctgatgttcctcggtcagttccgcttacagcctaccattaacaccaacaaagatagcgagattgatgcacacaaacaggagtctggtatcgctcctaactttgtacacagccaagacggtaaccaccttcgtatgactgtagtgtgggcacacgagaagtacggaatcgaatcttttgcactgattcacgactccttcggtaccattccggctgacgctgcgaacctgttcaaagcagtgcgcgaaactttcgttgacacatatgagtcttgtgatgtactggctgatttctacgaccagttcgctgaccagttgcacgagtctcaacgcgacaaaatgccagcacttccggctaaaggtaacttgaacctccgtgacatcttaaaatcggacttcgcgttcgcg

SEQ ID NO: 1034 - protein, 890 aa, synthetic construct
  REGION 1..890: note = Variant of RNA polymerase
MHHHHHHMNTINIAKNDFSDIELAAIPFNTLADHYGERLAREQLALEHESYEMGEARFRKMFERQLKAGEVADNAAAKPLITTLLPKMIARINDWFEEVKAKRGKRPTAFQFLQEIKPEAVAYITIKTTLACLTSADNTTVQAVASAIGRAIEDEARFGRIRDLEAKHFKKNVEEQLNKRVGHVYKKAFMQVVEHDMLSKGLLGGEAWSSWHKEDSIHVGVRCIEMLIESTGMVSLHRQNAGVVGADSETIELAPEYAEAIATRAGALAGISPMFQPCVVPPKPWTGITGGGYWAAGRKPLQLVRTRSLAALRRYEEVSMPEVIKAVNIAQNTAWRINKEVLDVANTITQWQHCPVADVPAMDRGEMPARPLDIDTNEIALKAWKKEASAFYRKDKARVSRRLSMEFMLSQANKFANYEAIWFPQNMDWRGRVYAVPMFNPQGNDMTKGLLTFAQEKPIGEDGFYWLKIHGANTAGVDKVPFPQRIKFVEDNHTNIMECAKAPLENTWWAEQDSPFCFLAFCFEYAGVINSGLSYNCSLPLAFDGSCSGLQHFSAMLRDEIGGKAVNLLPSAEYQDIYRIVSDKVNEMLKQDLINGTSTTVETVTDKKTGEITQRTKYGTKVMAQWWLEHGVNRGVTKRSVMTLVYGSKEFGFRDQVLSDTIQPAIDNGKGDMFLNPNQAAGYMAKLIWNAVSGTVVAAVEAMNWLKSAAKLLAAEVKDPKTDTVLRGRCAVHWVTPDGFPVWQEYKKPIQTRLNLMFLGQFRLQPTINTNKDSEIDAHKQESGIAPNFVHSQDGNHLRMTVVWAHEKYGIESFALIHDSFGTIPADAANLFKAVRETFVDTYESCDVLADFYDQFADQLHESQRDKMPALPAKGNLNLRDILKSDFAFA

SEQ ID NO: 1035 - DNA, 2670 bp, synthetic construct
  misc_feature 1..2670: note = Variant of RNA polymerase
  source 1..2670: mol_type = other DNA
atgcaccatcaccatcaccatatgaacacgattaacattgctaagaacgacttctctgacatcgaactggctgctatcccgttcaacactctggctgaccattacggtgagcgtttagctcgcgaacagttggcccttgagcatgagtcttacgagatgggtgaagcacgcttccgcaagatgtttgagcgtcaacttaaagctggtgaggttgcggataacgctgccgccaagcctctcatcactaccctactccctaagatgattgcacgcatcaacgactggtttgaggaagtgaaagctaagcgcggcaagcgcccgacagccttccagttcctgcaagaaatcaagccggaagccgtagcgtacatcaccattaagaccactctggcttgcctaaccagtgcggacaatacaaccgttcaggctgtagcaagcgcaatcggtcgggccattgaggacgaggctcgcttcggtcgtatccgtgaccttgaagctaagcacttcaagaagaacgttgaggaacaactcaacaagcgcgtagggcacgtctacaagaaagcatttatgcaagttgtcgagcacgacatgctctctaagggtctactcggtggcgaggcgtggtcttcgtggcataaggaagactctattcatgtaggagtacgctgcatcgagatgctcattgagtcaaccggaatggttagcttacaccgccaaaatgctggcgtagtaggtcaagactctgagactatcgaactcgcacctgaatacgctgaggctatcgcaacccgtgcaggtgcgctggctggcatctctccgatgttccaaccttgcgtagttcctcctaagccgtggactggcattactggtggtggctattgggctgcggggcgcaaacccctgcagttagtacgtactcgcagtctggcggcgcttcgccgctatgaagaagtgtcgatgccggaggtcatcaaagcagtcaacattgcgcagaatacagcatggcgtattaacaagaaagttctcgacgtagcgaataccatcacccaatggcagcactgtccagtcgcggatgtgcctgcgatggatcgtggcgaaatgccagctcgtccgttggacatcgataccaacgagattgcacttaaagcgtggaagaaagaagcttccgcgttctaccgcaaagacaaagcacgcgttagccgtcgtctgtcaatggagtttatgttatctcaggcgaacaagtttgcgaattatgaggcaatctggtttccgcaaaacatggattggcgtgggcgcgtgtacgctgtcccgatgttcaatcctcagggcaacgatatgacgaaaggcctgctgacctttgcgcaggagaaacccattggtgaagacggcttctattggctcaagattcatggcgcaaatacagctggagtggataaagtaccgtttccacaacgcatcaaatttgttgaggataaccatacgaatattatggaatgcgcgaaagcaccgctggaaaacacttggtgggcggaacaggactcgccgttctgctttctggcgttctgctttgagtatgctggcgtcatcaatagtggtctgtcgtacaactgtagcttgcctctggcatttgatggtagttgctccggcctgcaacatttctcagcgatgttacgcgacgaaattggcggcaaagctgtgaatctcctcccatctgcggaataccaggatatttatcgtatcgtcagcgacaaagttaacgagatgctgaaacaagatctgattaacggtacctctaccaccgtggaaacggtgactgataagaagacaggcgaaattacccaacgcacgaaatacgggaccaaagttatggcacagtggtggttagaacacggtgtgaatcgtggcgtcacgaaacgctcggttatgactttggtgtatgggagcaaagagtttggattccgcgatcaagtgctgagtgacaccattcaaaaagcgatcgataacggcaagggtgacatgtttctgaatccgaatcaggctgctggttacatggcgaaactgatctggaacgcagtgtccgggaccgtagtcgcagcagttgaggcgatgaactggctgaaaagtgcggcgaaattacttgctgctgaagtgaaggatcgtaagacggatacagttctgcgtggccgctgcgcagtacattgggtgactcccgacggcttccctgtgtggcaggaatacaagaagcctattcagacgcgcttgaacctgatgttcctcggtcagttccgcttacagcctaccattaacaccaacaaagatagcgagattgatgcacgcaaacaggtgtctggtatcgctcctaactttgtacacagcctggacggtaaccaccttcgtatgactgtagtgtgggcacacgagaagtacggaatcgaatcttttgcactgattcacgactccttcggtaccattccggctgacgctgcgaacctgttcaaagcagtgcgcgaaactttcgttgacacatatgagtcttgtgatgtactggctgatttctacgaccagattgctgaccagttgcacgagtctcaacgcgacaaaatgccagcacttccggctaaaggtaacttgaacctccgtgacatcttaaaatcggacttcgcgttcgcg

SEQ ID NO: 1036 - protein, 890 aa, synthetic construct
  REGION 1..890: note = Variant of RNA polymerase
MHHHHHHMNTINIAKNDFSDIELAAIPFNTLADHYGERLAREQLALEHESYEMGEARFRKMFERQLKAGEVADNAAAKPLITTLLPKMIARINDWFEEVKAKRGKRPTAFQFLQEIKPEAVAYITIKTTLACLTSADNTTVQAVASAIGRAIEDEARFGRIRDLEAKHFKKNVEEQLNKRVGHVYKKAFMQVVEHDMLSKGLLGGEAWSSWHKEDSIHVGVRCIEMLIESTGMVSLHRQNAGVVGQDSETIELAPEYAEAIATRAGALAGISPMFQPCVVPPKPWTGITGGGYWAAGRKPLQLVRTRSLAALRRYEEVSMPEVIKAVNIAQNTAWRINKKVLDVANTITQWQHCPVADVPAMDRGEMPARPLDIDTNEIALKAWKKEASAFYRKDKARVSRRLSMEFMLSQANKFANYEAIWFPQNMDWRGRVYAVPMFNPQGNDMTKGLLTFAQEKPIGEDGFYWLKIHGANTAGVDKVPFPQRIKFVEDNHTNIMECAKAPLENTWWAEQDSPFCFLAFCFEYAGVINSGLSYNCSLPLAFDGSCSGLQHFSAMLRDEIGGKAVNLLPSAEYQDIYRIVSDKVNEMLKQDLINGTSTTVETVTDKKTGEITQRTKYGTKVMAQWWLEHGVNRGVTKRSVMTLVYGSKEFGFRDQVLSDTIQKAIDNGKGDMFLNPNQAAGYMAKLIWNAVSGTVVAAVEAMNWLKSAAKLLAAEVKDRKTDTVLRGRCAVHWVTPDGFPVWQEYKKPIQTRLNLMFLGQFRLQPTINTNKDSEIDARKQVSGIAPNFVHSLDGNHLRMTVVWAHEKYGIESFALIHDSFGTIPADAANLFKAVRETFVDTYESCDVLADFYDQIADQLHESQRDKMPALPAKGNLNLRDILKSDFAFA

SEQ ID NO: 1037 - DNA, 2670 bp, synthetic construct
  misc_feature 1..2670: note = Variant of RNA polymerase
  source 1..2670: mol_type = other DNA
atgcaccatcaccatcaccatatgaacacgattaacattgctaagaacgacttctctgacatcgaactggctgctatcccgttcaacactctggctgaccattacggtgagcgtttagctcgcgaacagttggcccttgagcatgagtcttacgagatgggtgaagcacgcttccgcaagatgtttgagcgtcaacttaaagctggtgaggttgcggataacgctgccgccaagcctctcatcactaccctactccctaagatgattgcacgcatcaacgactggtttgaggaagtgaaagctaagcgcggcaagcgcccgacagccttccagttcctgcaagaaatcaagccggaagccgtagcgtacatcaccattaagaccactctggcttgcctaaccagtgcggacaatacaaccgttcaggctgtagcaagcgcaatcggtcgggccattgaggacgaggctcgcttcggtcgtatccgtgaccttgaagctaagcacttcaagaagaacgttgaggaacaactcaacaagcgcgtagggcacgtctacaagaaagcatttatgcaagttgtcgagcacgacatgctctctaagggtctactcggtggcgaggcgtggtcttcgtggcataaggaagactctattcatgtaggagtacgctgcatcgagatgctcattgagtcaaccggaatggttagcttacaccgccaaaatgctggcgtagtaggtcaagactctgagactatcgaactcgcacctgaatacgctgaggctatcgcaacccgtgcaggtgcgctggctggcatctctccgatgttccaaccttgcgtagttcctcctaagccgtggactggcattactggtggtggctattgggctgcggggcgcaaacccctgcagttagtacgtactcgcagtctggcggcgcttcgccgctatgaagaagtgtcgatgccggaggtcatcaaagcagtcaacattgcgcagaatacagcatggcgtattaacaagaaagttctcgacgtagcgaataccatcacccaatggcagcactgtccagtcgcggatgtgcctgcgatggatcgtggcgaaatgccagctcgtccgttggacatcgataccaacgagattgcacttaaagcgtggaagaaagaagcttccgcgttctaccgcaaagacaaagcacgcatgagccgtcgtctgctgatggagtttatgttatctcaggcgaacaagtttgcgaattatgaggcaatctggtttccgcaaaacatggattggcgtgggcgcgtgtacgctgtcccgatgttcaatcctcagggcaacgatatgacgaaaggcctgctgacctttgcgcaggagaaacccattggtgaagacggcttctattggctcaagattcatggcgcaaatacagctggagtggataaagtaccgtttccacaacgcatcaaatttgttgaggataaccatacgaatattatggaatgcgcgaaagcaccgctggaaaacacttggtgggcggaacaggactcgccgttccgctttctggcgttctgctttgagtatgctggcgtcatcaatagtggtctgtcgtacaactgtagcttgcctctggcatttgatggtagttgctccggcctgcaacatttctcagcgatgttacgcgacgaaattggcggcaaagctgtgaatctcctcccatctgcggaataccaggatatttatcgtatcgtcagcgacaaagttaacgagatgctgaaacaagatctgattaacggtacctctaccaccgtggaaacggtgactgataaaaagacaggcgaaattacccaacgcacgaaatacgggaccaaagttatggcacagtggtggttagaacacggtgtgaatcgtggcgtcacgaaacgctcggttatgactttggtgtatgggagcaaagagtttggattccgcgatcaagtgctgagtgacaccattcaaccggcgatcgataacggcaacggtgacatgtttctgaatccgaatcaggctgctggttacatggcgaaactgatctggaacgcagtgtccgggaccgtagtcgcagcagttgaggcgatgaactggctgaaaagtgcggcgaaattacttgctgctgaagtgaaggatcctaagacggatacagttctgcgtggccgctgcgcagtacattgggtgactcccgacggcttccctgtgtggcaggaatacaagaagcctattcagacgcgcttgaacctgatgttcctcggtcagttccgcttacagcctaccattaacaccaacaaagatagcgagattgatgcacgcaaacaggtgtctggtatcgctcctaactttgtacacagccaagacggtaaccaccttcgtatgactgtagtgtgggcacacgagaagtacggaatcgaatcttttgcactgattcacgactccttcggtaccattccggctgacgctgcgaacctgttcaaagcagtgcgcgaaactttcgttgacacatatgagtcttgtgatgtactggctgatttctacgaccagtttgctgaccagttgcacgagtctcaacgcgacaaaatgccagcacttccggctaaaggtaagttgaacctccgtgacatcttaaaatcggacttcgcgttcgcg

SEQ ID NO: 1038 - protein, 890 aa, synthetic construct
  REGION 1..890: note = Variant of RNA polymerase
MHHHHHHMNTINIAKNDFSDIELAAIPFNTLADHYGERLAREQLALEHESYEMGEARFRKMFERQLKAGEVADNAAAKPLITTLLPKMIARINDWFEEVKAKRGKRPTAFQFLQEIKPEAVAYITIKTTLACLTSADNTTVQAVASAIGRAIEDEARFGRIRDLEAKHFKKNVEEQLNKRVGHVYKKAFMQVVEHDMLSKGLLGGEAWSSWHKEDSIHVGVRCIEMLIESTGMVSLHRQNAGVVGQDSETIELAPEYAEAIATRAGALAGISPMFQPCVVPPKPWTGITGGGYWAAGRKPLQLVRTRSLAALRRYEEVSMPEVIKAVNIAQNTAWRINKKVLDVANTITQWQHCPVADVPAMDRGEMPARPLDIDTNEIALKAWKKEASAFYRKDKARMSRRLLMEFMLSQANKFANYEAIWFPQNMDWRGRVYAVPMFNPQGNDMTKGLLTFAQEKPIGEDGFYWLKIHGANTAGVDKVPFPQRIKFVEDNHTNIMECAKAPLENTWWAEQDSPFRFLAFCFEYAGVINSGLSYNCSLPLAFDGSCSGLQHFSAMLRDEIGGKAVNLLPSAEYQDIYRIVSDKVNEMLKQDLINGTSTTVETVTDKKTGEITQRTKYGTKVMAQWWLEHGVNRGVTKRSVMTLVYGSKEFGFRDQVLSDTIQPAIDNGNGDMFLNPNQAAGYMAKLIWNAVSGTVVAAVEAMNWLKSAAKLLAAEVKDPKTDTVLRGRCAVHWVTPDGFPVWQEYKKPIQTRLNLMFLGQFRLQPTINTNKDSEIDARKQVSGIAPNFVHSQDGNHLRMTVVWAHEKYGIESFALIHDSFGTIPADAANLFKAVRETFVDTYESCDVLADFYDQFADQLHESQRDKMPALPAKGKLNLRDILKSDFAFA

SEQ ID NO: 1039 - DNA, 2670 bp, synthetic construct
  misc_feature 1..2670: note = Variant of RNA polymerase
  source 1..2670: mol_type = other DNA
atgcaccatcaccatcaccatatgaacacgattaacattgctaagaacgacttctctgacatcgaactggctgctatcccgttcaacactctggctgaccattacggtgagcgtttagctcgcgaacagttggcccttgagcatgagtcttacgagatgggtgaagcacgcttccgcaagatgtttgagcgtcaacttaaagctggtgaggttgcggataacgctgccgccaagcctctcatcactaccctactccctaagatgattgcacgcatcaacgactggtttgaggaagtgaaagctaagcgcggcaagcgcccgacagccttccagttcctgcaagaaatcaagccggaagccgtagcgtacatcaccattaagaccactctggcttgcctaaccagtgcggacaatacaaccgttcaggctgtagcaagcgcaatcggtcgggccattgaggacgaggctcgcttcggtcgtatccgtgaccttgaagctaagcacttcaagaagaacgttgaggaacaactcaacaagcgcgtagggcacgtctacaagaaagcatttatgcaagttgtcgagcacgacatgctctctaagggtctactcggtggcgaggcgtggtcttcgtggcataaggaagactctattcatgtaggagtacgctgcatcgagatgctcattgagtcaaccggaatggttagcttacaccgccaaaatgctggcgtagtaggtcaagactctgagactatcgaactcgcacctgaatacgctgaggctatcgcaacccgtgcaggtgcgctggctggcatctctccgatgttccaaccttgcgtagttcctcctaagccgtggactggcattactggtggtggctattgggctgcggggcgcaaacccctgcagttagtacgtactcgcagtctggcggcgcttcgccgctatgaagaagtgtcgatgccggaggtcatcaaagcagtcaacattgcgcagaatacagcatggcgtattaacaagaaagttctcgacgtagcgaataccatcacccaatggcagcactgtccagtcgcggatgtgcctgcgatggatcgtggcgaaatgccagctcgtccgttggacatcgataccaacgagagtgcacttaaagcgtggaagaaagaagcttccgcgttctaccgcaaagacaaagcacgcgttagccgtcgtctgtcaatggagtttatgttatctcaggcgaacaagtttgcgaattatgaggcaatctggtttccgcaaaacatggattggcgtgggcgcgtgtacgctgtcccgatgttcaatcctcagggcaacgatatgacgaaaggcctgctgacctttgcgcaggagaaacccattggtgaagacggcttctattggctcaagattcatggcgcaaatacagctggagtggataaagtaccgtttccacaacgcatcaaatttgttgaggataaccatacgaatattatggaatgcgcgaaagcaccgctggaaaacacttggtgggcggaacaggactcgccgttccgctttctggcgttctgctttgagtatgctggcgtcatcaatagtggtctgtcgtacaactgtagcttgcctctggcatttgatggtagttgctccggcctgcaacatttctcagcgatgttacgcgacgaaattggcggcaaagctgtgaatctcctcccatctgcggaataccaggatatttatcgtatcgtcagcgacaaagttaacgagatgctgaaacaagatctgattaacggtacctctaccaccgtggaaacggtgactgataagaagacaggcgaaattacccaacgcacgaaatacgggaccaaagttatggcacagtggtggttagaacacggtgtgaatcgtggcgtcacgaaacgcccggttatgactttggtgtatgggagcaaagagtttggattccgcgatcaagtgctgagtgacaccattcaacctgcgatcgataacggcaaaggtgacatgtttctgaatccgaatcaggctgctggttacatggcgaaactgatctggaacgcagtgtccgggaccgtagtcgcagcagttgaggcgatgaactggctgaaaagtgcggcgaaattacttgctgctgaagtgaaggatcctaagacggatacagttctgcgtggccgctgcgcagtacattgggtgactcccgacggcttccctgtgtggcaggaatacaagaagcctattcagacgcgcttgaacctgatgttcctcggtcagttccgcttacagcctaccattaacaccaacaaagatagcgagattgatgcacacaaacaggagtctggtatcgctcctaactttgtacacagccaagacggtaaccaccttcgtatgactgtagtgtgggcacacgagaagtacggaatcgaatcttttgcactgattcacgactccttcggtaccattccggctgacgctgcgaacctgttcaaagcagtgcgcgaaactttcgttgacacatatgagtcttgtgatgtactggctgatttctacgaccagttcgctgaccagttgcacgagtctcaacgcgacaaaatgccagcacttccggctaaaggtaacttgaacctccgtgacatcttaaaatcggacttcgcgttcgcg

SEQ ID NO: 1040 - protein, 890 aa, synthetic construct
  REGION 1..890: note = Variant of RNA polymerase
MHHHHHHMNTINIAKNDFSDIELAAIPFNTLADHYGERLAREQLALEHESYEMGEARFRKMFERQLKAGEVADNAAAKPLITTLLPKMIARINDWFEEVKAKRGKRPTAFQFLQEIKPEAVAYITIKTTLACLTSADNTTVQAVASAIGRAIEDEARFGRIRDLEAKHFKKNVEEQLNKRVGHVYKKAFMQVVEHDMLSKGLLGGEAWSSWHKEDSIHVGVRCIEMLIESTGMVSLHRQNAGVVGQDSETIELAPEYAEAIATRAGALAGISPMFQPCVVPPKPWTGITGGGYWAAGRKPLQLVRTRSLAALRRYEEVSMPEVIKAVNIAQNTAWRINKKVLDVANTITQWQHCPVADVPAMDRGEMPARPLDIDTNESALKAWKKEASAFYRKDKARVSRRLSMEFMLSQANKFANYEAIWFPQNMDWRGRVYAVPMFNPQGNDMTKGLLTFAQEKPIGEDGFYWLKIHGANTAGVDKVPFPQRIKFVEDNHTNIMECAKAPLENTWWAEQDSPFRFLAFCFEYAGVINSGLSYNCSLPLAFDGSCSGLQHFSAMLRDEIGGKAVNLLPSAEYQDIYRIVSDKVNEMLKQDLINGTSTTVETVTDKKTGEITQRTKYGTKVMAQWWLEHGVNRGVTKRPVMTLVYGSKEFGFRDQVLSDTIQPAIDNGKGDMFLNPNQAAGYMAKLIWNAVSGTVVAAVEAMNWLKSAAKLLAAEVKDPKTDTVLRGRCAVHWVTPDGFPVWQEYKKPIQTRLNLMFLGQFRLQPTINTNKDSEIDAHKQESGIAPNFVHSQDGNHLRMTVVWAHEKYGIESFALIHDSFGTIPADAANLFKAVRETFVDTYESCDVLADFYDQFADQLHESQRDKMPALPAKGNLNLRDILKSDFAFA

SEQ ID NO: 1041 - DNA, 2670 bp, synthetic construct
  misc_feature 1..2670: note = Variant of RNA polymerase
  source 1..2670: mol_type = other DNA
atgcaccatcaccatcaccatatgaacacgattaacattgctaagaacgacttctctgacatcgaactggctgctatcccgttcaacactctggctgaccattacggtgagcgtttagctcgcgaacagttggcccttgagcatgagtcttacgagatgggtgaagcacgcttccgcaagatgtttgagcgtcaacttaaagctggtgaggttgcggataacgctgccgccaagcctctcatcactaccctactccctaagatgattgcacgcatcaacgactggtttgaggaagtgaaagctaagcgcggcaagcgcccgacagccttccagttcctgcaagaaatcaagccggaagccgtagcgtacatcaccattaagaccactctggcttgcctgaccagtgaggacaatacaaccgttcaggctgtagcaagcgcaatcggtcgggccattgaggacgaggctcgcttcggtcgtatccgtgaccttgaagctaagcacttcaagaagaacgttgaggaacaactcaacaagcgcgtagggcacgtctacaagaaagcatttatgcaagttgtcgagcacgacatgctctctaagggtctactcggtggcgaggcgtggtcttcgtggcataaggaagactctattcatgtaggagtacgctgcatcgagatgctcattgagtcaaccggaatggttagcttacaccgccaaaatgctggcgtagtgggtgcagactctgagactatcgaactcgcacctgaatacgctgaggctatcgcaacccgtgcaggtgcgctggctggcatctctccgatgttccaaccttgcgtagttcctcctaagccgtggactggcattactggtggtggctattgggctgcggggcgcaaacccctgcagttagtacgtactcgcagtctggcggcgcttcgccgctatgaagaagtgtcgatgccggaggtcatcaaagcagtcaacattgcgcagaatacagcatggcgtattaacaagctggttctcgacgtagcgaataccatcacccaatggcagcactgtccagtcgcggatgtgcctgcgatggatcgtggcgaaatgccagctcgtccgttggacatcgataccaacgagattgcacttaaagcgtggaagaaagaagcttccgcgttctaccgcaaagacaaagcacgcgttagccgtcgtctgtcgatggagtttatgttatctcaggcgaacaagtttgcgaattatgaggcaatctggtttccgcaaaacatggattggcgtgggcgcgtgtacgctgtcccgatgttcaatcctcagggcaacgatatgacgaaaggcctgctgacctttgcgcaggagaaacccattggtgaagacggcttctattggctcaagattcatggcgcaaatacagctggagtggataaagtaccgtttccacaacgcatcaaatttgttgaggataaccatacgaatattatggaatgcgcgaaagcaccgctggaaaacacttggtgggcggaacaggactcgccgttctgttttctggcgttctgctttgagtatgctggcgtcatcaatagtggtctgtcgtacaactgtagcttgcctctggcatttgatggtagttgctccggcctgcaacatttctcagcgatgttacgcgacgaaattggcggcaaagctgtgaatctcctcccatctgcggaataccaggatatttatcgtatcgtcagcgacaaagttaacgagatgctgaaacaagatctgattaacggtacctctaccaccgtggaaacggtgactgataagaagacaggcgaaattacccaacgcacgaaatacgggaccaaagttatggcacagtggtggttagaacacggtgtgaatcgtggcgtcacgaaacgctcggttatgactttggtgtatgggagcaaagagtttggattccgcgatcaagtgctgagtgacaccattcaaccggcgatcgataacggcaaaggtgacatgtttctgaatccgaatcaggctgctggttacatggcgaaactgatctggaacgcagtgtccgggaccgtagtcgcagcagttgaggcgatgaactggctgaaaagtgcggcgaaattacttgctgctgaagtgaaggatcctaagacggatacagttctgcgtggccgctgcgcagtacattgggtgactcccgacggcttccctgtgtggcaggaatacaagaagcctattcagacgcgcttgaacctgatgttcctcggtcagttccgcttacagcctaccattaacaccaacaaagatagcgagattgatgcacacaaacaggagtctggtatcgctcctaactttgtacacagccaagacggtaaccaccttcgtatgactgtagtgtgggcacacgagaagtacggaatcgaatcttttgcactgattcacgactccttcggtaccattccggctgacgctgcgaacctgttcaaagcagtgcgcgaaactttcgttgacacatatgagtcttgtgatgtactggctgatttctacgaccagttcgctgaccagttgcacgagtctcaacgcgacaaaatgccagcacttccggctaaaggtaacttgaacctccgtgacatcttaaaatcggacttcgcgttcgcg

SEQ ID NO: 1042 - protein, 890 aa, synthetic construct
  REGION 1..890: note = Variant of RNA polymerase
MHHHHHHMNTINIAKNDFSDIELAAIPFNTLADHYGERLAREQLALEHESYEMGEARFRKMFERQLKAGEVADNAAAKPLITTLLPKMIARINDWFEEVKAKRGKRPTAFQFLQEIKPEAVAYITIKTTLACLTSEDNTTVQAVASAIGRAIEDEARFGRIRDLEAKHFKKNVEEQLNKRVGHVYKKAFMQVVEHDMLSKGLLGGEAWSSWHKEDSIHVGVRCIEMLIESTGMVSLHRQNAGVVGADSETIELAPEYAEAIATRAGALAGISPMFQPCVVPPKPWTGITGGGYWAAGRKPLQLVRTRSLAALRRYEEVSMPEVIKAVNIAQNTAWRINKLVLDVANTITQWQHCPVADVPAMDRGEMPARPLDIDTNEIALKAWKKEASAFYRKDKARVSRRLSMEFMLSQANKFANYEAIWFPQNMDWRGRVYAVPMFNPQGNDMTKGLLTFAQEKPIGEDGFYWLKIHGANTAGVDKVPFPQRIKFVEDNHTNIMECAKAPLENTWWAEQDSPFCFLAFCFEYAGVINSGLSYNCSLPLAFDGSCSGLQHFSAMLRDEIGGKAVNLLPSAEYQDIYRIVSDKVNEMLKQDLINGTSTTVETVTDKKTGEITQRTKYGTKVMAQWWLEHGVNRGVTKRSVMTLVYGSKEFGFRDQVLSDTIQPAIDNGKGDMFLNPNQAAGYMAKLIWNAVSGTVVAAVEAMNWLKSAAKLLAAEVKDPKTDTVLRGRCAVHWVTPDGFPVWQEYKKPIQTRLNLMFLGQFRLQPTINTNKDSEIDAHKQESGIAPNFVHSQDGNHLRMTVVWAHEKYGIESFALIHDSFGTIPADAANLFKAVRETFVDTYESCDVLADFYDQFADQLHESQRDKMPALPAKGNLNLRDILKSDFAFA

SEQ ID NO: 1043 - DNA, 2670 bp, synthetic construct
  misc_feature 1..2670: note = Variant of RNA polymerase
  source 1..2670: mol_type = other DNA
atgcaccatcaccatcaccatatgaacacgattaacattgctaagaacgacttctctgacatcgaactggctgctatcccgttcaacactctggctgaccattacggtgagcgtttagctcgcgaacagttggcccttgagcatgagtcttacgagatgggtgaagcacgcttccgcaagatgtttgagcgtcaacttaaagctggtgaggttgcggataacgctgccgccaagcctctcatcactaccctactccctaagatgattgcacgcatcaacgactggtttgaggaagtgaaagctaagcgcggcaagcgcccgacagccttccagttcctgcaagaaatcaagccggaagccgtagcgtacatcaccattaagaccactctggcttgcctaaccagtgcggacaatacaaccgttcaggctgtagcaagcgcaatcggtcgggccattgaggacgaggctcgcttcggtcgtatccgtgaccttgaagctaagcacttcaagaagaacgttgaggaacaactcaacaagcgcgtagggcacgtctacaagaaagcatttatgcaagttgtcgagcacgacatgctctctaagggtctactcggtggcgaggcgtggtcttcgtggcataaggaagactctattcatgtaggagtacgctgcatcgagatgctcattgagtcaaccggaatggttagcttacaccgccaaaatgctggcgtagtaggtcaagactctgagactatcgaactcgcacctgaatacgctgaggctatcgcaacccgtgcaggtgcgctggctggcatctctccgatgttccaaccttgcgtagttcctcctaagccgtggactggcattactggtggtggctattgggctgcggggcgcaaacccctgcagttagtacgtactcgcagtctggcggcgcttcgccgctatgaagaagtgtcgatgccggaggtcatcaaagcagtcaacattgcgcagaatacagcatggcgtattaacaagaaagttctcgacgtagcgaataccatcacccaatggcagcactgtccagtcgcggatgtgcctgcgatggatcgtggcgaaatgccagctcgtccgttggacatcgataccaacgagattgcacttaaagcgtggaagaaagaagcttccgcgttctaccgcaaagacaaagcacgcgtgagccgtcgtctgctgatggagtttatgttatctcaggcgaacaagtttgcgaattatgaggcaatctggtttccgcaaaacatggattggcgtgggcgcgtgtacgctgtcccgatgttcaatcctcagggcaacgatatgacgaaaggcctgctgacctttgcgcaggagaaacccattggtgaagacggcttctattggctcaagattcatggcgcaaatacagctggagtggataaagtaccgtttccacaacgcatcaaatttgttgaggataaccatacgaatattatggaatgcgcgaaagcaccgctggaaaacacttggtgggcggaacaggactcgccgttctgctttctggcgttctgctttgagtatgctggcgtcatcaatagtggtctgtcgtacaactgtagcttgcctctggcatttgatggtagttgctccggcctgcaacatttctcagcgatgttacgcgacgaaattggcggcaaagctgtgaatctcctcccatctgcggaataccaggatatttatcgtatcgtcagcgacaaagttaacgagatgctgaaacaagatctgattaacggtacctctaccaccgtggaaacggtgactgataaaaagacaggcgaaattacccaacgcacgaaatacgggaccaaagttatggcacagtggtggttagaacacggtgtgaatcgtggcgtcacgaaacgctcggttatgactttggtgtatgggagcaaagagtttggattccgcgatcaagtgctgagtgacaccattcaacctgcgatcgataacggcaaaggtgacatgtttctgaatccgaatcaggctgctggttacatggcgaaactgatctggaacgcagtgtccgggaccgtagtcgcagcagttgaggcgatgaactggctgaaaagtgcggcgaaattacttgctgctgaagtgaaggatcctaagacggatacagttctgcgtggccgctgcgcagtacattgggtgactcccgacggcttccctgtgtggcaggaatacaagaagcctattcgtacgcgcttgaacctgatgttcctcggtcagttccgcttacagcctaccattaacaccaacaaagatagcgagattgatgcacgcaaacaggtgtctggtatcgctcctaactttgtacacagccaagacggtaaccaccttcgtatgactgtagtgtgggcacacgagaagtacggaatcgaatcttttgcactgattcacgactccttcggtaccattccggctgacgctgcgaacctgttcaaagcagtgcgcgaaactttcgttgacacatatgagtcttgtgatgtactggctgatttctacgaccagttcgctgaccagttgcacgagtctcaacgcgacaaaatgccagcacttccggctaaaggtaatttgaacctccgtgacatcttaaaatcggacttcgcgttcgcg

SEQ ID NO: 1044 - protein, 890 aa, synthetic construct
  REGION 1..890: note = Variant of RNA polymerase
MHHHHHHMNTINIAKNDFSDIELAAIPFNTLADHYGERLAREQLALEHESYEMGEARFRKMFERQLKAGEVADNAAAKPLITTLLPKMIARINDWFEEVKAKRGKRPTAFQFLQEIKPEAVAYITIKTTLACLTSADNTTVQAVASAIGRAIEDEARFGRIRDLEAKHFKKNVEEQLNKRVGHVYKKAFMQVVEHDMLSKGLLGGEAWSSWHKEDSIHVGVRCIEMLIESTGMVSLHRQNAGVVGQDSETIELAPEYAEAIATRAGALAGISPMFQPCVVPPKPWTGITGGGYWAAGRKPLQLVRTRSLAALRRYEEVSMPEVIKAVNIAQNTAWRINKKVLDVANTITQWQHCPVADVPAMDRGEMPARPLDIDTNEIALKAWKKEASAFYRKDKARVSRRLLMEFMLSQANKFANYEAIWFPQNMDWRGRVYAVPMFNPQGNDMTKGLLTFAQEKPIGEDGFYWLKIHGANTAGVDKVPFPQRIKFVEDNHTNIMECAKAPLENTWWAEQDSPFCFLAFCFEYAGVINSGLSYNCSLPLAFDGSCSGLQHFSAMLRDEIGGKAVNLLPSAEYQDIYRIVSDKVNEMLKQDLINGTSTTVETVTDKKTGEITQRTKYGTKVMAQWWLEHGVNRGVTKRSVMTLVYGSKEFGFRDQVLSDTIQPAIDNGKGDMFLNPNQAAGYMAKLIWNAVSGTVVAAVEAMNWLKSAAKLLAAEVKDPKTDTVLRGRCAVHWVTPDGFPVWQEYKKPIRTRLNLMFLGQFRLQPTINTNKDSEIDARKQVSGIAPNFVHSQDGNHLRMTVVWAHEKYGIESFALIHDSFGTIPADAANLFKAVRETFVDTYESCDVLADFYDQFADQLHESQRDKMPALPAKGNLNLRDILKSDFAFA

SEQ ID NO: 1045 - DNA, 2670 bp, synthetic construct
  misc_feature 1..2670: note = Variant of RNA polymerase
  source 1..2670: mol_type = other DNA
atgcaccatcaccatcaccatatgaacacgattaacattgctaagaacgacttctctgacatcgaactggctgctatcccgttcaacactctggctgaccattacggtgagcgtttagctcgcgaacagttggcccttgagcatgagtcttacgagatgggtgaagcacgcttccgcaagatgtttgagcgtcaacttaaagctggtgaggttgcggataacgctgccgccaagcctctcatcactaccctactccctaagatgattgcacgcatcaacgactggtttgaggaagtgaaagctaagcgcggcaagcgcccgacagccttccagttcctgcaagaaatcaagccggaagccgtagcgtacatcaccattaagaccactctggcttgcctaaccagtgcggacaatacaaccgttcaggctgtagcaagcgcaatcggtcgggccattgaggacgaggctcgcttcggtcgtatccgtgaccttgaagctaagcacttcaagaagaacgttgaggaacaactcaacaagcgcgtagggcacgtctacaagaaagcatttatgcaagttgtcgagcacgacatgctctctaagggtctactcggtggcgaggcgtggtcttcgtggcataaggaagactctattcatgtaggagtacgctgcatcgagatgctcattgagtcaaccggaatggttagcttacaccgccaaaatgctggcgtagtaggtcaagactctgagactatcgaactcgcacctgaatacgctgaggctatcgcaacccgtgcaggtgcgctggctggcatctctccgatgttccaaccttgcgtagttcctcctaagccgtggactggcattactggtggtggctattgggctgcggggcgcaaacccctgcagttagtacgtactcgcagtctggcggcgcttcgccgctatgaagaagtgtcgatgccggaggtcatcaaagcagtcaacattgcgcagaatacagcatggcgtattaacaagaaagttctcgacgtagcgaataccatcacccaatggcagcactgtccagtcgcggatgtgcctgcgatggatcgtggcgaaatgccagctcgtccgttggacatcgataccaacgagattgcacttaaagcgtggaagaaagaagcttccgcgttctaccgcaaagacaaagcacgcgtgagccgtcgtctgctgatggagtttatgttatctcaggcgaacaagtttgccaattatgaggcaatctggtttccgcaaaacatggattggcgtgggcgcgtgtacgctgtcccgatgttcaatcctcagggcaacgatatgacgaaaggcctgctgacctttgcgcaggagaaacccattggtgaagacggcttctattggctcaagattcatggcgcaaatacagctggagtggataaagtaccgtttccacaacgcatcaaatttgttgaggataaccatacgaatattatggaatgcgcgaaagcaccgctggaaaacacttggtgggcggaacaggactcgccgttccgctttctggcgttctgctttgagtatgctggcgtcatcaatagtggtctgtcgtacaactgtagcttgcctctggcatttgatggtagttgctccggcctgcaacatttctcagcgatgttacgcgacgaaattggcggcaaagctgtgaatctcctcccatctgcggaataccaggatatttatcgtatcgtcagcgacaaagttaacgagatgctgaaacaagatctgattaacggtacctctaccaccgtggaaacggtgactgataaaaagacaggcgaaattacccaacgcacgaaatacgggaccaaagttatggcacagtggtggttagaacacggtgtgaatcgtggcgtcacgaaacgcccggttatgactttggtgtatgggagcaaagagtttggattccgcgatcaagtgctgagtgacaccattcaaaaagcgatcgataacggcaagggtgacatgtttctgaatccgaatcaggctgctggttacatggcgaaactgatctggaacgcagtgtccgggaccgtagtcgcagcagttgaggcgatgaactggctgaaaagtgcggcgaaattacttgctgctgaagtgaaggatgagaagacggatacagttctgcgtggccgctgcgcagtacattgggtgactcccgacggcttccctgtgtggcaggaatacaagaagcctattcaaacgcgcttgaacctgatgttcctcggtcagttccgcttacagcctaccattaacaccaacaaagatagcgagattgatgcacacaaacaggagtctggtatcgctcctaactttgtacacagcctggacggtaaccaccttcgtatgactgtagtgtgggcacacgagaagtacggaatcgaatcttttgcactgattcacgactccttcggtaccattccggctgacgctgcgaacctgttcaaagcagtgcgcgaaactttcgttgacacatatgagtcttgtgatgtactggctgatttctacgaccagtttgctgaccagttgcacgagtctcaacgcgacaaaatgccagcacttccggctaaaggtaatttgaacctccgtgacatcttaaaatcggacttcgcgttcgcg

SEQ ID NO: 1046 - protein, 890 aa, synthetic construct
  REGION 1..890: note = Variant of RNA polymerase
MHHHHHHMNTINIAKNDFSDIELAAIPFNTLADHYGERLAREQLALEHESYEMGEARFRKMFERQLKAGEVADNAAAKPLITTLLPKMIARINDWFEEVKAKRGKRPTAFQFLQEIKPEAVAYITIKTTLACLTSADNTTVQAVASAIGRAIEDEARFGRIRDLEAKHFKKNVEEQLNKRVGHVYKKAFMQVVEHDMLSKGLLGGEAWSSWHKEDSIHVGVRCIEMLIESTGMVSLHRQNAGVVGQDSETIELAPEYAEAIATRAGALAGISPMFQPCVVPPKPWTGITGGGYWAAGRKPLQLVRTRSLAALRRYEEVSMPEVIKAVNIAQNTAWRINKKVLDVANTITQWQHCPVADVPAMDRGEMPARPLDIDTNEIALKAWKKEASAFYRKDKARVSRRLLMEFMLSQANKFANYEAIWFPQNMDWRGRVYAVPMFNPQGNDMTKGLLTFAQEKPIGEDGFYWLKIHGANTAGVDKVPFPQRIKFVEDNHTNIMECAKAPLENTWWAEQDSPFRFLAFCFEYAGVINSGLSYNCSLPLAFDGSCSGLQHFSAMLRDEIGGKAVNLLPSAEYQDIYRIVSDKVNEMLKQDLINGTSTTVETVTDKKTGEITQRTKYGTKVMAQWWLEHGVNRGVTKRPVMTLVYGSKEFGFRDQVLSDTIQKAIDNGKGDMFLNPNQAAGYMAKLIWNAVSGTVVAAVEAMNWLKSAAKLLAAEVKDEKTDTVLRGRCAVHWVTPDGFPVWQEYKKPIQTRLNLMFLGQFRLQPTINTNKDSEIDAHKQESGIAPNFVHSLDGNHLRMTVVWAHEKYGIESFALIHDSFGTIPADAANLFKAVRETFVDTYESCDVLADFYDQFADQLHESQRDKMPALPAKGNLNLRDILKSDFAFA

SEQ ID NO: 1047 - DNA, 2670 bp, synthetic construct
  misc_feature 1..2670: note = Variant of RNA polymerase
  source 1..2670: mol_type = other DNA
atgcaccatcaccatcaccatatgaacacgattaacattgctaagaacgacttctctgacatcgaactggctgctatcccgttcaacactctggctgaccattacggtgagcgtttagctcgcgaacagttggcccttgagcatgagtcttacgagatgggtgaagcacgcttccgcaagatgtttgagcgtcaacttaaagctggtgaggttgcggataacgctgccgccaagcctctcatcactaccctactccctaagatgattgcacgcatcaacgactggtttgaggaagtgaaagctaagcgcggcaagcgcccgacagccttccagttcctgcaagaaatcaagccggaagccgtagcgtacatcaccattaagaccactctggcttgcctaaccagtgcggacaatacaaccgttcaggctgtagcaagcgcaatcggtcgggccattgaggacgaggctcgcttcggtcgtatccgtgaccttgaagctaagcacttcaagaagaacgttgaggaacaactcaacaagcgcgtagggcacgtctacaagaaagcatttatgcaagttgtcgagcacgacatgctctctaagggtctactcggtggcgaggcgtggtcttcgtggcataaggaagactctattcatgtaggagtacgctgcatcgagatgctcattgagtcaaccggaatggttagcttacaccgccaaaatgctggcgtagtaggtcaagactctgagactatcgaactcgcacctgaatacgctgaggctatcgcaacccgtgcaggtgcgctggctggcatctctccgatgttccaaccttgcgtagttcctcctaagccgtggactggcattactggtggtggctattgggctgcggggcgcaaacccctgcagttagtacgtactcgcagtctggcggcgcttcgccgctatgaagaagtgtcgatgccggaggtcatcaaagcagtcaacattgcgcagaatacagcatggcgtattaacaagaaagttctcgacgtagcgaataccatcacccaatggcagcactgtccagtcgcggatgtgcctgcgatggatcgtggcgaaatgccagctcgtccgttggacatcgataccaacgagagtgcacttaaagcgtggaagaaagaagcttccgcgttctaccgcaaagacaaagcacgcgttagccgtcgtctgtcaatggagtttatgttatctcaggcgaacaagtttgcgaattatgaggcaatctggtttccgcaaaacatggattggcgtgggcgcgtgtacgctgtcccgatgttcaatcctcagggcaacgatatgacgaaaggcctgctgacctttgcgcaggagaaacccattggtgaagacggcttctattggctcaagattcatggcgcaaatacagctggagtggataaagtaccgtttccacaacgcatcaaatttgttgaggataaccatacgaatattatggaatgcgcgaaagcaccgctggaaaacacttggtgggcggaacaggactcgccgttctattttctggcgttctgctttgagtatgctggcgtcatcaatagtggtctgtcgtacaactgtagcttgcctctggcatttgatggtagttgctccggcctgcaacatttctcagcgatgttacgcgacgaaattggcggcaaagctgtgaatctcctcccatctgcggaataccaggatatttatcgtatcgtcagcgacaaagttaacgagatgctgaaacaagatctgattaacggtacctctaccaccgtggaaacggtgactgataagaagacaggcgaaattacccaacgcacgaaatacgggaccaaagttatggcacagtggtggttagaacacggtgtgaatcgtggcgtcacgaaacgcccggttatgactttggtgtatgggagcaaagagtttggattccgcgatcaagtgctgagtgacaccattcaaccggcgatcgataacggcaaaggtgacatgtttctgaatccgaatcaggctgctggttacatggcgaaactgatctggaacgcagtgtccgggaccgtagtcgcagcagttgaggcgatgaactggctgaaaagtgcggcgaaattacttgctgctgaagtgaaggatcctaagacggatacagttctgcgtggccgctgcgcagtacattgggtgactcccgacggcttccctgtgtggcaggaatacaagaagcctattcagacgcgcttgaacctgatgttcctcggtcagttccgcttacagcctaccattaacaccaacaaagatagcgagattgatgcacgcaaacaggtgtctggtatcgctcctaactttgtacacagcctggacggtaaccaccttcgtatgactgtagtgtgggcacacgagaagtacggaatcgaatcttttgcactgattcacgactccttcggtaccattccggctgacgctgcgaacctgttcaaagcagtgcgcgaaactttcgttgacacatatgagtcttgtgatgtactggctgatttctacgaccagattgctgaccagttgcacgagtctcaacgcgacaaaatgccagcacttccggctaaaggtaagttgaacctccgtgacatcttaaaatcggacttcgcgttcgcg

SEQ ID NO: 1048 - protein, 890 aa, synthetic construct
  REGION 1..890: note = Variant of RNA polymerase
MHHHHHHMNTINIAKNDFSDIELAAIPFNTLADHYGERLAREQLALEHESYEMGEARFRKMFERQLKAGEVADNAAAKPLITTLLPKMIARINDWFEEVKAKRGKRPTAFQFLQEIKPEAVAYITIKTTLACLTSADNTTVQAVASAIGRAIEDEARFGRIRDLEAKHFKKNVEEQLNKRVGHVYKKAFMQVVEHDMLSKGLLGGEAWSSWHKEDSIHVGVRCIEMLIESTGMVSLHRQNAGVVGQDSETIELAPEYAEAIATRAGALAGISPMFQPCVVPPKPWTGITGGGYWAAGRKPLQLVRTRSLAALRRYEEVSMPEVIKAVNIAQNTAWRINKKVLDVANTITQWQHCPVADVPAMDRGEMPARPLDIDTNESALKAWKKEASAFYRKDKARVSRRLSMEFMLSQANKFANYEAIWFPQNMDWRGRVYAVPMFNPQGNDMTKGLLTFAQEKPIGEDGFYWLKIHGANTAGVDKVPFPQRIKFVEDNHTNIMECAKAPLENTWWAEQDSPFYFLAFCFEYAGVINSGLSYNCSLPLAFDGSCSGLQHFSAMLRDEIGGKAVNLLPSAEYQDIYRIVSDKVNEMLKQDLINGTSTTVETVTDKKTGEITQRTKYGTKVMAQWWLEHGVNRGVTKRPVMTLVYGSKEFGFRDQVLSDTIQPAIDNGKGDMFLNPNQAAGYMAKLIWNAVSGTVVAAVEAMNWLKSAAKLLAAEVKDPKTDTVLRGRCAVHWVTPDGFPVWQEYKKPIQTRLNLMFLGQFRLQPTINTNKDSEIDARKQVSGIAPNFVHSLDGNHLRMTVVWAHEKYGIESFALIHDSFGTIPADAANLFKAVRETFVDTYESCDVLADFYDQIADQLHESQRDKMPALPAKGKLNLRDILKSDFAFA

SEQ ID NO: 1049 - DNA, 2670 bp, synthetic construct
  misc_feature 1..2670: note = Variant of RNA polymerase
  source 1..2670: mol_type = other DNA
atgcaccatcaccatcaccatatgaacacgattaacattgctaagaacgacttctctgacatcgaactggctgctatcccgttcaacactctggctgaccattacggtgagcgtttagctcgcgaacagttggcccttgagcatgagtcttacgagatgggtgaagcacgcttccgcaagatgtttgagcgtcaacttaaagctggtgaggttgcggataacgctgccgccaagcctctcatcactaccctactccctaagatgattgcacgcatcaacgactggtttgaggaagtgaaagctaagcgcggcaagcgcccgacagccttccagttcctgcaagaaatcaagccggaagccgtagcgtacatcaccattaagaccactctggcttgcctaaccagtgcggacaatacaaccgttcaggctgtagcaagcgcaatcggtcgggccattgaggacgaggctcgcttcggtcgtatccgtgaccttgaagctaagcacttcaagaagaacgttgaggaacaactcaacaagcgcgtagggcacgtctacaagaaagcatttatgcaagttgtcgagcacgacatgctctctaagggtctactcggtggcgaggcgtggtcttcgtggcataaggaagactctattcatgtaggagtacgctgcatcgagatgctcattgagtcaaccggaatggttagcttacaccgccaaaatgctggcgtagtaggtcaagactctgagactatcgaactcgcacctgaatacgctgaggctatcgcaacccgtgcaggtgcgctggctggcatctctccgatgttccaaccttgcgtagttcctcctaagccgtggactggcattactggtggtggctattgggctgcggggcgcaaacccctgcagttagtacgtactcgcagtctggcggcgcttcgccgctatgaagaagtgtcgatgccggaggtcatcaaagcagtcaacattgcgcagaatacagcatggcgtattaacaagaaagttctcgacgtagcgaataccatcacccaatggcagcactgtccagtcgcggatgtgcctgcgatggatcgtggcgaaatgccagctcgtccgttggacatcgataccaacgagattgcacttaaagcgtggaagaaagaagcttccgcgttctaccgcaaagacaaagcacgcatgagccgtcgtctgctgatggagtttatgttatctcaggcgaacaagtttgcgaattatgaggcaatctggtttccgcaaaacatggattggcgtgggcgcgtgtacgctgtcccgatgttcaatcctcagggcaacgatatgacgaaaggcctgctgacctttgcgcaggagaaacccattggtgaagacggcttctattggctcaagattcatggcgcaaatacagctggagtggataaagtaccgtttccacaacgcatcaaatttgttgaggataaccatacgaatattatggaatgcgcgaaagcaccgctggaaaacacttggtgggcggaacaggactcgccgttctgctttctggcgttctgctttgagtatgctggcgtcatcaatagtggtctgtcgtacaactgtagcttgcctctggcatttgatggtagttgctccggcctgcaacatttctcagcgatgttacgcgacgaaattggcggcaaagctgtgaatctcctcccatctgcggaataccaggatatttatcgtatcgtcagcgacaaagttaacgagatgctgaaacaagatctgattaacggtacctctaccaccgtggaaacggtgactgataagaagacaggcgaaattacccaacgcacgaaatacgggaccaaagttatggcacagtggtggttagaacacggtgtgaatcgtggcgtcacgaaacgctcggttatgactttggtgtatgggagcaaagagtttggattccgcgatcaagtgctgagtgacaccattcaaaaagcgatcgataacggcaacggtgacatgtttctgaatccgaatcaggctgctggttacatggcgaaactgatctggaacgcagtgtccgggaccgtagtcgcagcagttgaggcgatgaactggctgaaaagtgcggcgaaattacttgctgctgaagtgaaggatgagaagacggatacagttctgcgtggccgctgcgcagtacattgggtgactcccgacggcttccctgtgtggcaggaatacaagaagcctattcgtacgcgcttgaacctgatgttcctcggtcagttccgcttacagcctaccattaacaccaacaaagatagcgagattgatgcacgcaaacaggtgtctggtatcgctcctaactttgtacacagccaagacggtaaccaccttcgtatgactgtagtgtgggcacacgagaagtacggaatcgaatcttttgcactgattcacgactccttcggtaccattccggctgacgctgcgaacctgttcaaagcagtgcgcgaaactttcgttgacacatatgagtcttgtgatgtactggctgatttctacgaccagttcgctgaccagttgcacgagtctcaacgcgacaaaatgccagcacttccggctaaaggtaacttgaacctccgtgacatcttaaaatcggacttcgcgttcgcg

SEQ ID NO: 1050 - protein, 890 aa, synthetic construct
  REGION 1..890: note = Variant of RNA polymerase
MHHHHHHMNTINIAKNDFSDIELAAIPFNTLADHYGERLAREQLALEHESYEMGEARFRKMFERQLKAGEVADNAAAKPLITTLLPKMIARINDWFEEVKAKRGKRPTAFQFLQEIKPEAVAYITIKTTLACLTSADNTTVQAVASAIGRAIEDEARFGRIRDLEAKHFKKNVEEQLNKRVGHVYKKAFMQVVEHDMLSKGLLGGEAWSSWHKEDSIHVGVRCIEMLIESTGMVSLHRQNAGVVGQDSETIELAPEYAEAIATRAGALAGISPMFQPCVVPPKPWTGITGGGYWAAGRKPLQLVRTRSLAALRRYEEVSMPEVIKAVNIAQNTAWRINKKVLDVANTITQWQHCPVADVPAMDRGEMPARPLDIDTNEIALKAWKKEASAFYRKDKARMSRRLLMEFMLSQANKFANYEAIWFPQNMDWRGRVYAVPMFNPQGNDMTKGLLTFAQEKPIGEDGFYWLKIHGANTAGVDKVPFPQRIKFVEDNHTNIMECAKAPLENTWWAEQDSPFCFLAFCFEYAGVINSGLSYNCSLPLAFDGSCSGLQHFSAMLRDEIGGKAVNLLPSAEYQDIYRIVSDKVNEMLKQDLINGTSTTVETVTDKKTGEITQRTKYGTKVMAQWWLEHGVNRGVTKRSVMTLVYGSKEFGFRDQVLSDTIQKAIDNGNGDMFLNPNQAAGYMAKLIWNAVSGTVVAAVEAMNWLKSAAKLLAAEVKDEKTDTVLRGRCAVHWVTPDGFPVWQEYKKPIRTRLNLMFLGQFRLQPTINTNKDSEIDARKQVSGIAPNFVHSQDGNHLRMTVVWAHEKYGIESFALIHDSFGTIPADAANLFKAVRETFVDTYESCDVLADFYDQFADQLHESQRDKMPALPAKGNLNLRDILKSDFAFA

SEQ ID NO: 1051 - DNA, 2670 bp, synthetic construct
  misc_feature 1..2670: note = Variant of RNA polymerase
  source 1..2670: mol_type = other DNA
atgcaccatcaccatcaccatatgaacacgattaacattgctaagaacgacttctctgacatcgaactggctgctatcccgttcaacactctggctgaccattacggtgagcgtttagctcgcgaacagttggcccttgagcatgagtcttacgagatgggtgaagcacgcttccgcaagatgtttgagcgtcaacttaaagctggtgaggttgcggataacgctgccgccaagcctctcatcactaccctactccctaagatgattgcacgcatcaacgactggtttgaggaagtgaaagctaagcgcggcaagcgcccgacagccttccagttcctgcaagaaatcaagccggaagccgtagcgtacatcaccattaagaccactctggcttgcctaaccagtgcggacaatacaaccgttcaggctgtagcaagcgcaatcggtcgggccattgaggacgaggctcgcttcggtcgtatccgtgaccttgaagctaagcacttcaagaagaacgttgaggaacaactcaacaagcgcgtagggcacgtctacaagaaagcatttatgcaagttgtcgagcacgacatgctctctaagggtctactcggtggcgaggcgtggtcttcgtggcataaggaagactctattcatgtaggagtacgctgcatcgagatgctcattgagtcaaccggaatggttagcttacaccgccaaaatgctggcgtagtgggtcaggactctgagactatcgaactcgcacctgaatacgctgaggctatcgcaacccgtgcaggtgcgctggctggcatctctccgatgttccaaccttgcgtagttcctcctaagccgtggactggcattactggtggtggctattgggctgcggggcgcaaacccctgcagttagtacgtactcgcagtctggcggcgcttcgccgctatgaagaagtgtcgatgccggaggtcatcaaagcagtcaacattgcgcagaatacagcatggcgtattaacaagctggttctcgacgtagcgaataccatcacccaatggcagcactgtccagtcgcggatgtgcctgcgatggatcgtggcgaaatgccagctcgtccgttggacatcgataccaacgagattgcacttaaagcgtggaagaaagaagcttccgcgttctaccgcaaagacaaagcacgcgttagccgtcgtctgtcaatggagtttatgttatctcaggcgaacaagtttgcgaattatgaggcaatctggtttccgcaaaacatggattggcgtgggcgcgtgtacgctgtcccgatgttcaatcctcagggcaacgatatgacgaaaggcctgctgacctttgcgcaggagaaacccattggtgaagacggcttctattggctcaagattcatggcgcaaatacagctggagtggataaagtaccgtttccacaacgcatcaaatttgttgaggataaccatacgaatattatggaatgcgcgaaagcaccgctggaaaacacttggtgggcggaacaggactcgccgttctgttttctggcgttctgctttgagtatgctggcgtcatcaatagtggtctgtcgtacaactgtagcttgcctctggcatttgatggtagttgctccggcctgcaacatttctcagcgatgttacgcgacgaaattggcggcaaagctgtgaatctcctcccatctgcggaataccaggatatttatcgtatcgtcagcgacaaagttaacgagatgctgaaacaagatctgattaacggtacctctaccaccgtggaaacggtgactgataagaagacaggcgaaattacccaacgcacgaaatacgggaccaaagttatggcacagtggtggttagaacacggtgtgaatcgtggcgtcacgaaacgctcggttatgactttggtgtatgggagcaaagagtttggattccgcgatcaagtgctgagtgacaccattcaaccggcgatcgataacggcaaaggtgacatgtttctgaatccgaatcaggctgctggttacatggcgaaactgatctggaacgcagtgtccgggaccgtagtcgcagcagttgaggcgatgaactggctgaaaagtgcggcgaaattacttgctgctgaagtgaaggatcctaagacggatacagttctgcgtggccgctgcgcagtacattgggtgactcccgacggcttccctgtgtggcaggaatacaagaagcctattcagacgcgcttgaacctgatgttcctcggtcagttccgcttacagcctaccattaacaccaacaaagatagcgagattgatgcacacaaacaggagtctggtatcgctcctaactttgtacacagccaagacggtaaccaccttcgtatgactgtagtgtgggcacacgagaagtacggaatcgaatcttttgcactgattcacgactccttcggtaccattccggctgacgctgcgaacctgttcaaagcagtgcgcgaaactttcgttgacacatatgagtcttgtgatgtactggctgatttctacgaccagttcgctgaccagttgcacgagtctcaacgcgacaaaatgccagcacttccggctaaaggtaacttgaacctccgtgacatcttaaaatcggacttcgcgttcgcg

SEQ ID NO: 1052 - protein, 890 aa, synthetic construct
  REGION 1..890: note = Variant of RNA polymerase
MHHHHHHMNTINIAKNDFSDIELAAIPFNTLADHYGERLAREQLALEHESYEMGEARFRKMFERQLKAGEVADNAAAKPLITTLLPKMIARINDWFEEVKAKRGKRPTAFQFLQEIKPEAVAYITIKTTLACLTSADNTTVQAVASAIGRAIEDEARFGRIRDLEAKHFKKNVEEQLNKRVGHVYKKAFMQVVEHDMLSKGLLGGEAWSSWHKEDSIHVGVRCIEMLIESTGMVSLHRQNAGVVGQDSETIELAPEYAEAIATRAGALAGISPMFQPCVVPPKPWTGITGGGYWAAGRKPLQLVRTRSLAALRRYEEVSMPEVIKAVNIAQNTAWRINKLVLDVANTITQWQHCPVADVPAMDRGEMPARPLDIDTNEIALKAWKKEASAFYRKDKARVSRRLSMEFMLSQANKFANYEAIWFPQNMDWRGRVYAVPMFNPQGNDMTKGLLTFAQEKPIGEDGFYWLKIHGANTAGVDKVPFPQRIKFVEDNHTNIMECAKAPLENTWWAEQDSPFCFLAFCFEYAGVINSGLSYNCSLPLAFDGSCSGLQHFSAMLRDEIGGKAVNLLPSAEYQDIYRIVSDKVNEMLKQDLINGTSTTVETVTDKKTGEITQRTKYGTKVMAQWWLEHGVNRGVTKRSVMTLVYGSKEFGFRDQVLSDTIQPAIDNGKGDMFLNPNQAAGYMAKLIWNAVSGTVVAAVEAMNWLKSAAKLLAAEVKDPKTDTVLRGRCAVHWVTPDGFPVWQEYKKPIQTRLNLMFLGQFRLQPTINTNKDSEIDAHKQESGIAPNFVHSQDGNHLRMTVVWAHEKYGIESFALIHDSFGTIPADAANLFKAVRETFVDTYESCDVLADFYDQFADQLHESQRDKMPALPAKGNLNLRDILKSDFAFA

SEQ ID NO: 1053 - DNA, 2670 bp, synthetic construct
  misc_feature 1..2670: note = Variant of RNA polymerase
  source 1..2670: mol_type = other DNA
atgcaccatcaccatcaccatatgaacacgattaacattgctaagaacgacttctctgacatcgaactggctgctatcccgttcaacactctggctgaccattacggtgagcgtttagctcgcgaacagttggcccttgagcatgagtcttacgagatgggtgaagcacgcttccgcaagatgtttgagcgtcaacttaaagctggtgaggttgcggataacgctgccgccaagcctctcatcactaccctactccctaagatgattgcacgcatcaacgactggtttgaggaagtgaaagctaagcgcggcaagcgcccgacagccttccagttcctgcaagaaatcaagccggaagccgtagcgtacatcaccattaagaccactctggcttgcctaaccagtgcggacaatacaaccgttcaggctgtagcaagcgcaatcggtcgggccattgaggacgaggctcgcttcggtcgtatccgtgaccttgaagctaagcacttcaagaagaacgttgaggaacaactcaacaagcgcgtagggcacgtctacaagaaagcatttatgcaagttgtcgagcacgacatgctctctaagggtctactcggtggcgaggcgtggtcttcgtggcataaggaagactctattcatgtaggagtacgctgcatcgagatgctcattgagtcaaccggaatggttagcttacaccgccaaaatgctggcgtagtaggtcaagactctgagactatcgaactcgcacctgaatacgctgaggctatcgcaacccgtgcaggtgcgctggctggcatctctccgatgttccaaccttgcgtagttcctcctaagccgtggactggcattactggtggtggctattgggctgcggggcgcaaacccctgcagttagtacgtactcgcagtctggcggcgcttcgccgctatgaagaagtgtcgatgccggaggtcatcaaagcagtcaacattgcgcagaatacagcatggcgtattaacaagaaagttctcgacgtagcgaataccatcacccaatggcagcactgtccagtcgcggatgtgcctgcgatggatcgtggcgaaatgccagctcgtccgttggacatcgataccaacgagattgcacttaaagcgtggaagaaagaagcttccgcgttctaccgcaaagacaaagcacgcgttagccgtcgtctgtcaatggagtttatgttatctcaggcgaacaagtttgccaattatgaggcaatctggtttccgcaaaacatggattggcgtgggcgcgtgtacgctgtcccgatgttcaatcctcagggcaacgatatgacgaaaggcctgctgacctttgcgcaggagaaacccattggtgaagacggcttctattggctcaagattcatggcgcaaatacagctggagtggataaagtaccgtttccacaacgcatcaaatttgttgaggataaccatacgaatattatggaatgcgcgaaagcaccgctggaaaacacttggtgggcggaacaggactcgccgttctgttttctggcgttctgctttgagtatgctggcgtcatcaatagtggtctgtcgtacaactgtagcttgcctctggcatttgatggtagttgctccggcctgcaacatttctcagcgatgttacgcgacgaaattggcggcaaagctgtgaatctcctcccatctgcggaataccaggatatttatcgtatcgtcagcgacaaagttaacgagatgctgaaacaagatctgattaacggtacctctaccaccgtggaaacggtgactgataagaagacaggcgaaattacccaacgcacgaaatacgggaccaaagttatggcacagtggtggttagaacacggtgtgaatcgtggcgtcacgaaacgcccggttatgactttggtgtatgggagcaaagagtttggattccgcgatcaagtgctgagtgacaccattcaaccggcgatcgataacggcaagggtgacatgtttctgaatccgaatcaggctgctggttacatggcgaaactgatctggaacgcagtgtccgggaccgtagtcgcagcagttgaggcgatgaactggctgaaaagtgcggcgaaattacttgctgctgaagtgaaggatcctaagacggatacagttctgcgtggccgctgcgcagtacattgggtgactcccgacggcttccctgtgtggcaggaatacaagaagcctattcagacgcgcttgaacctgatgttcctcggtcagttccgcttacagcctaccattaacaccaacaaagatagcgagattgatgcacacaaacaggagtctggtatcgctcctaactttgtacacagcctggacggtaaccaccttcgtatgactgtagtgtgggcacacgagaagtacggaatcgaatcttttgcactgattcacgactccttcggtaccattccggctgacgctgcgaacctgttcaaagcagtgcgcgaaactttcgttgacacatatgagtcttgtgatgtactggctgatttctacgaccagttcgctgaccagttgcacgagtctcaacgcgacaaaatgccagcacttccggctaaaggtaacttgaacctccgtgacatcttaaaatcggacttcgcgttcgcg

SEQ ID NO: 1054 - protein, 890 aa, synthetic construct
  REGION 1..890: note = Variant of RNA polymerase
MHHHHHHMNTINIAKNDFSDIELAAIPFNTLADHYGERLAREQLALEHESYEMGEARFRKMFERQLKAGEVADNAAAKPLITTLLPKMIARINDWFEEVKAKRGKRPTAFQFLQEIKPEAVAYITIKTTLACLTSADNTTVQAVASAIGRAIEDEARFGRIRDLEAKHFKKNVEEQLNKRVGHVYKKAFMQVVEHDMLSKGLLGGEAWSSWHKEDSIHVGVRCIEMLIESTGMVSLHRQNAGVVGQDSETIELAPEYAEAIATRAGALAGISPMFQPCVVPPKPWTGITGGGYWAAGRKPLQLVRTRSLAALRRYEEVSMPEVIKAVNIAQNTAWRINKKVLDVANTITQWQHCPVADVPAMDRGEMPARPLDIDTNEIALKAWKKEASAFYRKDKARVSRRLSMEFMLSQANKFANYEAIWFPQNMDWRGRVYAVPMFNPQGNDMTKGLLTFAQEKPIGEDGFYWLKIHGANTAGVDKVPFPQRIKFVEDNHTNIMECAKAPLENTWWAEQDSPFCFLAFCFEYAGVINSGLSYNCSLPLAFDGSCSGLQHFSAMLRDEIGGKAVNLLPSAEYQDIYRIVSDKVNEMLKQDLINGTSTTVETVTDKKTGEITQRTKYGTKVMAQWWLEHGVNRGVTKRPVMTLVYGSKEFGFRDQVLSDTIQPAIDNGKGDMFLNPNQAAGYMAKLIWNAVSGTVVAAVEAMNWLKSAAKLLAAEVKDPKTDTVLRGRCAVHWVTPDGFPVWQEYKKPIQTRLNLMFLGQFRLQPTINTNKDSEIDAHKQESGIAPNFVHSLDGNHLRMTVVWAHEKYGIESFALIHDSFGTIPADAANLFKAVRETFVDTYESCDVLADFYDQFADQLHESQRDKMPALPAKGNLNLRDILKSDFAFA

SEQ ID NO: 1055 - DNA, 2670 bp, synthetic construct
  misc_feature 1..2670: note = Variant of RNA polymerase
  source 1..2670: mol_type = other DNA
atgcaccatcaccatcaccatatgaacacgattaacattgctaagaacgacttctctgacatcgaactggctgctatcccgttcaacactctggctgaccattacggtgagcgtttagctcgcgaacagttggcccttgagcatgagtcttacgagatgggtgaagcacgcttccgcaagatgtttgagcgtcaacttaaagctggtgaggttgcggataacgctgccgccaagcctctcatcactaccctactccctaagatgattgcacgcatcaacgactggtttgaggaagtgaaagctaagcgcggcaagcgcccgacagccttccagttcctgcaagaaatcaagccggaagccgtagcgtacatcaccattaagaccactctggcttgcctgaccagtgaggacaatacaaccgttcaggctgtagcaagcgcaatcggtcgggccattgaggacgaggctcgcttcggtcgtatccgtgaccttgaagctaagcacttcaagaagaacgttgaggaacaactcaacaagcgcgtagggcacgtctacaagaaagcatttatgcaagttgtcgagcacgacatgctctctaagggtctactcggtggcgaggcgtggtcttcgtggcataaggaagactctattcatgtaggagtacgctgcatcgagatgctcattgagtcaaccggaatggttagcttacaccgccaaaatgctggcgtagtaggtcaagactctgagactatcgaactcgcacctgaatacgctgaggctatcgcaacccgtgcaggtgcgctggctggcatctctccgatgttccaaccttgcgtagttcctcctaagccgtggactggcattactggtggtggctattgggctgcggggcgcaaacccctgcagttagtacgtactcgcagtctggcggcgcttcgccgctatgaagaagtgtcgatgccggaggtcatcaaagcagtcaacattgcgcagaatacagcatggcgtattaacaaggaagttctcgacgtagcgaataccatcacccaatggcagcactgtccagtcgcggatgtgcctgcgatggatcgcggcgaaatgccagctcgtccgttggacatcgataccaacgagagtgcacttaaagcgtggaagaaagaagcttccgcgttctaccgcaaagacaaagcacgcgttagccgtcgtctgtcaatggagtttatgttatctcaggcgaacaagtttgcgaattatgaggcaatctggtttccgcaaaacatggattggcgtgggcgcgtgtacgctgtcccgatgttcaatcctcagggcaacgatatgacgaaaggcctgctgacctttgcgcaggagaaacccattggtgaagacggcttctattggctcaagattcatggcgcaaatacagctggagtggataaagtaccgtttccacaacgcatcaaatttgttgaggataaccatacgaatattatggaatgcgcgaaagcaccgctggaaaacacttggtgggcggaacaggactcgccgttctgttttctggcgttctgctttgagtatgctggcgtcatcaatagtggtctgtcgtacaactgtagcttgcctctggcatttgatggtagttgctccggcctgcaacatttctcagcgatgttacgcgacgaaattggcggcaaagctgtgaatctcctcccatctgcggaataccaggatatttatcgtatcgtcagcgacaaagttaacgagatgctgaaacaagatctgattaacggtacctctaccaccgtggaaacggtgactgataagaagacaggcgaaattacccaacgcacgaaatacgggaccaaagttatggcacagtggtggttagaacacggtgtgaatcgtggcgtcacgaaacgctcggttatgactttggtgtatgggagcaaagagtttggattccgcgatcaagtgctgagtgacaccattcaaccggcgatcgataacggcaaaggtgacatgtttctgaatccgaatcaggctgctggttacatggcgaaactgatctggaacgcagtgtccgggaccgtagtcgcagcagttgaggcgatgaactggctgaaaagtgcggcgaaattacttgctgctgaagtgaaggatcctaagacggatacagttctgcgtggccgctgcgcagtacattgggtgactcccgacggcttccctgtgtggcaggaatacaagaagcctattcagacgcgcttgaacctgatgttcctcggtcagttccgcttacagcctaccattaacaccaacaaagatagcgagattgatgcacacaaacaggagtctggtatcgctcctaactttgtacacagccaagacggtaaccaccttcgtatgactgtagtgtgggcacacgagaagtacggaatcgaatcttttgcactgattcacgactccttcggtaccattccggctgacgctgcgaacctgttcaaagcagtgcgcgaaactttcgttgacacatatgagtcttgtgatgtactggctgatttctacgaccagttcgctgaccagttgcacgagtctcaacgcgacaaaatgccagcacttccggctaaaggtaacttgaacctccgtgacatcttaaaatcggacttcgcgttcgcg

SEQ ID NO: 1056 - protein, 890 aa, synthetic construct
  REGION 1..890: note = Variant of RNA polymerase
MHHHHHHMNTINIAKNDFSDIELAAIPFNTLADHYGERLAREQLALEHESYEMGEARFRKMFERQLKAGEVADNAAAKPLITTLLPKMIARINDWFEEVKAKRGKRPTAFQFLQEIKPEAVAYITIKTTLACLTSEDNTTVQAVASAIGRAIEDEARFGRIRDLEAKHFKKNVEEQLNKRVGHVYKKAFMQVVEHDMLSKGLLGGEAWSSWHKEDSIHVGVRCIEMLIESTGMVSLHRQNAGVVGQDSETIELAPEYAEAIATRAGALAGISPMFQPCVVPPKPWTGITGGGYWAAGRKPLQLVRTRSLAALRRYEEVSMPEVIKAVNIAQNTAWRINKEVLDVANTITQWQHCPVADVPAMDRGEMPARPLDIDTNESALKAWKKEASAFYRKDKARVSRRLSMEFMLSQANKFANYEAIWFPQNMDWRGRVYAVPMFNPQGNDMTKGLLTFAQEKPIGEDGFYWLKIHGANTAGVDKVPFPQRIKFVEDNHTNIMECAKAPLENTWWAEQDSPFCFLAFCFEYAGVINSGLSYNCSLPLAFDGSCSGLQHFSAMLRDEIGGKAVNLLPSAEYQDIYRIVSDKVNEMLKQDLINGTSTTVETVTDKKTGEITQRTKYGTKVMAQWWLEHGVNRGVTKRSVMTLVYGSKEFGFRDQVLSDTIQPAIDNGKGDMFLNPNQAAGYMAKLIWNAVSGTVVAAVEAMNWLKSAAKLLAAEVKDPKTDTVLRGRCAVHWVTPDGFPVWQEYKKPIQTRLNLMFLGQFRLQPTINTNKDSEIDAHKQESGIAPNFVHSQDGNHLRMTVVWAHEKYGIESFALIHDSFGTIPADAANLFKAVRETFVDTYESCDVLADFYDQFADQLHESQRDKMPALPAKGNLNLRDILKSDFAFA

SEQ ID NO: 1057 - DNA, 2670 bp, synthetic construct
  misc_feature 1..2670: note = Variant of RNA polymerase
  source 1..2670: mol_type = other DNA
atgcaccatcaccatcaccatatgaacacgattaacattgctaataacgacttctctgacatcgaactggctgctatcccgttcaacactctggctgaccattacggtgagcgtttagctcgcgaacagttggcccttgagcatgagtcttacgagatgggtgaagcacgcttccgcaagatgtttgagcgtcaacttaaagctggtgaggttgcggataacgctgccgccaagcctctcatcactaccctactccctaagatgattgcacgcatcaacgactggtttgaggaagtgaaagctaagcgcggcaagcgcccgacagccttccagttcctgcaagaaatcaagccggaagccgtagcgtacatcaccattaagaccactctggcttgcctaaccagtgcggacaatacaaccgttcaggctgtagcaagcgcaatcggtcgggccattgaggacgaggctcgcttcggtcgtatccgtgaccttgaagctaagcacttcaagaagaacgttgaggaacaactcaacaagcgcgtagggcacgtctacaagaaagcatttatgcaagttgtcgagcacgacatgctctctaagggtctactcggtggcgaggcgtggtcttcgtggcataaggaagactctattcatgtaggagtacgctgcatcgagatgctcattgagtcaaccggaatggttagcttacaccgccaaaatgctggcgtagtgggtgcagactctgagactatcgaactcgcacctgaatacgctgaggctatcgcaacccgtgcaggtgcgctggctggcatctctccgatgttccaaccttgcgtagttcctcctaagccgtggactggcattactggtggtggctattgggctgcggggcgcaaacccctgcagttagtacgtactcgcagtctggcggcgcttcgccgctatgaagaagtgtcgatgccggaggtcatcaaagcagtcaacattgcgcagaatacagcatggcgtattaacaagaaagttctcgacgtagcgaataccatcacccaatggcagcactgtccagtcgcggatgtgcctgcgatggatcgtggcgaaatgccagctcgtccgttggacatcgataccaacgagattgcacttaaagcgtggaagaaagaagcttccgcgttctaccgcaaagacaaagcacgcgttagccgtcgtctgtcaatggagtttatgttatctcaggcgaacaagtttgcgaattatgaggcaatctggtttccgcaaaacatggattggcgtgggcgcgtgtacgctgtcccgatgttcaatcctcagggcaacgatatgacgaaaggcctgctgacctttgcgcaggagaaacccattggtgaagacggcttctattggctcaagattcatggcgcaaatacagctggagtggataaagtaccgtttccacaacgcatcaaatttgttgaggataaccatacgaatattatggaatgcgcgaaagcaccgctggaaaacacttggtgggcggaacaggactcgccgttctgctttctggcgttctgctttgagtatgctggcgtcatcaatagtggtctgtcgtgcaactgtagcttgcctctggcatttgatggtagttgctccggcctgcaacatttctcagcgatgttacgcgacgaaattggcggcaaagctgtgaatctcctcccatctgcggaataccaggatatttatcgtatcgtcagcgacaaagttaacgagatgctgaaacaagatctgattaacggtacctctaccaccgtggaaacggtgactgattataagacaggcgaaattacccaacgcacgaaatacgggaccaaagttatggcacagtggtggttagaacacggtgtgaatcgtggcgtcacgaaacgctcggttatgactttggtgtatgggagcaaagagtttggattccgcgatcaagtgctgagtgacaccattcaaaaagcgatcgataacggcaaaggtgacatgtttctgaatccgaatcaggctgctggttacatggcgaaactgatctggaacgcagtgtccgggaccgtagtcgcagcagttgaggcgatgaactggctgaaaagtgcggcgaaattacttgctgctgaagtgaaggatcctaagacggatacagttctgcgtggccgctgcgcagtacattgggtgactcccgacggcttccctgtgtggcaggaatacaagaagcctattcagacgcgcttgaacctgatgttcctcggtcagttccgcttacagcctaccattaacaccaacaaagatagcgagattgatgcacacaaacaggagtctggtatcgctcctaactttgtacacagccaagacggtaaccaccttcgtatgactgtagtgtgggcacacgagaagtacggaatcgaatcttttgcactgattcacgactccttcggtaccattccggctgacgctgcgaacctgttcaaagcagtgcgcgaaactttcgttgacacatatgagtcttgtgatgtactggctgatttctacgaccagttcgctgaccagttgcacgagtctcaacgcgacaaaatgccagcacttccggctaaaggtaacttgaacctccgtgacatcttaaaatcggacttcgcgttcgcg

SEQ ID NO: 1058 - protein, 890 aa, synthetic construct
  REGION 1..890: note = Variant of RNA polymerase
MHHHHHHMNTINIANNDFSDIELAAIPFNTLADHYGERLAREQLALEHESYEMGEARFRKMFERQLKAGEVADNAAAKPLITTLLPKMIARINDWFEEVKAKRGKRPTAFQFLQEIKPEAVAYITIKTTLACLTSADNTTVQAVASAIGRAIEDEARFGRIRDLEAKHFKKNVEEQLNKRVGHVYKKAFMQVVEHDMLSKGLLGGEAWSSWHKEDSIHVGVRCIEMLIESTGMVSLHRQNAGVVGADSETIELAPEYAEAIATRAGALAGISPMFQPCVVPPKPWTGITGGGYWAAGRKPLQLVRTRSLAALRRYEEVSMPEVIKAVNIAQNTAWRINKKVLDVANTITQWQHCPVADVPAMDRGEMPARPLDIDTNEIALKAWKKEASAFYRKDKARVSRRLSMEFMLSQANKFANYEAIWFPQNMDWRGRVYAVPMFNPQGNDMTKGLLTFAQEKPIGEDGFYWLKIHGANTAGVDKVPFPQRIKFVEDNHTNIMECAKAPLENTWWAEQDSPFCFLAFCFEYAGVINSGLSCNCSLPLAFDGSCSGLQHFSAMLRDEIGGKAVNLLPSAEYQDIYRIVSDKVNEMLKQDLINGTSTTVETVTDYKTGEITQRTKYGTKVMAQWWLEHGVNRGVTKRSVMTLVYGSKEFGFRDQVLSDTIQKAIDNGKGDMFLNPNQAAGYMAKLIWNAVSGTVVAAVEAMNWLKSAAKLLAAEVKDPKTDTVLRGRCAVHWVTPDGFPVWQEYKKPIQTRLNLMFLGQFRLQPTINTNKDSEIDAHKQESGIAPNFVHSQDGNHLRMTVVWAHEKYGIESFALIHDSFGTIPADAANLFKAVRETFVDTYESCDVLADFYDQFADQLHESQRDKMPALPAKGNLNLRDILKSDFAFA

SEQ ID NO: 1059 - DNA, 2670 bp, synthetic construct
  misc_feature 1..2670: note = Variant of RNA polymerase
  source 1..2670: mol_type = other DNA
atgcaccatcaccatcaccatatgaacacgattaacattgctaagaacgacttctctgacatcgaactggctgctatcccgttcaacactctggctgaccattacggtgagcgtttagctcgcgaacagttggcccttgagcatgagtcttacgagatgggtgaagcacgcttccgcaagatgtttgagcgtcaacttaaagctggtgaggttgcggataacgctgccgccaagcctctcatcactaccctactccctaagatgattgcacgcatcaacgactggtttgaggaagtgaaagctaagcgcggcaagcgcccgacagccttccagttcctgcaagaaatcaagccggaagccgtagcgtacatcaccattaagaccactctggcttgcctaaccagtgcggacaatacaaccgttcaggctgtagcaagcgcaatcggtcgggccattgaggacgaggctcgcttcggtcgtatccgtgaccttgaagctaagcacttcaagaagaacgttgaggaacaactcaacaagcgcgtagggcacgtctacaagaaagcatttatgcaagttgtcgagcacgacatgctctctaagggtctactcggtggcgaggcgtggtcttcgtggcataaggaagactctattcatgtaggagtacgctgcatcgagatgctcattgagtcaaccggaatggttagcttacaccgccaaaatgctggcgtagtaggtcaagactctgagactatcgaactcgcacctgaatacgctgaggctatcgcaacccgtgcaggtgcgctggctggcatctctccgatgttccaaccttgcgtagttcctcctaagccgtggactggcattactggtggtggctattgggctgcggggcgcaaacccctgcagttagtacgtactcgcagtctggcggcgcttcgccgctatgaagaagtgtcgatgccggaggtcatcaaagcagtcaacattgcgcagaatacagcatggcgtattaacaagaaagttctcgacgtagcgaataccatcacccaatggcagcactgtccagtcgcggatgtgcctgcgatggatcgtggcgaaatgccagctcgtccgttggacatcgataccaacgagattgcacttaaagcgtggaagaaagaagcttccgcgttctaccgcaaagacaaagcacgcgttagccgtcgtctgtcaatggagtttatgttatctcaggcgaacaagtttgcgaattatgaggcaatctggtttccgcaaaacatggattggcgtgggcgcgtgtacgctgtcccgatgttcaatcctcagggcaacgatatgacgaaaggcctgctgacctttgcgcaggagaaacccattggtgaagacggcttctattggctcaagattcatggcgcaaatacagctggagtggataaagtaccgtttccacaacgcatcaaatttgttgaggataaccatacgaatattatggaatgcgcgaaagcaccgctggaaaacacttggtgggcggaacaggactcgccgttccgctttctggcgttctgctttgagtatgctggcgtcatcaatagtggtctgtcgtacaactgtagcttgcctctggcatttgatggtagttgctccggcctgcaacatttctcagcgatgttacgcgacgaaattggcggcaaagctgtgaatctcctcccatctgcggaataccaggatatttatcgtatcgtcagcgacaaagttaacgagatgctgaaacaagatctgattaacggtacctctaccaccgtggaaacggtgactgataaaaagacaggcgaaattacccaacgcacgaaatacgggaccaaagttatggcacagtggtggttagaacacggtgtgaatcgtggcgtcacgaaacgctcggttatgactttggtgtatgggagcaaagagtttggattccgcgatcaagtgctgagtgacaccattcaaaaagcgatcgataacggcaagggtgacatgtttctgaatccgaatcaggctgctggttacatggcgaaactgatctggaacgcagtgtccgggaccgtagtcgcagcagttgaggcgatgaactggctgaaaagtgcggcgaaattacttgctgctgaagtgaaggatgagaagacggatacagttctgcgtggccgctgcgcagtacattgggtgactcccgacggcttccctgtgtggcaggaatacaagaagcctattcaaacgcgcttgaacctgatgttcctcggtcagttccgcttacagcctaccattaacaccaacaaagatagcgagattgatgcacacaaacaggagtctggtatcgctcctaactttgtacacagccaagacggtaaccaccttcgtatgactgtagtgtgggcacacgagaagtacggaatcgaatcttttgcactgattcacgactccttcggtaccattccggctgacgctgcgaacctgttcaaagcagtgcgcgaaactttcgttgacacatatgagtcttgtgatgtactggctgatttctacgaccagtttgctgaccagttgcacgagtctcaacgcgacaaaatgccagcacttccggctaaaggtaacttgaacctccgtgacatcttaaaatcggacttcgcgttcgcg

SEQ ID NO: 1060 - protein, 890 aa, synthetic construct
  REGION 1..890: note = Variant of RNA polymerase
MHHHHHHMNTINIAKNDFSDIELAAIPFNTLADHYGERLAREQLALEHESYEMGEARFRKMFERQLKAGEVADNAAAKPLITTLLPKMIARINDWFEEVKAKRGKRPTAFQFLQEIKPEAVAYITIKTTLACLTSADNTTVQAVASAIGRAIEDEARFGRIRDLEAKHFKKNVEEQLNKRVGHVYKKAFMQVVEHDMLSKGLLGGEAWSSWHKEDSIHVGVRCIEMLIESTGMVSLHRQNAGVVGQDSETIELAPEYAEAIATRAGALAGISPMFQPCVVPPKPWTGITGGGYWAAGRKPLQLVRTRSLAALRRYEEVSMPEVIKAVNIAQNTAWRINKKVLDVANTITQWQHCPVADVPAMDRGEMPARPLDIDTNEIALKAWKKEASAFYRKDKARVSRRLSMEFMLSQANKFANYEAIWFPQNMDWRGRVYAVPMFNPQGNDMTKGLLTFAQEKPIGEDGFYWLKIHGANTAGVDKVPFPQRIKFVEDNHTNIMECAKAPLENTWWAEQDSPFRFLAFCFEYAGVINSGLSYNCSLPLAFDGSCSGLQHFSAMLRDEIGGKAVNLLPSAEYQDIYRIVSDKVNEMLKQDLINGTSTTVETVTDKKTGEITQRTKYGTKVMAQWWLEHGVNRGVTKRSVMTLVYGSKEFGFRDQVLSDTIQKAIDNGKGDMFLNPNQAAGYMAKLIWNAVSGTVVAAVEAMNWLKSAAKLLAAEVKDEKTDTVLRGRCAVHWVTPDGFPVWQEYKKPIQTRLNLMFLGQFRLQPTINTNKDSEIDAHKQESGIAPNFVHSQDGNHLRMTVVWAHEKYGIESFALIHDSFGTIPADAANLFKAVRETFVDTYESCDVLADFYDQFADQLHESQRDKMPALPAKGNLNLRDILKSDFAFA

SEQ ID NO: 1061 - DNA, 2670 bp, synthetic construct
  misc_feature 1..2670: note = Variant of RNA polymerase
  source 1..2670: mol_type = other DNA
atgcaccatcaccatcaccatatgaacacgattaacattgctaagaacgacttctctgacatcgaactggctgctatcccgttcaacactctggctgaccattacggtgagcgtttagctcgcgaacagttggcccttgagcatgagtcttacgagatgggtgaagcacgcttccgcaagatgtttgagcgtcaacttaaagctggtgaggttgcggataacgctgccgccaagcctctcatcactaccctactccctaagatgattgcacgcatcaacgactggtttgaggaagtgaaagctaagcgcggcaagcgcccgacagccttccagttcctgcaagaaatcaagccggaagccgtagcgtacatcaccattaagaccactctggcttgcctaaccagtgcggacaatacaaccgttcaggctgtagcaagcgcaatcggtcgggccattgaggacgaggctcgcttcggtcgtatccgtgaccttgaagctaagcacttcaagaagaacgttgaggaacaactcaacaagcgcgtagggcacgtctacaagaaagcatttatgcaagttgtcgagcacgacatgctctctaagggtctactcggtggcgaggcgtggtcttcgtggcataaggaagactctattcatgtaggagtacgctgcatcgagatgctcattgagtcaaccggaatggttagcttacaccgccaaaatgctggcgtagtaggtcaagactctgagactatcgaactcgcacctgaatacgctgaggctatcgcaacccgtgcaggtgcgctggctggcatctctccgatgttccaaccttgcgtagttcctcctaagccgtggactggcattactggtggtggctattgggctgcggggcgcaaacccctgcagttagtacgtactcgcagtctggcggcgcttcgccgctatgaagaagtgtcgatgccggaggtcatcaaagcagtcaacattgcgcagaatacagcatggcgtattaacaagaaagttctcgacgtagcgaataccatcacccaatggcagcactgtccagtcgcggatgtgcctgcgatggatcgtggcgaaatgccagctcgtccgttggacatcgataccaacgagattgcacttaaagcgtggaagaaagaagcttccgcgttctaccgcaaagacaaagcacgcgttagccgtcgtctgtcaatggagtttatgttatctcaggcgaacaagtttgcgaattatgaggcaatctggtttccgcaaaacatggattggcgtgggcgcgtgtacgctgtcccgatgttcaatcctcagggcaacgatatgacgaaaggcctgctgacctttgcgcaggagaaacccattggtgaagacggcttctattggctcaagattcatggcgcaaatacagctggagtggataaagtaccgtttccacaacgcatcaaatttgttgaggataaccatacgaatattatggaatgcgcgaaagcaccgctggaaaacacttggtgggcggaacaggactcgccgttccgctttctggcgttctgctttgagtatgctggcgtcatcaatagtggtctgtcgtacaactgtagcttgcctctggcatttgatggtagttgctccggcctgcaacatttctcagcgatgttacgcgacgaaattggcggcaaagctgtgaatctcctcccatctgcggaataccaggatatttatcgtatcgtcagcgacaaagttaacgagatgctgaaacaagatctgattaacggtacctctaccaccgtggaaacggtgactgattataagacaggcgaaattacccaacgcacgaaatacgggaccaaagttatggcacagtggtggttagaacacggtgtgaatcgtggcgtcacgaaacgctcggttatgactttggtgtatgggagcaaagagtttggattccgcgatcaagtgctgagtgacaccattcaaccggcgatcgataacggcaaaggtgacatgtttctgaatccgaatcaggctgctggttacatggcgaaactgatctggaacgcagtgtccgggaccgtagtcgcagcagttgaggcgatgaactggctgaaaagtgcggcgaaattacttgctgctgaagtgaaggatcctaagacggatacagttctgcgtggccgctgcgcagtacattgggtgactcccgacggcttccctgtgtggcaggaatacaagaagcctattcagacgcgcttgaacctgatgttcctcggtcagttccgcttacagcctaccattaacaccaacaaagatagcgagattgatgcacacaaacaggagtctggtatcgctcctaactttgtacacagccaggacggtaaccaccttcgtatgactgtagtgtgggcacacgagaagtacggaatcgaatcttttgcactgattcacgactccttcggtaccattccggctgacgctgcgaacctgttcaaagcagtgcgcgaaactttcgttgacacatatgagtcttgtgatgtactggctgatttctacgaccagattgctgaccagttgcacgagtctcaacgcgacaaaatgccagcacttccggctaaaggtaatttgaacctccgtgacatcttaaaatcggacttcgcgttcgcg

SEQ ID NO: 1062 - protein, 890 aa, synthetic construct
  REGION 1..890: note = Variant of RNA polymerase
MHHHHHHMNTINIAKNDFSDIELAAIPFNTLADHYGERLAREQLALEHESYEMGEARFRKMFERQLKAGEVADNAAAKPLITTLLPKMIARINDWFEEVKAKRGKRPTAFQFLQEIKPEAVAYITIKTTLACLTSADNTTVQAVASAIGRAIEDEARFGRIRDLEAKHFKKNVEEQLNKRVGHVYKKAFMQVVEHDMLSKGLLGGEAWSSWHKEDSIHVGVRCIEMLIESTGMVSLHRQNAGVVGQDSETIELAPEYAEAIATRAGALAGISPMFQPCVVPPKPWTGITGGGYWAAGRKPLQLVRTRSLAALRRYEEVSMPEVIKAVNIAQNTAWRINKKVLDVANTITQWQHCPVADVPAMDRGEMPARPLDIDTNEIALKAWKKEASAFYRKDKARVSRRLSMEFMLSQANKFANYEAIWFPQNMDWRGRVYAVPMFNPQGNDMTKGLLTFAQEKPIGEDGFYWLKIHGANTAGVDKVPFPQRIKFVEDNHTNIMECAKAPLENTWWAEQDSPFRFLAFCFEYAGVINSGLSYNCSLPLAFDGSCSGLQHFSAMLRDEIGGKAVNLLPSAEYQDIYRIVSDKVNEMLKQDLINGTSTTVETVTDYKTGEITQRTKYGTKVMAQWWLEHGVNRGVTKRSVMTLVYGSKEFGFRDQVLSDTIQPAIDNGKGDMFLNPNQAAGYMAKLIWNAVSGTVVAAVEAMNWLKSAAKLLAAEVKDPKTDTVLRGRCAVHWVTPDGFPVWQEYKKPIQTRLNLMFLGQFRLQPTINTNKDSEIDAHKQESGIAPNFVHSQDGNHLRMTVVWAHEKYGIESFALIHDSFGTIPADAANLFKAVRETFVDTYESCDVLADFYDQIADQLHESQRDKMPALPAKGNLNLRDILKSDFAFA

SEQ ID NO: 1063 - DNA, 2670 bp, synthetic construct
  misc_feature 1..2670: note = Variant of RNA polymerase
  source 1..2670: mol_type = other DNA
atgcaccatcaccatcaccatatgaacacgattaacattgctaagaacgacttctctgacatcgaactggctgctatcccgttcaacactctggctgaccattacggtgagcgtttagctcgcgaacagttggcccttgagcatgagtcttacgagatgggtgaagcacgcttccgcaagatgtttgagcgtcaacttaaagctggtgaggttgcggataacgctgccgccaagcctctcatcactaccctactccctaagatgattgcacgcatcaacgactggtttgaggaagtgaaagctaagcgcggcaagcgcccgacagccttccagttcctgcaagaaatcaagccggaagccgtagcgtacatcaccattaagaccactctggcttgcctaaccagtgcggacaatacaaccgttcaggctgtagcaagcgcaatcggtcgggccattgaggacgaggctcgcttcggtcgtatccgtgaccttgaagctaagcacttcaagaagaacgttgaggaacaactcaacaagcgcgtagggcacgtctacaagaaagcatttatgcaagttgtcgagcacgacatgctctctaagggtctactcggtggcgaggcgtggtcttcgtggcataaggaagactctattcatgtaggagtacgctgcatcgagatgctcattgagtcaaccggaatggttagcttacaccgccaaaatgctggcgtagtaggtcaagactctgagactatcgaactcgcacctgaatacgctgaggctatcgcaacccgtgcaggtgcgctggctggcatctctccgatgttccaaccttgcgtagttcctcctaagccgtggactggcattactggtggtggctattgggctgcggggcgcaaacccctgcagttagtacgtactcgcagtctggcggcgcttcgccgctatgaagaagtgtcgatgccggaggtcatcaaagcagtcaacattgcgcagaatacagcatggcgtattaacaagaaagttctcgacgtagcgaataccatcacccaatggcagcactgtccagtcgcggatgtgcctgcgatggatcgtggcgaaatgccagctcgtccgttggacatcgataccaacgagattgcacttaaagcgtggaagaaagaagcttccgcgttctaccgcaaagacaaagcacgcgttagccgtcgtctgtcaatggagtttatgttatctcaggcgaacaagtttgcgaattatgaggcaatctggtttccgcaaaacatggattggcgtgggcgcgtgtacgctgtcccgatgttcaatcctcagggcaacgatatgacgaaaggcctgctgacctttgcgcaggagaaacccattggtgaagacggcttctattggctcaagattcatggcgcaaatacagctggagtggataaagtaccgtttccacaacgcatcaaatttgttgaggataaccatacgaatattatggaatgcgcgaaagcaccgctggaaaacacttggtgggcggaacaggactcgccgttccgctttctggcgttctgctttgagtatgctggcgtcatcaatagtggtctgtcgtacaactgtagcttgcctctggcatttgatggtagttgctccggcctgcaacatttctcagcgatgttacgcgacgaaattggcggcaaagctgtgaatctcctcccatctgcggaataccaggatatttatcgtatcgtcagcgacaaagttaacgagatgctgaaacaagatctgattaacggtacctctaccaccgtggaaacggtgactgataagaagacaggcgaaattacccaacgcacgaaatacgggaccaaagttatggcacagtggtggttagaacacggtgtgaatcgtggcgtcacgaaacgctcggttatgactttggtgtatgggagcaaagagtttggattccgcgatcaagtgctgagtgacaccattcaacgtgcgatcgataacggcaaaggtgacatgtttctgaatccgaatcaggctgctggttacatggcgaaactgatctggaacgcagtgtccgggaccgtagtcgcagcagttgaggcgatgaactggctgaaaagtgcggcgaaattacttgctgctgaagtgaaggatcagaagacggatacagttctgcgtggccgctgcgcagtacattgggtgactcccgacggcttccctgtgtggcaggaatacaagaagcctattcagacgcgcttgaacctgatgttcctcggtcagttccgcttacagcctaccattaacaccaacaaagatagcgagattgatgcacgcaaacaggagtctggtatcgctcctaactttgtacacagccaagacggtaaccaccttcgtatgactgtagtgtgggcacacgagaagtacggaatcgaatcttttgcactgattcacgactccttcggtaccattccggctgacgctgcgaacctgttcaaagcagtgcgcgaaactttcgttgacacatatgagtcttgtgatgtactggctgatttctacgaccagttcgctgaccagttgcacgagtctcaacgcgacaaaatgccagcacttccggctaaaggtaacttgaacctccgtgacatcttaaaatcggacttcgcgttcgcg

SEQ ID NO: 1064 - protein, 890 aa, synthetic construct
  REGION 1..890: note = Variant of RNA polymerase
MHHHHHHMNTINIAKNDFSDIELAAIPFNTLADHYGERLAREQLALEHESYEMGEARFRKMFERQLKAGEVADNAAAKPLITTLLPKMIARINDWFEEVKAKRGKRPTAFQFLQEIKPEAVAYITIKTTLACLTSADNTTVQAVASAIGRAIEDEARFGRIRDLEAKHFKKNVEEQLNKRVGHVYKKAFMQVVEHDMLSKGLLGGEAWSSWHKEDSIHVGVRCIEMLIESTGMVSLHRQNAGVVGQDSETIELAPEYAEAIATRAGALAGISPMFQPCVVPPKPWTGITGGGYWAAGRKPLQLVRTRSLAALRRYEEVSMPEVIKAVNIAQNTAWRINKKVLDVANTITQWQHCPVADVPAMDRGEMPARPLDIDTNEIALKAWKKEASAFYRKDKARVSRRLSMEFMLSQANKFANYEAIWFPQNMDWRGRVYAVPMFNPQGNDMTKGLLTFAQEKPIGEDGFYWLKIHGANTAGVDKVPFPQRIKFVEDNHTNIMECAKAPLENTWWAEQDSPFRFLAFCFEYAGVINSGLSYNCSLPLAFDGSCSGLQHFSAMLRDEIGGKAVNLLPSAEYQDIYRIVSDKVNEMLKQDLINGTSTTVETVTDKKTGEITQRTKYGTKVMAQWWLEHGVNRGVTKRSVMTLVYGSKEFGFRDQVLSDTIQRAIDNGKGDMFLNPNQAAGYMAKLIWNAVSGTVVAAVEAMNWLKSAAKLLAAEVKDQKTDTVLRGRCAVHWVTPDGFPVWQEYKKPIQTRLNLMFLGQFRLQPTINTNKDSEIDARKQESGIAPNFVHSQDGNHLRMTVVWAHEKYGIESFALIHDSFGTIPADAANLFKAVRETFVDTYESCDVLADFYDQFADQLHESQRDKMPALPAKGNLNLRDILKSDFAFA

SEQ ID NO: 1065 - DNA, 2670 bp, synthetic construct
  misc_feature 1..2670: note = Variant of RNA polymerase
  source 1..2670: mol_type = other DNA
atgcaccatcaccatcaccatatgaacacgattaacattgctaagaacgacttctctgacatcgaactggctgctatcccgttcaacactctggctgaccattacggtgagcgtttagctcgcgaacagttggcccttgagcatgagtcttacgagatgggtgaagcacgcttccgcaagatgtttgagcgtcaacttaaagctggtgaggttgcggataacgctgccgccaagcctctcatcactaccctactccctaagatgattgcacgcatcaacgactggtttgaggaagtgaaagctaagcgcggcaagcgcccgacagccttccagttcctgcaagaaatcaagccggaagccgtagcgtacatcaccattaagaccactctggcttgcctgacccgtgcggacaatacaaccgttcaggctgtagcaagcgcaatcggtcgggccattgaggacgaggctcgcttcggtcgtatccgtgaccttgaagctaagcacttcaagaagaacgttgaggaacaactcaacaagcgcgtagggcacgtctacaagaaagcatttatgcaagttgtcgagcacgacatgctctctaagggtctactcggtggcgaggcgtggtcttcgtggcataaggaagactctattcatgtaggagtacgctgcatcgagatgctcattgagtcaaccggaatggttagcttacaccgccaaaatgctggcgtagtaggtcaggactctgagactatcgaactcgcacctgaatacgctgaggctatcgcaacccgtgcaggtgcgctggctggcatctctccgatgttccaaccttgcgtagttcctcctaagccgtggactggcattactggtggtggctattgggctgcggggcgcaaacccctgcagttagtacgtactcgcagtctggcggcgcttcgccgctatgaagaagtgtcgatgccggaggtcatcaaagcagtcaacattgcgcagaatacagcatggcgtattaacaagaaagttctcgacgtagcgaataccatcacccaatggcagcactgtccagtcgcggatgtgcctgcgatggatcgtggcgaaatgccagctcgtccgttggacatcgataccaacgagattgcacttaaagcgtggaagaaagaagcttccgcgttctaccgcaaagacaaagcacgcgttagccgtcgtctgtcgatggagtttatgttatctcaggcgaacaagtttgtcaattatgaggcaatctggtttccgcaaaacatggattggcgtgggcgcgtgtacgctgtcccgatgttcaatcctcagggcaacgatatgacgaaaggcctgctgacctttgcgcaggagaaacccattggtgaagacggcttctattggctcaagattcatggcgcaaatacagctggagtggataaagtaccgtttccacaacgcatcaaatttgttgaggataaccatacgaatattatggaatgcgcgaaagcaccgctggaaaacacttggtgggcggaacaggactcgccgttctgttttctggcgttctgctttgagtatgctggcgtcatcaatagtggtctgtcgtacaactgtagcttgcctctggcatttgatggtagttgctccggcctgcaacatttctcagcgatgttacgcgacgaaattggcggcaaagctgtgaatctcctcccatctgcggaataccaggatatttatcgtatcgtcagcgacaaagttaacgagatgctgaaacaagatctgattaacggtacctctaccaccgtggaaacggtgactgataagaagacaggcgaaattacccaacgcacgaaatacgggaccaaagttatggcacagtggtggttagaacacggtgtgaatcgtggcgtcacgaaacgctcggttatgactttggtgtatgggagcaaagagtttggattccgcgatcaagtgctgagtgacaccattcaaccggcgatcgataacggcaaaggtgacatgtttctgaatccgaatcaggctgctggttacatggcgaaactgatctggaacgcagtgtccgggaccgtagtcgcagcagttgaggcgatgaactggctgaaaagtgcggcgaaattacttgctgctgaagtgaaggatcctaagacggatacagttctgcgtggccgctgcgcagtacattgggtgactcccgacggcttccctgtgtggcaggaatacaagaagcctattcagacgcgcttgaacctgatgttcctcggtcagttccgcttacagcctaccattaacaccaacaaagatagcgagattgatgcacacaaacaggagtctggtatcgctcctaactttgtacacagccaagacggtaaccaccttcgtatgactgtagtgtgggcacacgagaagtacggaatcgaatcttttgcactgattcacgactccttcggtaccattccggctgacgctgcgaacctgttcaaagcagtgcgcgaaactttcgttgacacatatgagtcttgtgatgtactggctgatttctacgaccagttcgctgaccagttgcacgagtctcaacgcgacaaaatgccagcacttccggctaaaggtaacttgaacctccgtgacatcttaaaatcggacttcgcgttcgcg

SEQ ID NO: 1066 - protein, 890 aa, synthetic construct
  REGION 1..890: note = Variant of RNA polymerase
MHHHHHHMNTINIAKNDFSDIELAAIPFNTLADHYGERLAREQLALEHESYEMGEARFRKMFERQLKAGEVADNAAAKPLITTLLPKMIARINDWFEEVKAKRGKRPTAFQFLQEIKPEAVAYITIKTTLACLTRADNTTVQAVASAIGRAIEDEARFGRIRDLEAKHFKKNVEEQLNKRVGHVYKKAFMQVVEHDMLSKGLLGGEAWSSWHKEDSIHVGVRCIEMLIESTGMVSLHRQNAGVVGQDSETIELAPEYAEAIATRAGALAGISPMFQPCVVPPKPWTGITGGGYWAAGRKPLQLVRTRSLAALRRYEEVSMPEVIKAVNIAQNTAWRINKKVLDVANTITQWQHCPVADVPAMDRGEMPARPLDIDTNEIALKAWKKEASAFYRKDKARVSRRLSMEFMLSQANKFVNYEAIWFPQNMDWRGRVYAVPMFNPQGNDMTKGLLTFAQEKPIGEDGFYWLKIHGANTAGVDKVPFPQRIKFVEDNHTNIMECAKAPLENTWWAEQDSPFCFLAFCFEYAGVINSGLSYNCSLPLAFDGSCSGLQHFSAMLRDEIGGKAVNLLPSAEYQDIYRIVSDKVNEMLKQDLINGTSTTVETVTDKKTGEITQRTKYGTKVMAQWWLEHGVNRGVTKRSVMTLVYGSKEFGFRDQVLSDTIQPAIDNGKGDMFLNPNQAAGYMAKLIWNAVSGTVVAAVEAMNWLKSAAKLLAAEVKDPKTDTVLRGRCAVHWVTPDGFPVWQEYKKPIQTRLNLMFLGQFRLQPTINTNKDSEIDAHKQESGIAPNFVHSQDGNHLRMTVVWAHEKYGIESFALIHDSFGTIPADAANLFKAVRETFVDTYESCDVLADFYDQFADQLHESQRDKMPALPAKGNLNLRDILKSDFAFA

SEQ ID NO: 1067 - DNA, 2670 bp, synthetic construct
  misc_feature 1..2670: note = Variant of RNA polymerase
  source 1..2670: mol_type = other DNA
atgcaccatcaccatcaccatatgaacacgattaacattgctaagaacgacttctctgacatcgaactggctgctatcccgttcaacactctggctgaccattacggtgagcgtttagctcgcgaacagttggcccttgagcatgagtcttacgagatgggtgaagcacgcttccgcaagatgtttgagcgtcaacttaaagctggtgaggttgcggataacgctgccgccaagcctctcatcactaccctactccctaagatgattgcacgcatcaacgactggtttgaggaagtgaaagctaagcgcggcaagcgcccgacagccttccagttcctgcaagaaatcaagccggaagccgtagcgtacatcaccattaagaccactctggcttgcctaaccagtgcggacaatacaaccgttcaggctgtagcaagcgcaatcggtcgggccattgaggacgaggctcgcttcggtcgtatccgtgaccttgaagctaagcacttcaagaagaacgttgaggaacaactcaacaagcgcgtagggcacgtctacaagaaagcatttatgcaagttgtcgagcacgacatgctctctaagggtctactcggtggcgaggcgtggtcttcgtggcataaggaagactctattcatgtaggagtacgctgcatcgagatgctcattgagtcaaccggaatggttagcttacaccgccaaaatgctggcgtagtaggtcaagactctgagactatcgaactcgcacctgaatacgctgaggctatcgcaacccgtgcaggtgcgctggctggcatctctccgatgttccaaccttgcgtagttcctcctaagccgtggactggcattactggtggtggctattgggctgcggggcgcaaacccctgcagttagtacgtactcgcagtctggcggcgcttcgccgctatgaagaagtgtcgatgccggaggtcatcaaagcagtcaacattgcgcagaatacagcatggcgtattaacaagaaagttctcgacgtagcgaataccatcacccaatggcagcactgtccagtcgcggatgtgcctgcgatggatcgtggcgaaatgccagctcgtccgttggacatcgataccaacgagattgcacttaaagcgtggaagaaagaagcttccgcgttctaccgcaaagacaaagcacgcgttagccgtcgtctgtcaatggagtttatgttatctcaggcgaacaagtttgccaattatgaggcaatctggtttccgcaaaacatggattggcgtgggcgcgtgtacgctgtcccgatgttcaatcctcagggcaacgatatgacgaaaggcctgctgacctttgcgcaggagaaacccattggtgaagacggcttctattggctcaagattcatggcgcaaatacagctggagtggataaagtaccgtttccacaacgcatcaaatttgttgaggataaccatacgaatattatggaatgcgcgaaagcaccgctggaaaacacttggtgggcggaacaggactcgccgttccgctttctggcgttctgctttgagtatgctggcgtcatcaatagtggtctgtcgtacaactgtagcttgcctctggcatttgatggtagttgctccggcctgcaacatttctcagcgatgttacgcgacgaaattggcggcaaagctgtgaatctcctcccatctgcggaataccaggatatttatcgtatcgtcagcgacaaagttaacgagatgctgaaacaagatctgattaacggtacctctaccaccgtggaaacggtgactgataaaaagacaggcgaaattacccaacgcacgaaatacgggaccaaagttatggcacagtggtggttagaacacggtgtgaatcgtggcgtcacgaaacgctcggttatgactttggtgtatgggagcaaagagtttggattccgcgatcaagtgctgagtgacaccattcaatgggcgatcgataacggcaaaggtgacatgtttctgaatccgaatcaggctgctggttacatggcgaaactgatctggaacgcagtgtccgggaccgtagtcgcagcagttgaggcgatgaactggctgaaaagtgcggcgaaattacttgctgctgaagtgaaggatgagaagacggatacagttctgcgtggccgctgcgcagtacattgggtgactcccgacggcttccctgtgtggcaggaatacaagaagcctattcaaacgcgcttgaacctgatgttcctcggtcagttccgcttacagcctaccattaacaccaacaaagatagcgagattgatgcacgcaaacaggtgtctggtatcgctcctaactttgtacacagccaagacggtaaccaccttcgtatgactgtagtgtgggcacacgagaagtacggaatcgaatcttttgcactgattcacgactccttcggtaccattccggctgacgctgcgaacctgttcaaagcagtgcgcgaaactttcgttgacacatatgagtcttgtgatgtactggctgatttctacgaccagattgctgaccagttgcacgagtctcaacgcgacaaaatgccagcacttccggctaaaggtaacttgaacctccgtgacatcttaaaatcggacttcgcgttcgcg

SEQ ID NO: 1068 - protein, 890 aa, synthetic construct
  REGION 1..890: note = Variant of RNA polymerase
MHHHHHHMNTINIAKNDFSDIELAAIPFNTLADHYGERLAREQLALEHESYEMGEARFRKMFERQLKAGEVADNAAAKPLITTLLPKMIARINDWFEEVKAKRGKRPTAFQFLQEIKPEAVAYITIKTTLACLTSADNTTVQAVASAIGRAIEDEARFGRIRDLEAKHFKKNVEEQLNKRVGHVYKKAFMQVVEHDMLSKGLLGGEAWSSWHKEDSIHVGVRCIEMLIESTGMVSLHRQNAGVVGQDSETIELAPEYAEAIATRAGALAGISPMFQPCVVPPKPWTGITGGGYWAAGRKPLQLVRTRSLAALRRYEEVSMPEVIKAVNIAQNTAWRINKKVLDVANTITQWQHCPVADVPAMDRGEMPARPLDIDTNEIALKAWKKEASAFYRKDKARVSRRLSMEFMLSQANKFANYEAIWFPQNMDWRGRVYAVPMFNPQGNDMTKGLLTFAQEKPIGEDGFYWLKIHGANTAGVDKVPFPQRIKFVEDNHTNIMECAKAPLENTWWAEQDSPFRFLAFCFEYAGVINSGLSYNCSLPLAFDGSCSGLQHFSAMLRDEIGGKAVNLLPSAEYQDIYRIVSDKVNEMLKQDLINGTSTTVETVTDKKTGEITQRTKYGTKVMAQWWLEHGVNRGVTKRSVMTLVYGSKEFGFRDQVLSDTIQWAIDNGKGDMFLNPNQAAGYMAKLIWNAVSGTVVAAVEAMNWLKSAAKLLAAEVKDEKTDTVLRGRCAVHWVTPDGFPVWQEYKKPIQTRLNLMFLGQFRLQPTINTNKDSEIDARKQVSGIAPNFVHSQDGNHLRMTVVWAHEKYGIESFALIHDSFGTIPADAANLFKAVRETFVDTYESCDVLADFYDQIADQLHESQRDKMPALPAKGNLNLRDILKSDFAFA

SEQ ID NO: 1069 - DNA, 2670 bp, synthetic construct
  misc_feature 1..2670: note = Variant of RNA polymerase
  source 1..2670: mol_type = other DNA
atgcaccatcaccatcaccatatgaacacgattaacattgctaagaacgacttctctgacatcgaactggctgctatcccgttcaacactctggctgaccattacggtgagcgtttagctcgcgaacagttggcccttgagcatgagtcttacgagatgggtgaagcacgcttccgcaagatgtttgagcgtcaacttaaagctggtgaggttgcggataacgctgccgccaagcctctcatcactaccctactccctaagatgattgcacgcatcaacgactggtttgaggaagtgaaagctaagcgcggcaagcgcccgacagccttccagttcctgcaagaaatcaagccggaagccgtagcgtacatcaccattaagaccactctggcttgcctgacccgtgaggacaatacaaccgttcaggctgtagcaagcgcaatcggtcgggccattgaggacgaggctcgcttcggtcgtatccgtgaccttgaagctaagcacttcaagaagaacgttgaggaacaactcaacaagcgcgtagggcacgtctacaagaaagcatttatgcaagttgtcgagcacgacatgctctctaagggtctactcggtggcgaggcgtggtcttcgtggcataaggaagactctattcatgtaggagtacgctgcatcgagatgctcattgagtcaaccggaatggttagcttacaccgccaaaatgctggcgtagtgggtcaggactctgagactatcgaactcgcacctgaatacgctgaggctatcgcaacccgtgcaggtgcgctggctggcatctctccgatgttccaaccttgcgtagttcctcctaagccgtggactggcattactggtggtggctattgggctgcggggcgcaaacccctgcagttagtacgtactcgcagtctggcggcgcttcgccgctatgaagaagtgtcgatgccggaggtcatcaaagcagtcaacattgcgcagaatacagcatggcgtattaacaagaaagttctcgacgtagcgaataccatcacccaatggcagcactgtccagtcgcggatgtgcctgcgatggatcgtggcgaaatgccagctcgtccgttggacatcgataccaacgagattgcacttaaagcgtggaagaaagaagcttccgcgttctaccgcaaagacaaagcacgcgttagccgtcgtctgtcgatggagtttatgttatctcaggcgaacaagtttgcgaattatgaggcaatctggtttccgcaaaacatggattggcgtgggcgcgtgtacgctgtcccgatgttcaatcctcagggcaacgatatgacgaaaggcctgctgacctttgcgcaggagaaacccattggtgaagacggcttctattggctcaagattcatggcgcaaatacagctggagtggataaagtaccgtttccacaacgcatcaaatttgttgaggataaccatacgaatattatggaatgcgcgaaagcaccgctggaaaacacttggtgggcggaacaggactcgccgttctgttttctggcgttctgctttgagtatgctggcgtcatcaatagtggtctgtcgtacaactgtagcttgcctctggcatttgatggtagttgctccggcctgcaacatttctcagcgatgttacgcgacgaaattggcggcaaagctgtgaatctcctcccatctgcggaataccaggatatttatcgtatcgtcagcgacaaagttaacgagatgctgaaacaagatctgattaacggtacctctaccaccgtggaaacggtgactgataagaagacaggcgaaattacccaacgcacgaaatacgggaccaaagttatggcacagtggtggttagaacacggtgtgaatcgtggcgtcacgaaacgctcggttatgactttggtgtatgggagcaaagagtttggattccgcgatcaagtgctgagtgacaccattcaaccggcgatcgataacggcaaaggtgacatgtttctgaatccgaatcaggctgctggttacatggcgaaactgatctggaacgcagtgtccgggaccgtagtcgcagcagttgaggcgatgaactggctgaaaagtgcggcgaaattacttgctgctgaagtgaaggatcctaagacggatacagttctgcgtggccgctgcgcagtacattgggtgactcccgacggcttccctgtgtggcaggaatacaagaagcctattcagacgcgcttgaacctgatgttcctcggtcagttccgcttacagcctaccattaacaccaacaaagatagcgagattgatgcacacaaacaggagtctggtatcgctcctaactttgtacacagccaagacggtaaccaccttcgtatgactgtagtgtgggcacacgagaagtacggaatcgaatcttttgcactgattcacgactccttcggtaccattccggctgacgctgcgaacctgttcaaagcagtgcgcgaaactttcgttgacacatatgagtcttgtgatgtactggctgatttctacgaccagttcgctgaccagttgcacgagtctcaacgcgacaaaatgccagcacttccggctaaaggtaacttgaacctccgtgacatcttaaaatcggacttcgcgttcgcg

SEQ ID NO: 1070 - protein, 890 aa, synthetic construct
  REGION 1..890: note = Variant of RNA polymerase
MHHHHHHMNTINIAKNDFSDIELAAIPFNTLADHYGERLAREQLALEHESYEMGEARFRKMFERQLKAGEVADNAAAKPLITTLLPKMIARINDWFEEVKAKRGKRPTAFQFLQEIKPEAVAYITIKTTLACLTREDNTTVQAVASAIGRAIEDEARFGRIRDLEAKHFKKNVEEQLNKRVGHVYKKAFMQVVEHDMLSKGLLGGEAWSSWHKEDSIHVGVRCIEMLIESTGMVSLHRQNAGVVGQDSETIELAPEYAEAIATRAGALAGISPMFQPCVVPPKPWTGITGGGYWAAGRKPLQLVRTRSLAALRRYEEVSMPEVIKAVNIAQNTAWRINKKVLDVANTITQWQHCPVADVPAMDRGEMPARPLDIDTNEIALKAWKKEASAFYRKDKARVSRRLSMEFMLSQANKFANYEAIWFPQNMDWRGRVYAVPMFNPQGNDMTKGLLTFAQEKPIGEDGFYWLKIHGANTAGVDKVPFPQRIKFVEDNHTNIMECAKAPLENTWWAEQDSPFCFLAFCFEYAGVINSGLSYNCSLPLAFDGSCSGLQHFSAMLRDEIGGKAVNLLPSAEYQDIYRIVSDKVNEMLKQDLINGTSTTVETVTDKKTGEITQRTKYGTKVMAQWWLEHGVNRGVTKRSVMTLVYGSKEFGFRDQVLSDTIQPAIDNGKGDMFLNPNQAAGYMAKLIWNAVSGTVVAAVEAMNWLKSAAKLLAAEVKDPKTDTVLRGRCAVHWVTPDGFPVWQEYKKPIQTRLNLMFLGQFRLQPTINTNKDSEIDAHKQESGIAPNFVHSQDGNHLRMTVVWAHEKYGIESFALIHDSFGTIPADAANLFKAVRETFVDTYESCDVLADFYDQFADQLHESQRDKMPALPAKGNLNLRDILKSDFAFA

SEQ ID NO: 1071 - DNA, 2670 bp, synthetic construct
  misc_feature 1..2670: note = Variant of RNA polymerase
  source 1..2670: mol_type = other DNA
atgcaccatcaccatcaccatatgaacacgattaacattgctaagaacgacttctctgacatcgaactggctgctatcccgttcaacactctggctgaccattacggtgagcgtttagctcgcgaacagttggcccttgagcatgagtcttacgagatgggtgaagcacgcttccgcaagatgtttgagcgtcaacttaaagctggtgaggttgcggataacgctgccgccaagcctctcatcactaccctactccctaagatgattgcacgcatcaacgactggtttgaggaagtgaaagctaagcgcggcaagcgcccgacagccttccagttcctgcaagaaatcaagccggaagccgtagcgtacatcaccattaagaccactctggcttgcctaaccagtgcggacaatacaaccgttcaggctgtagcaagcgcaatcggtcgggccattgaggacgaggctcgcttcggtcgtatccgtgaccttgaagctaagcacttcaagaagaacgttgaggaacaactcaacaagcgcgtagggcacgtctacaagaaagcatttatgcaagttgtcgagcacgacatgctctctaagggtctactcggtggcgaggcgtggtcttcgtggcataaggaagactctattcatgtaggagtacgctgcatcgagatgctcattgagtcaaccggaatggttagcttacaccgccaaaatgctggcgtagtaggtcaagactctgagactatcgaactcgcacctgaatacgctgaggctatcgcaacccgtgcaggtgcgctggctggcatctctccgatgttccaaccttgcgtagttcctcctaagccgtggactggcattactggtggtggctattgggctgcggggcgcaaacccctgcagttagtacgtactcgcagtctggcggcgcttcgccgctatgaagaagtgtcgatgccggaggtcatcaaagcagtcaacattgcgcagaatacagcatggcgtattaacaagaaagttctcgacgtagcgaataccatcacccaatggcagcactgtccagtcgcggatgtgcctgcgatggatcgtggcgaaatgccagctcgtccgttggacatcgataccaacgagattgcacttaaagcgtggaagaaagaagcttccgcgttctaccgcaaagacaaagcacgcgttagccgtcgtctgtcaatggagtttatgttatctcaggcgaacaagtttgcgaattatgaggcaatctggtttccgcaaaacatggattggcgtgggcgcgtgtacgctgtcccgatgttcaatcctcagggcaacgatatgacgaaaggcctgctgacctttgcgcaggagaaacccattggtgaagacggcttctattggctcaagattcatggcgcaaatacagctggagtggataaagtaccgtttccacaacgcatcaaatttgttgaggataaccatacgaatattatggaatgcgcgaaagcaccgctggaaaacacttggtgggcggaacaggactcgccgttctgttttctggcgttctgctttgagtatgctggcgtcatcaatagtggtctgtcgtacaactgtagcttgcctctggcatttgatggtagttgctccggcctgcaacatttctcagcgatgttacgcgacgaaattggcggcaaagctgtgaatctcctcccatctgcggaataccaggatatttatcgtatcgtcagcgacaaagttaacgagatgctgaaacaagatctgattaacggtacctctaccaccgtggaaacggtgactgataagaagacaggcgaaattacccaacgcacgaaatacgggaccaaagttatggcacagtggtggttagaacacggtgtgaatcgtggcgtcacgaaacgctcggttatgactttggtgtatgggagcaaagagtttggattccgcgatcaagtgctgagtgacaccattcaaccggcgatcgataacggcaagggtgacatgtttctgaatccgaatcaggctgctggttacatggcgaaactgatctggaacgcagtgtccgggaccgtagtcgcagcagttgaggcgatgaactggctgaaaagtgcggcgaaattacttgctgctgaagtgaaggatcctaagacggatacagttctgcgtggccgctgcgcagtacattgggtgactcccgacggcttccctgtgtggcaggaatacaagaagcctattcagacgcgcttgaacctgatgttcctcggtcagttccgcttacagcctaccattaacaccaacaaagatagcgagattgatgcacacaaacaggagtctggtatcgctcctaactttgtacacagccaagacggtaaccaccttcgtatgactgtagtgtgggcacacgagaagtacggaatcgaatcttttgcactgattcacgactccttcggtaccattccggctgacgctgcgaacctgttcaaagcagtgcgcgaaactttcgttgacacatatgagtcttgtgatgtactggctgatttctacgaccagattgctgaccagttgcacgagtctcaacgcgacaaaatgccagcacttccggctaaaggtaacttgaacctccgtgacatcttaaaatcggacttcgcgttcgcg

SEQ ID NO: 1072 - protein, 890 aa, synthetic construct
  REGION 1..890: note = Variant of RNA polymerase
MHHHHHHMNTINIAKNDFSDIELAAIPFNTLADHYGERLAREQLALEHESYEMGEARFRKMFERQLKAGEVADNAAAKPLITTLLPKMIARINDWFEEVKAKRGKRPTAFQFLQEIKPEAVAYITIKTTLACLTSADNTTVQAVASAIGRAIEDEARFGRIRDLEAKHFKKNVEEQLNKRVGHVYKKAFMQVVEHDMLSKGLLGGEAWSSWHKEDSIHVGVRCIEMLIESTGMVSLHRQNAGVVGQDSETIELAPEYAEAIATRAGALAGISPMFQPCVVPPKPWTGITGGGYWAAGRKPLQLVRTRSLAALRRYEEVSMPEVIKAVNIAQNTAWRINKKVLDVANTITQWQHCPVADVPAMDRGEMPARPLDIDTNEIALKAWKKEASAFYRKDKARVSRRLSMEFMLSQANKFANYEAIWFPQNMDWRGRVYAVPMFNPQGNDMTKGLLTFAQEKPIGEDGFYWLKIHGANTAGVDKVPFPQRIKFVEDNHTNIMECAKAPLENTWWAEQDSPFCFLAFCFEYAGVINSGLSYNCSLPLAFDGSCSGLQHFSAMLRDEIGGKAVNLLPSAEYQDIYRIVSDKVNEMLKQDLINGTSTTVETVTDKKTGEITQRTKYGTKVMAQWWLEHGVNRGVTKRSVMTLVYGSKEFGFRDQVLSDTIQPAIDNGKGDMFLNPNQAAGYMAKLIWNAVSGTVVAAVEAMNWLKSAAKLLAAEVKDPKTDTVLRGRCAVHWVTPDGFPVWQEYKKPIQTRLNLMFLGQFRLQPTINTNKDSEIDAHKQESGIAPNFVHSQDGNHLRMTVVWAHEKYGIESFALIHDSFGTIPADAANLFKAVRETFVDTYESCDVLADFYDQIADQLHESQRDKMPALPAKGNLNLRDILKSDFAFA

SEQ ID NO: 1073 - DNA, 2670 bp, synthetic construct
  misc_feature 1..2670: note = Variant of RNA polymerase
  source 1..2670: mol_type = other DNA
atgcaccatcaccatcaccatatgaacacgattaacattgctaagaacgacttctctgacatcgaactggctgctatcccgttcaacactctggctgaccattacggtgagcgtttagctcgcgaacagttggcccttgagcatgagtcttacgagatgggtgaagcacgcttccgcaagatgtttgagcgtcaacttaaagctggtgaggttgcggataacgctgccgccaagcctctcatcactaccctactccctaagatgattgcacgcatcaacgactggtttgaggaagtgaaagctaagcgcggcaagcgcccgacagccttccagttcctgcaagaaatcaagccggaagccgtagcgtacatcaccattaagaccactctggcttgcctgacccgtgaggacaatacaaccgttcaggctgtagcaagcgcaatcggtcgggccattgaggacgaggctcgcttcggtcgtatccgtgaccttgaagctaagcacttcaagaagaacgttgaggaacaactcaacaagcgcgtagggcacgtctacaagaaagcatttatgcaagttgtcgagcacgacatgctctctaagggtctactcggtggcgaggcgtggtcttcgtggcataaggaagactctattcatgtaggagtacgctgcatcgagatgctcattgagtcaaccggaatggttagcttacaccgccaaaatgctggcgtagtgggtcaggactctgagactatcgaactcgcacctgaatacgctgaggctatcgcaacccgtgcaggtgcgctggctggcatctctccgatgttccaaccttgcgtagttcctcctaagccgtggactggcattactggtggtggctattgggctgcggggcgcaaacccctgcagttagtacgtactcgcagtctggcggcgcttcgccgctatgaagaagtgtcgatgccggaggtcatcaaagcagtcaacattgcgcagaatacagcatggcgtattaacaagctggttctcgacgtagcgaataccatcacccaatggcagcactgtccagtcgcggatgtgcctgcgatggatcgtggcgaaatgccagctcgtccgttggacatctataccaacgagagtgcacttaaagcgtggaagaaagaagcttccgcgttctaccgcaaagacaaagcacgcgttagccgtcgtctgtcaatggagtttatgttatctcaggcgaacaagtttgccaattatgaggcaatctggtttccgcaaaacatggattggcgtgggcgcgtgtacgctgtcccgatgttcaatcctcagggcaacgatatgacgaaaggcctgctgacctttgcgcaggagaaacccattggtgaagacggcttctattggctcaagattcatggcgcaaatacagctggagtggataaagtaccgtttccacaacgcatcaaatttgttgaggataaccatacgaatattatggaatgcgcgaaagcaccgctggaaaacacttggtgggcggaacaggactcgccgttctgttttctggcgttctgctttgagtatgctggcgtcatcaatagtggtctgtcgtacaactgtagcttgcctctggcatttgatggtagttgctccggcctgcaacatttctcagcgatgttacgcgacgaaattggcggcaaagctgtgaatctcctcccatctgcggaataccaggatatttatcgtatcgtcagcgacaaagttaacgagatgctgaaacaagatctgattaacggtacctctaccaccgtggaaacggtgactgataagaagacaggcgaaattacccaacgcacgaaatacgggaccaaagttatggcacagtggtggttagaacacggtgtgaatcgtggcgtcacgaaacgctcggttatgactttggtgtatgggagcaaagagtttggattccgcgatcaagtgctgagtgacaccattcaaccggcgatcgataacggcaaaggtgacatgtttctgaatccgaatcaggctgctggttacatggcgaaactgatctggaacgcagtgtccgggaccgtagtcgcagcagttgaggcgatgaactggctgaaaagtgcggcgaaattacttgctgctgaagtgaaggatcctaagacggatacagttctgcgtggccgctgcgcagtacattgggtgactcccgacggcttccctgtgtggcaggaatacaagaagcctattcagacgcgcttgaacctgatgttcctcggtcagttccgcttacagcctaccattaacaccaacaaagatagcgagattgatgcacacaaacaggagtctggtatcgctcctaactttgtacacagccaagacggtaaccaccttcgtatgactgtagtgtgggcacacgagaagtacggaatcgaatcttttgcactgattcacgactccttcggtaccattccggctgacgctgcgaacctgttcaaagcagtgcgcgaaactttcgttgacacatatgagtcttgtgatgtactggctgatttctacgaccagttcgctgaccagttgcacgagtctcaacgcgacaaaatgccagcacttccggctaaaggtaacttgaacctccgtgacatcttaaaatcggacttcgcgttcgcg

SEQ ID NO: 1074 - protein, 890 aa, synthetic construct
  REGION 1..890: note = Variant of RNA polymerase
MHHHHHHMNTINIAKNDFSDIELAAIPFNTLADHYGERLAREQLALEHESYEMGEARFRKMFERQLKAGEVADNAAAKPLITTLLPKMIARINDWFEEVKAKRGKRPTAFQFLQEIKPEAVAYITIKTTLACLTREDNTTVQAVASAIGRAIEDEARFGRIRDLEAKHFKKNVEEQLNKRVGHVYKKAFMQVVEHDMLSKGLLGGEAWSSWHKEDSIHVGVRCIEMLIESTGMVSLHRQNAGVVGQDSETIELAPEYAEAIATRAGALAGISPMFQPCVVPPKPWTGITGGGYWAAGRKPLQLVRTRSLAALRRYEEVSMPEVIKAVNIAQNTAWRINKLVLDVANTITQWQHCPVADVPAMDRGEMPARPLDIYTNESALKAWKKEASAFYRKDKARVSRRLSMEFMLSQANKFANYEAIWFPQNMDWRGRVYAVPMFNPQGNDMTKGLLTFAQEKPIGEDGFYWLKIHGANTAGVDKVPFPQRIKFVEDNHTNIMECAKAPLENTWWAEQDSPFCFLAFCFEYAGVINSGLSYNCSLPLAFDGSCSGLQHFSAMLRDEIGGKAVNLLPSAEYQDIYRIVSDKVNEMLKQDLINGTSTTVETVTDKKTGEITQRTKYGTKVMAQWWLEHGVNRGVTKRSVMTLVYGSKEFGFRDQVLSDTIQPAIDNGKGDMFLNPNQAAGYMAKLIWNAVSGTVVAAVEAMNWLKSAAKLLAAEVKDPKTDTVLRGRCAVHWVTPDGFPVWQEYKKPIQTRLNLMFLGQFRLQPTINTNKDSEIDAHKQESGIAPNFVHSQDGNHLRMTVVWAHEKYGIESFALIHDSFGTIPADAANLFKAVRETFVDTYESCDVLADFYDQFADQLHESQRDKMPALPAKGNLNLRDILKSDFAFA

SEQ ID NO: 1075 - DNA, 2670 bp, synthetic construct
  misc_feature 1..2670: note = Variant of RNA polymerase
  source 1..2670: mol_type = other DNA
atgcaccatcaccatcaccatatgaacacgattaacattgctaagaacgacttctctgacatcgaactggctgctatcccgttcaacactctggctgaccattacggtgagcgtttagctcgcgaacagttggcccttgagcatgagtcttacgagatgggtgaagcacgcttccgcaagatgtttgagcgtcaacttaaagctggtgaggttgcggataacgctgccgccaagcctctcatcactaccctactccctaagatgattgcacgcatcaacgactggtttgaggaagtgaaagctaagcgcggcaagcgcccgacagccttccagttcctgcaagaaatcaagccggaagccgtagcgtacatcaccattaagaccactctggcttgcctgaccagtgcggacaatacaaccgttcaggctgtagcaagcgcaatcggtcgggccattgaggacgaggctcgcttcggtcgtatccgtgaccttgaagctaagcacttcaagaagaacgttgaggaacaactcaacaagcgcgtagggcacgtctacaagaaagcatttatgcaagttgtcgagcacgacatgctctctaagggtctactcggtggcgaggcgtggtcttcgtggcataaggaagactctattcatgtaggagtacgctgcatcgagatgctcattgagtcaaccggaatggttagcttacaccgccaaaatgctggcgtagtgggtcaggactctgagactatcgaactcgcacctgaatacgctgaggctatcgcaacccgtgcaggtgcgctggctggcatctctccgatgttccaaccttgcgtagttcctcctaagccgtggactggcattactggtggtggctattgggctgcggggcgcaaacccctgcagttagtacgtactcgcagtctggcggcgcttcgccgctatgaagaagtgtcgatgccggaggtcatcaaagcagtcaacattgcgcagaatacagcatggcgtattaacaagctggttctcgacgtagcgaataccatcacccaatggcagcactgtccagtcgcggatgtgcctgcgatggatcgcggcgaaatgccagctcgtccgttggacatcgataccaacgagattgcacttaaagcgtggaagaaagaagcttccgcgttctaccgcaaagacaaagcacgcatgagccgtcgtctgtcgatggagtttatgttatctcaggcgaacaagtttgcgaattatgaggcaatctggtttccgcaaaacatggattggcgtgggcgcgtgtacgctgtcccgatgttcaatcctcagggcaacgatatgacgaaaggcctgctgacctttgcgcaggagaaacccattggtgaagacggcttctattggctcaagattcatggcgcaaatacagctggagtggataaagtaccgtttccacaacgcatcaaatttgttgaggataaccatacgaatattatggaatgcgcgaaagcaccgctggaaaacacttggtgggcggaacaggactcgccgttctgttttctggcgttctgctttgagtatgctggcgtcatcaatagtggtctgtcgtacaactgtagcttgcctctggcatttgatggtagttgctccggcctgcaacatttctcagcgatgttacgcgacgaaattggcggcaaagctgtgaatctcctcccatctgcggaataccaggatatttatcgtatcgtcagcgacaaagttaacgagatgctgaaacaagatctgattaacggtacctctaccaccgtggaaacggtgactgataagaagacaggcgaaattacccaacgcacgaaatacgggaccaaagttatggcacagtggtggttagaacacggtgtgaatcgtggcgtcacgaaacgctcggttatgactttggtgtatgggagcaaagagtttggattccgcgatcaagtgctgagtgacaccattcaaccggcgatcgataacggcaaaggtgacatgtttctgaatccgaatcaggctgctggttacatggcgaaactgatctggaacgcagtgtccgggaccgtagtcgcagcagttgaggcgatgaactggctgaaaagtgcggcgaaattacttgctgctgaagtgaaggatcctaagacggatacagttctgcgtggccgctgcgcagtacattgggtgactcccgacggcttccctgtgtggcaggaatacaagaagcctattcagacgcgcttgaacctgatgttcctcggtcagttccgcttacagcctaccattaacaccaacaaagatagcgagattgatgcacacaaacaggagtctggtatcgctcctaactttgtacacagccaagacggtaaccaccttcgtatgactgtagtgtgggcacacgagaagtacggaatcgaatcttttgcactgattcacgactccttcggtaccattccggctgacgctgcgaacctgttcaaagcagtgcgcgaaactttcgttgacacatatgagtcttgtgatgtactggctgatttctacgaccagttcgctgaccagttgcacgagtctcaacgcgacaaaatgccagcacttccggctaaaggtaacttgaacctccgtgacatcttaaaatcggacttcgcgttcgcg

SEQ ID NO: 1076 - protein, 890 aa, synthetic construct
  REGION 1..890: note = Variant of RNA polymerase
MHHHHHHMNTINIAKNDFSDIELAAIPFNTLADHYGERLAREQLALEHESYEMGEARFRKMFERQLKAGEVADNAAAKPLITTLLPKMIARINDWFEEVKAKRGKRPTAFQFLQEIKPEAVAYITIKTTLACLTSADNTTVQAVASAIGRAIEDEARFGRIRDLEAKHFKKNVEEQLNKRVGHVYKKAFMQVVEHDMLSKGLLGGEAWSSWHKEDSIHVGVRCIEMLIESTGMVSLHRQNAGVVGQDSETIELAPEYAEAIATRAGALAGISPMFQPCVVPPKPWTGITGGGYWAAGRKPLQLVRTRSLAALRRYEEVSMPEVIKAVNIAQNTAWRINKLVLDVANTITQWQHCPVADVPAMDRGEMPARPLDIDTNEIALKAWKKEASAFYRKDKARMSRRLSMEFMLSQANKFANYEAIWFPQNMDWRGRVYAVPMFNPQGNDMTKGLLTFAQEKPIGEDGFYWLKIHGANTAGVDKVPFPQRIKFVEDNHTNIMECAKAPLENTWWAEQDSPFCFLAFCFEYAGVINSGLSYNCSLPLAFDGSCSGLQHFSAMLRDEIGGKAVNLLPSAEYQDIYRIVSDKVNEMLKQDLINGTSTTVETVTDKKTGEITQRTKYGTKVMAQWWLEHGVNRGVTKRSVMTLVYGSKEFGFRDQVLSDTIQPAIDNGKGDMFLNPNQAAGYMAKLIWNAVSGTVVAAVEAMNWLKSAAKLLAAEVKDPKTDTVLRGRCAVHWVTPDGFPVWQEYKKPIQTRLNLMFLGQFRLQPTINTNKDSEIDAHKQESGIAPNFVHSQDGNHLRMTVVWAHEKYGIESFALIHDSFGTIPADAANLFKAVRETFVDTYESCDVLADFYDQFADQLHESQRDKMPALPAKGNLNLRDILKSDFAFA

SEQ ID NO: 1077 - DNA, 2670 bp, synthetic construct
  misc_feature 1..2670: note = Variant of RNA polymerase
  source 1..2670: mol_type = other DNA
atgcaccatcaccatcaccatatgaacacgattaacattgctaagaacgacttctctgacatcgaactggctgctatcccgttcaacactctggctgaccattacggtgagcgtttagctcgcgaacagttggcccttgagcatgagtcttacgagatgggtgaagcacgcttccgcaagatgtttgagcgtcaacttaaagctggtgaggttgcggataacgctgccgccaagcctctcatcactaccctactccctaagatgattgcacgcatcaacgactggtttgaggaagtgaaagctaagcgcggcaagcgcccgacagccttccagttcctgcaagaaatcaagccggaagccgtagcgtacatcaccattaagaccactctggcttgcctaaccagtgcggacaatacaaccgttcaggctgtagcaagcgcaatcggtcgggccattgaggacgaggctcgcttcggtcgtatccgtgaccttgaagctaagcacttcaagaagaacgttgaggaacaactcaacaagcgcgtagggcacgtctacaagaaagcatttatgcaagttgtcgagcacgacatgctctctaagggtctactcggtggcgaggcgtggtcttcgtggcataaggaagactctattcatgtaggagtacgctgcatcgagatgctcattgagtcaaccggaatggttagcttacaccgccaaaatgctggcgtagtaggtcaagactctgagactatcgaactcgcacctgaatacgctgaggctatcgcaacccgtgcaggtgcgctggctggcatctctccgatgttccaaccttgcgtagttcctcctaagccgtggactggcattactggtggtggctattgggctgcggggcgcaaacccctgcagttagtacgtactcgcagtctggcggcgcttcgccgctatgaagaagtgtcgatgccggaggtcatcaaagcagtcaacattgcgcagaatacagcatggcgtattaacaagaaagttctcgacgtagcgaataccatcacccaatggcagcactgtccagtcgcggatgtgcctgcgatggatcgtggcgaaatgccagctcgtccgttggacatcgataccaacgagattgcacttaaagcgtggaagaaagaagcttccgcgttctaccgcaaagacaaagcacgcatgagccgtcgtctgtcgatggagtttatgttatctcaggcgaacaagtttgcgaattatgaggcaatctggtttccgcaaaacatggattggcgtgggcgcgtgtacgctgtcccgatgttcaatcctcagggcaacgatatgacgaaaggcctgctgacctttgcgcaggagaaacccattggtgaagacggcttctattggctcaagattcatggcgcaaatacagctggagtggataaagtaccgtttccacaacgcatcaaatttgttgaggataaccatacgaatattatggaatgcgcgaaagcaccgctggaaaacacttggtgggcggaacaggactcgccgttctgctttctggcgttctgctttgagtatgctggcgtcatcaatagtggtctgtcgtacaactgtagcttgcctctggcatttgatggtagttgctccggcctgcaacatttctcagcgatgttacgcgacgaaattggcggcaaagctgtgaatctcctcccatctgcggaataccaggatatttatcgtatcgtcagcgacaaagttaacgagatgctgaaacaagatctgattaacggtacctctaccaccgtggaaacggtgactgataagaagacaggcgaaattacccaacgcacgaaatacgggaccaaagttatggcacagtggtggttagaacacggtgtgaatcgtggcgtcacgaaacgctcggttatgactttggtgtatgggagcaaagagtttggattccgcgatcaagtgctgagtgacaccattcaaaaagcgatcgataacggcaaaggtgacatgtttctgaatccgaatcaggctgctggttacatggcgaaactgatctggaacgcagtgtccgggaccgtagtcgcagcagttgaggcgatgaactggctgaaaagtgcggcgaaattacttgctgctgaagtgaaggatcgtaagacggatacagttctgcgtggccgctgcgcagtacattgggtgactcccgacggcttccctgtgtggcaggaatacaagaagcctattcgtacgcgcttgaacctgatgttcctcggtcagttccgcttacagcctaccattaacaccaacaaagatagcgagattgatgcacacaaacaggagtctggtatcgctcctaactttgtacacagcctggacggtaaccaccttcgtatgactgtagtgtgggcacacgagaagtacagaatcgaatcttttgcactgattcacgactccttcggtaccattccggctgacgctgcgaacctgttcaaagcagtgcgcgaaactttcgttgacacatatgagtcttgtgatgtactggctgatttctacgaccagattgctgaccagttgcacgagtctcaacgcgacaaaatgccagcacttccggctaaaggtaacttgaacctccgtgacatcttaaaatcggacttcgcgttcgcg

SEQ ID NO: 1078 - protein, 890 aa, synthetic construct
  REGION 1..890: note = Variant of RNA polymerase
MHHHHHHMNTINIAKNDFSDIELAAIPFNTLADHYGERLAREQLALEHESYEMGEARFRKMFERQLKAGEVADNAAAKPLITTLLPKMIARINDWFEEVKAKRGKRPTAFQFLQEIKPEAVAYITIKTTLACLTSADNTTVQAVASAIGRAIEDEARFGRIRDLEAKHFKKNVEEQLNKRVGHVYKKAFMQVVEHDMLSKGLLGGEAWSSWHKEDSIHVGVRCIEMLIESTGMVSLHRQNAGVVGQDSETIELAPEYAEAIATRAGALAGISPMFQPCVVPPKPWTGITGGGYWAAGRKPLQLVRTRSLAALRRYEEVSMPEVIKAVNIAQNTAWRINKKVLDVANTITQWQHCPVADVPAMDRGEMPARPLDIDTNEIALKAWKKEASAFYRKDKARMSRRLSMEFMLSQANKFANYEAIWFPQNMDWRGRVYAVPMFNPQGNDMTKGLLTFAQEKPIGEDGFYWLKIHGANTAGVDKVPFPQRIKFVEDNHTNIMECAKAPLENTWWAEQDSPFCFLAFCFEYAGVINSGLSYNCSLPLAFDGSCSGLQHFSAMLRDEIGGKAVNLLPSAEYQDIYRIVSDKVNEMLKQDLINGTSTTVETVTDKKTGEITQRTKYGTKVMAQWWLEHGVNRGVTKRSVMTLVYGSKEFGFRDQVLSDTIQKAIDNGKGDMFLNPNQAAGYMAKLIWNAVSGTVVAAVEAMNWLKSAAKLLAAEVKDRKTDTVLRGRCAVHWVTPDGFPVWQEYKKPIRTRLNLMFLGQFRLQPTINTNKDSEIDAHKQESGIAPNFVHSLDGNHLRMTVVWAHEKYRIESFALIHDSFGTIPADAANLFKAVRETFVDTYESCDVLADFYDQIADQLHESQRDKMPALPAKGNLNLRDILKSDFAFA

SEQ ID NO: 1079 - DNA, 2670 bp, synthetic construct
  misc_feature 1..2670: note = Variant of RNA polymerase
  source 1..2670: mol_type = other DNA
atgcaccatcaccatcaccatatgaacacgattaacattgctaagaacgacttctctgacatcgaactggctgctatcccgttcaacactctggctgaccattacggtgagcgtttagctcgcgaacagttggcccttgagcatgagtcttacgagatgggtgaagcacgcttccgcaagatgtttgagcgtcaacttaaagctggtgaggttgcggataacgctgccgccaagcctctcatcactaccctactccctaagatgattgcacgcatcaacgactggtttgaggaagtgaaagctaagcgcggcaagcgcccgacagccttccagttcctgcaagaaatcaagccggaagccgtagcgtacatcaccattaagaccactctggcttgcctaaccagtgcggacaatacaaccgttcaggctgtagcaagcgcaatcggtcgggccattgaggacgaggctcgcttcggtcgtatccgtgaccttgaagctaagcacttcaagaagaacgttgaggaacaactcaacaagcgcgtagggcacgtctacaagaaagcatttatgcaagttgtcgagcacgacatgctctctaagggtctactcggtggcgaggcgtggtcttcgtggcataaggaagactctattcatgtaggagtacgctgcatcgagatgctcattgagtcaaccggaatggttagcttacaccgccaaaatgctggcgtagtgggtgcagactctgagactatcgaactcgcacctgaatacgctgaggctatcgcaacccgtgcaggtgcgctggctggcatctctccgatgttccaaccttgcgtagttcctcctaagccgtggactggcattactggtggtggctattgggctgcggggcgcaaacccctgcagttagtacgtactcgcagtctggcggcgcttcgccgctatgaagaagtgtcgatgccggaggtcatcaaagcagtcaacattgcgcagaatacagcatggcgtattaacaagaaagttctcgacgtagcgaataccatcacccaatggcagcactgtccagtcgcggatgtgcctgcgatggatcgtggcgaaatgccagctcgtccgttggacatcgataccaacgagattgcacttaaagcgtggaagaaagaagcttccgcgttctaccgcaaagacaaagcacgcgtgagccgtcgtctgctgatggagtttatgttatctcaggcgaacaagtttgccaattatgaggcaatctggtttccgcaaaacatggattggcgtgggcgcgtgtacgctgtcccgatgttcaatcctcagggcaacgatatgacgaaaggcctgctgacctttgcgcaggagaaacccattggtgaagacggcttctattggctcaagattcatggcgcaaatacagctggagtggataaagtaccgtttccacaacgcatcaaatttgttgaggataaccatacgaatattatggaatgcgcgaaagcaccgctggaaaacacttggtgggcggaacaggactcgccgttctgctttctggcgttctgctttgagtatgctggcgtcatcaatagtggtctgtcgtacaactgtagcttgcctctggcatttgatggtagttgctccggcctgcaacatttctcagcgatgttacgcgacgaaattggcggcaaagctgtgaatctcctcccatctgcggaataccaggatatttatcgtatcgtcagcgacaaagttaacgagatgctgaaacaagatctgattaacggtacctctaccaccgtggaaacggtgactgataaaaagacaggcgaaattacccaacgcacgaaatacgggaccaaagttatggcacagtggtggttagaacacggtgtgaatcgtggcgtcacgaaacgctcggttatgactttgccgtatgggagcaaagagtttggattccgcgatcaagtgctgagtgacaccattcaatgggcgatcgataacggcaagggtgacatgtttctgaatccgaatcaggctgctggttacatggcgaaactgatctggaacgcagtgtccgggaccgtagtcgcagcagttgaggcgatgaactggctgaaaagtgcggcgaaattacttgctgctgaagtgaaggatcgtaagacggatacagttctgcgtggccgctgcgcagtacattgggtgactcccgacggcttccctgtgtggcaggaatacaagaagcctattcaaacgcgcttgaacctgatgttcctcggtcagttccgcttacagcctaccattaacaccaacaaagatagcgagattgatgcacacaaacaggtgtctggtatcgctcctaactttgtacacagccaagacggtaaccaccttcgtatgactgtagtgtgggcacacgagaagtacggaatcgaatcttttgcactgattcacgactccttcggtaccattccggctgacgctgcgaacctgttcaaagcagtgcgcgaaactttcgttgacacatatgagtcttgtgatgtactggctgatttctacgaccagattgctgaccagttgcacgagtctcaacgcgacaaaatgccagcacttccggctaaaggtaagttgaacctccgtgacatcttaaaatcggacttcgcgttcgcg

SEQ ID NO: 1080 - protein, 890 aa, synthetic construct
  REGION 1..890: note = Variant of RNA polymerase
MHHHHHHMNTINIAKNDFSDIELAAIPFNTLADHYGERLAREQLALEHESYEMGEARFRKMFERQLKAGEVADNAAAKPLITTLLPKMIARINDWFEEVKAKRGKRPTAFQFLQEIKPEAVAYITIKTTLACLTSADNTTVQAVASAIGRAIEDEARFGRIRDLEAKHFKKNVEEQLNKRVGHVYKKAFMQVVEHDMLSKGLLGGEAWSSWHKEDSIHVGVRCIEMLIESTGMVSLHRQNAGVVGADSETIELAPEYAEAIATRAGALAGISPMFQPCVVPPKPWTGITGGGYWAAGRKPLQLVRTRSLAALRRYEEVSMPEVIKAVNIAQNTAWRINKKVLDVANTITQWQHCPVADVPAMDRGEMPARPLDIDTNEIALKAWKKEASAFYRKDKARVSRRLLMEFMLSQANKFANYEAIWFPQNMDWRGRVYAVPMFNPQGNDMTKGLLTFAQEKPIGEDGFYWLKIHGANTAGVDKVPFPQRIKFVEDNHTNIMECAKAPLENTWWAEQDSPFCFLAFCFEYAGVINSGLSYNCSLPLAFDGSCSGLQHFSAMLRDEIGGKAVNLLPSAEYQDIYRIVSDKVNEMLKQDLINGTSTTVETVTDKKTGEITQRTKYGTKVMAQWWLEHGVNRGVTKRSVMTLPYGSKEFGFRDQVLSDTIQWAIDNGKGDMFLNPNQAAGYMAKLIWNAVSGTVVAAVEAMNWLKSAAKLLAAEVKDRKTDTVLRGRCAVHWVTPDGFPVWQEYKKPIQTRLNLMFLGQFRLQPTINTNKDSEIDAHKQVSGIAPNFVHSQDGNHLRMTVVWAHEKYGIESFALIHDSFGTIPADAANLFKAVRETFVDTYESCDVLADFYDQIADQLHESQRDKMPALPAKGKLNLRDILKSDFAFA

SEQ ID NO: 1081 - DNA, 2670 bp, synthetic construct
  misc_feature 1..2670: note = Variant of RNA polymerase
  source 1..2670: mol_type = other DNA
atgcaccatcaccatcaccatatgaacacgattaacattgctaagaacgacttctctgacatcgaactggctgctatcccgttcaacactctggctgaccattacggtgagcgtttagctcgcgaacagttggcccttgagcatgagtcttacgagatgggtgaagcacgcttccgcaagatgtttgagcgtcaacttaaagctggtgaggttgcggataacgctgccgccaagcctctcatcactaccctactccctaagatgattgcacgcatcaacgactggtttgaggaagtgaaagctaagcgcggcaagcgcccgacagccttccagttcctgcaagaaatcaagccggaagccgtagcgtacatcaccattaagaccactctggcttgcctaaccagtgcggacaatacaaccgttcaggcggtagcaagcgcaatcggtcgggccattgaggacgaggctcgcttcggtcgtatccgtgaccttgaagctaagcacttcaagaagaacgttgaggaacaactcaacaagcgcgtagggcacgtctacaagaaagcatttatgcaagttgtcgagcacgacatgctctctaagggtctactcggtggcgaggcgtggtcttcgtggcataaggaagactctattcatgtaggagtacgctgcatcgagatgctcattgagtcaaccggaatggttagcttacaccgccaaaatgctggcgtagtaggtcaagactctgagactatcgaactcgcacctgaatacgctgaggctatcgcaacccgtgcaggtgcgctggctggcatctctccgatgttccaaccttgcgtagttcctcctaagccgtggactggcattactggtggtggctattgggctgcggggcgcaaacccctgcagttagtacgtactcgcagtctggcggcgcttcgccgctatgaagaagtgtcgatgccggaggtcatcaaagcagtcaacattgcgcagaatacagcatggcgtattaacaagaaagttctcgacgtagcgaataccatcacccaatggcagcactgtccagtcgcggatgtgcctgcgatggatcgtggcgaaatgccagctcgtccgttggacatcgataccaacgagagtgcacttaaagcgtggaagaaagaagcttccgcgttctaccgcaaagacaaagcacgcgttagccgtcgtctgtcaatggagtttatgttatctcaggcgaacaagtttgcgaattatgaggcaatctggtttccgcaaaacatggattggcgtgggcgcgtgtacgctgtcccgatgttcaatcctcagggcaacgatatgacgaaaggcctgctgacctttgcgcaggagaaacccattggtgaagacggcttctattggctcaagattcatggcgcaaatacagctggagtggataaagtaccgtttccacaacgcatcaaatttgttgaggataaccatacgaatattatggaatgcgcgaaagcaccgctggaaaacacttggtgggcggaacaggactcgccgttctgttttctggcgttctgctttgagtatgctggcgtcatcaatagtggtctgtcgtacaactgtagcttgcctctggcatttgatggtagttgctccggcctgcaacatttctcagcgatgttacgcgacgaaattggcggcaaagctgtgaatctcctcccatctgcggaataccaggatatttatcgtatcgtcagcgacaaagttaacgagatgctgaaacaagatctgattaacggtacctctaccaccgtggaaacggtgactgataagaagacaggcgaaattacccaacgcacgaaatacgggaccaaagttatggcacagtggtggttagaacacggtgtgaatcgtggcgtcacgaaacgctcggttatgactttggtgtatgggagcaaagagtttggattccgcgatcaagtgctgagtgacaccattcaaccggcgatcgataacggcaaaggtgacatgtttctgaatccgaatcaggctgctggttacatggcgaaactgatctggaacgcagtgtccgggaccgtagtcgcagcagttgaggcgatgaactggctgaaaagtgcggcgaaattacttgctgctgaagtgaaggatcctaagacggatacagttctgcgtggccgctgcgcagtacattgggtgactcccgacggcttccctgtgtggcaggaatacaagaagcctattcagacgcgcttgaacctgatgttcctcggtcagttccgcttacagcctaccattaacaccaacaaagatagcgagattgatgcacacaaacaggagtctggtatcgctcctaactttgtacacagccaagacggtaaccaccttcgtatgactgtagtgtgggcacacgagaagtacggaatcgaatcttttgcactgattcacgactccttcggtaccattccggctgacgctgcgaacctgttcaaagcagtgcgcgaaactttcgttgacacatatgagtcttgtgatgtactggctgatttctacgaccagttcgctgaccagttgcacgagtctcaacgcgacaaaatgccagcacttccggctaaaggtaacttgaacctccgtgacatcttaaaatcggacttcgcgttcgcg

SEQ ID NO: 1082 - protein, 890 aa, synthetic construct
  REGION 1..890: note = Variant of RNA polymerase
MHHHHHHMNTINIAKNDFSDIELAAIPFNTLADHYGERLAREQLALEHESYEMGEARFRKMFERQLKAGEVADNAAAKPLITTLLPKMIARINDWFEEVKAKRGKRPTAFQFLQEIKPEAVAYITIKTTLACLTSADNTTVQAVASAIGRAIEDEARFGRIRDLEAKHFKKNVEEQLNKRVGHVYKKAFMQVVEHDMLSKGLLGGEAWSSWHKEDSIHVGVRCIEMLIESTGMVSLHRQNAGVVGQDSETIELAPEYAEAIATRAGALAGISPMFQPCVVPPKPWTGITGGGYWAAGRKPLQLVRTRSLAALRRYEEVSMPEVIKAVNIAQNTAWRINKKVLDVANTITQWQHCPVADVPAMDRGEMPARPLDIDTNESALKAWKKEASAFYRKDKARVSRRLSMEFMLSQANKFANYEAIWFPQNMDWRGRVYAVPMFNPQGNDMTKGLLTFAQEKPIGEDGFYWLKIHGANTAGVDKVPFPQRIKFVEDNHTNIMECAKAPLENTWWAEQDSPFCFLAFCFEYAGVINSGLSYNCSLPLAFDGSCSGLQHFSAMLRDEIGGKAVNLLPSAEYQDIYRIVSDKVNEMLKQDLINGTSTTVETVTDKKTGEITQRTKYGTKVMAQWWLEHGVNRGVTKRSVMTLVYGSKEFGFRDQVLSDTIQPAIDNGKGDMFLNPNQAAGYMAKLIWNAVSGTVVAAVEAMNWLKSAAKLLAAEVKDPKTDTVLRGRCAVHWVTPDGFPVWQEYKKPIQTRLNLMFLGQFRLQPTINTNKDSEIDAHKQESGIAPNFVHSQDGNHLRMTVVWAHEKYGIESFALIHDSFGTIPADAANLFKAVRETFVDTYESCDVLADFYDQFADQLHESQRDKMPALPAKGNLNLRDILKSDFAFA

SEQ ID NO: 1083 - DNA, 2670 bp, synthetic construct
  misc_feature 1..2670: note = Variant of RNA polymerase
  source 1..2670: mol_type = other DNA
atgcaccatcaccatcaccatatgaacacgattaacattgctaagaacgacttctctgacatcgaactggctgctatcccgttcaacactctggctgaccattacggtgagcgtttagctcgcgaacagttggcccttgagcatgagtcttacgagatgggtgaagcacgcttccgcaagatgtttgagcgtcaacttaaagctggtgaggttgcggataacgctgccgccaagcctctcatcactaccctactccctaagatgattgcacgcatcaacgactggtttgaggaagtgaaagctaagcgcggcaagcgcccgacagccttccagttcctgcaagaaatcaagccggaagccgtagcgtacatcaccattaagaccactctggcttgcctaaccagtgcggacaatacaaccgttcaggctgtagcaagcgcaatcggtcgggccattgaggacgaggctcgcttcggtcgtatccgtgaccttgaagctaagcacttcaagaagaacgttgaggaacaactcaacaagcgcgtagggcacgtctacaagaaagcatttatgcaagttgtcgagcacgacatgctctctaagggtctactcggtggcgaggcgtggtcttcgtggcataaggaagactctattcatgtaggagtacgctgcatcgagatgctcattgagtcaaccggaatggttagcttacaccgccaaaatgctggcgtagtgggtgcagactctgagactatcgaactcgcacctgaatacgctgaggctatcgcaacccgtgcaggtgcgctggctggcatctctccgatgttccaaccttgcgtagttcctcctaagccgtggactggcattactggtggtggctattgggctgcggggcgcaaacccctgcagttagtacgtactcgcagtctggcggcgcttcgccgctatgaagaagtgtcgatgccggaggtcatcaaagcagtcaacattgcgcagaatacagcatggcgtattaacaagaaagttctcgacgtagcgaataccatcacccaatggcagcactgtccagtcgcggatgtgcctgcgatggatcgtggcgaaatgccagctcgtccgttggacatcgataccaacgagattgcacttaaagcgtggaagaaagaagcttccgcgttctaccgcaaagacaaagcacgcgttagccgtcgtctgtcaatggagtttatgttatctcaggcgaacaagtttgcgaattatgaggcaatctggtttccgcaaaacatggattggcgtgggcgcgtgtacgctgtcccgatgttcaatcctcagggcaacgatatgacgaaaggcctgctgacctttgcgcaggagaaacccattggtgaagacggcttctattggctcaagattcatggcgcaaatacagctggagtggataaagtaccgtttccacaacgcatcaaatttgttgaggataaccatacgaatattatggaatgcgcgaaagcaccgctggaaaacacttggtgggcggaacaggactcgccgttccgctttctggcgttctgctttgagtatgctggcgtcatcaatagtggtctgtcgtacaactgtagcttgcctctggcatttgatggtagttgctccggcctgcaacatttctcagcgatgttacgcgacgaaattggcggcaaagctgtgaatctcctcccatctgcggaataccaggatatttatcgtatcgtcagcgacaaagttaacgagatgctgaaacaagatctgattaacggtacctctaccaccgtggaaacggtgactgattataagacaggcgaaattacccaacgcacgaaatacgggaccaaagttatggcacagtggtggttagaacacggtgtgaatcgtggcgtcacgaaacgctcggttatgactttggtgtatgggagcaaagagtttggattccgcgatcaagtgctgagtgacaccattcaaccggcgatcgataacggcaaaggtgacatgtttctgaatccgaatcaggctgctggttacatggcgaaactgatctggaacgcagtgtccgggaccgtagtcgcagcagttgaggcgatgaactggctgaaaagtgcggcgaaattacttgctgctgaagtgaaggatcctaagacggatacagttctgcgtggccgctgcgcagtacattgggtgactcccgacggcttccctgtgtggcaggaatacaagaagcctattcagacgcgcttgaacctgatgttcctcggtcagttccgcttacagcctaccattaacaccaacaaagatagcgagattgatgcacacaaacaggagtctggtatcgctcctaactttgtacacagccaagacggtaaccaccttcgtatgactgtagtgtgggcacacgagaagtacggaatcgaatcttttgcactgattcacgactccttcggtaccattccggctgacgctgcgaacctgttcaaagcagtgcgcgaaactttcgttgacacatatgagtcttgtgatgtactggctgatttctacgaccagttcgctgaccagttgcacgagtctcaacgcgacaaaatgccagcacttccggctaaaggtaatttgaacctccgtgacatcttaaaatcggacttcgcgttcgcg

SEQ ID NO: 1084 - protein, 890 aa, synthetic construct
  REGION 1..890: note = Variant of RNA polymerase
MHHHHHHMNTINIAKNDFSDIELAAIPFNTLADHYGERLAREQLALEHESYEMGEARFRKMFERQLKAGEVADNAAAKPLITTLLPKMIARINDWFEEVKAKRGKRPTAFQFLQEIKPEAVAYITIKTTLACLTSADNTTVQAVASAIGRAIEDEARFGRIRDLEAKHFKKNVEEQLNKRVGHVYKKAFMQVVEHDMLSKGLLGGEAWSSWHKEDSIHVGVRCIEMLIESTGMVSLHRQNAGVVGADSETIELAPEYAEAIATRAGALAGISPMFQPCVVPPKPWTGITGGGYWAAGRKPLQLVRTRSLAALRRYEEVSMPEVIKAVNIAQNTAWRINKKVLDVANTITQWQHCPVADVPAMDRGEMPARPLDIDTNEIALKAWKKEASAFYRKDKARVSRRLSMEFMLSQANKFANYEAIWFPQNMDWRGRVYAVPMFNPQGNDMTKGLLTFAQEKPIGEDGFYWLKIHGANTAGVDKVPFPQRIKFVEDNHTNIMECAKAPLENTWWAEQDSPFRFLAFCFEYAGVINSGLSYNCSLPLAFDGSCSGLQHFSAMLRDEIGGKAVNLLPSAEYQDIYRIVSDKVNEMLKQDLINGTSTTVETVTDYKTGEITQRTKYGTKVMAQWWLEHGVNRGVTKRSVMTLVYGSKEFGFRDQVLSDTIQPAIDNGKGDMFLNPNQAAGYMAKLIWNAVSGTVVAAVEAMNWLKSAAKLLAAEVKDPKTDTVLRGRCAVHWVTPDGFPVWQEYKKPIQTRLNLMFLGQFRLQPTINTNKDSEIDAHKQESGIAPNFVHSQDGNHLRMTVVWAHEKYGIESFALIHDSFGTIPADAANLFKAVRETFVDTYESCDVLADFYDQFADQLHESQRDKMPALPAKGNLNLRDILKSDFAFA

SEQ ID NO: 1085 - DNA, 2670 bp, synthetic construct
  misc_feature 1..2670: note = Variant of RNA polymerase
  source 1..2670: mol_type = other DNA
atgcaccatcaccatcaccatatgaacacgattaacattgctaagaacgacttctctgacatcgaactggctgctatcccgttcaacactctggctgaccattacggtgagcgtttagctcgcgaacagttggcccttgagcatgagtcttacgagatgggtgaagcacgcttccgcaagatgtttgagcgtcaacttaaagctggtgaggttgcggataacgctgccgccaagcctctcatcactaccctactccctaagatgattgcacgcatcaacgactggtttgaggaagtgaaagctaagcgcggcaagcgcccgacagccttccagttcctgcaagaaatcaagccggaagccgtagcgtacatcaccattaagaccactctggcttgcctaaccagtgcggacaatacaaccgttcaggctgtagcaagcgcaatcggtcgggccattgaggacgaggctcgcttcggtcgtatccgtgaccttgaagctaagcacttcaagaagaacgttgaggaacaactcaacaagcgcgtagggcacgtctacaagaaagcatttatgcaagttgtcgagcacgacatgctctctaagggtctactcggtggcgaggcgtggtcttcgtggcataaggaagactctattcatgtaggagtacgctgcatcgagatgctcattgagtcaaccggaatggttagcttacaccgccaaaatgctggcgtagtgggtgcagactctgagactatcgaactcgcacctgaatacgctgaggctatcgcaacccgtgcaggtgcgctggctggcatctctccgatgttccaaccttgcgtagttcctcctaagccgtggactggcattactggtggtggctattgggctgcggggcgcaaacccctgcagttagtacgtactcgcagtctggcggcgcttcgccgctatgaagaagtgtcgatgccggaggtcatcaaagcagtcaacattgcgcagaatacagcatggcgtattaacaagaaagttctcgacgtagcgaataccatcacccaatggcagcactgtccagtcgcggatgtgcctgcgatggatcgtggcgaaatgccagctcgtccgttggacatcgataccaacgagattgcacttaaagcgtggaagaaagaagcttccgcgttctaccgcaaagacaaagcacgcgttagccgtcgtctgtcaatggagtttatgttatctcaggcgaacaagtttgcgaattatgaggcaatctggtttccgcaaaacatggattggcgtgggcgcgtgtacgctgtcccgatgttcaatcctcagggcaacgatatgacgaaaggcctgctgacctttgcgcaggagaaacccattggtgaagacggcttctattggctcaagattcatggcgcaaatacagctggagtggataaagtaccgtttccacaacgcatcaaatttgttgaggataaccatacgaatattatggaatgcgcgaaagcaccgctggaaaacacttggtgggcggaacaggactcgccgttctgctttctggcgttctgctttgagtatgctggcgtcatcaatagtggtctgtcgtacaactgtagcttgcctctggcatttgatggtagttgctccggcctgcaacatttctcagcgatgttacgcgacgaaattggcggcaaagctgtgaatctcctcccatctgcggaataccaggatatttatcgtatcgtcagcgacaaagttaacgagatgctgaaacaagatctgattaacggtacctctaccaccgtggaaacggtgactgataagaagacaggcgaaattacccaacgcacgaaatacgggaccaaagttatggcacagtggtggttagaacacggtgtgaatcgtggcgtcacgaaacgctcggttatgactttggtgtatgggagcaaagagtttggattccgcgatcaagtgctgagtgacaccattcaacgtgcgatcgataacggcaaaggtgacatgtttctgaatccgaatcaggctgctggttacatggcgaaactgatctggaacgcagtgtccgggaccgtagtcgcagcagttgaggcgatgaactggctgaaaagtgcggcgaaattacttgctgctgaagtgaaggatcctaagacggatacagttctgcgtggccgctgcgcagtacattgggtgactcccgacggcttccctgtgtggcaggaatacaagaagcctattcagacgcgcttgaacctgatgttcctcggtcagttccgcttacagcctaccattaacaccaacaaagatagcgagattgatgcacacaaacaggagtctggtatcgctcctaactttgtacacagccaggacggtaaccaccttcgtatgactgtagtgtgggcacacgagaagtacggaatcgaatcttttgcactgattcacgactccttcggtaccattccggctgacgctgcgaacctgttcaaagcagtgcgcgaaactttcgttgacacatatgagtcttgtgatgtactggctgatttctacgaccagttcgctgaccagttgcacgagtctcaacgcgacaaaatgccagcacttccggctaaaggtaacttgaacctccgtgacatcttaaaatcggacttcgcgttcgcg

SEQ ID NO: 1086 - protein, 890 aa, synthetic construct
  REGION 1..890: note = Variant of RNA polymerase
MHHHHHHMNTINIAKNDFSDIELAAIPFNTLADHYGERLAREQLALEHESYEMGEARFRKMFERQLKAGEVADNAAAKPLITTLLPKMIARINDWFEEVKAKRGKRPTAFQFLQEIKPEAVAYITIKTTLACLTSADNTTVQAVASAIGRAIEDEARFGRIRDLEAKHFKKNVEEQLNKRVGHVYKKAFMQVVEHDMLSKGLLGGEAWSSWHKEDSIHVGVRCIEMLIESTGMVSLHRQNAGVVGADSETIELAPEYAEAIATRAGALAGISPMFQPCVVPPKPWTGITGGGYWAAGRKPLQLVRTRSLAALRRYEEVSMPEVIKAVNIAQNTAWRINKKVLDVANTITQWQHCPVADVPAMDRGEMPARPLDIDTNEIALKAWKKEASAFYRKDKARVSRRLSMEFMLSQANKFANYEAIWFPQNMDWRGRVYAVPMFNPQGNDMTKGLLTFAQEKPIGEDGFYWLKIHGANTAGVDKVPFPQRIKFVEDNHTNIMECAKAPLENTWWAEQDSPFCFLAFCFEYAGVINSGLSYNCSLPLAFDGSCSGLQHFSAMLRDEIGGKAVNLLPSAEYQDIYRIVSDKVNEMLKQDLINGTSTTVETVTDKKTGEITQRTKYGTKVMAQWWLEHGVNRGVTKRSVMTLVYGSKEFGFRDQVLSDTIQRAIDNGKGDMFLNPNQAAGYMAKLIWNAVSGTVVAAVEAMNWLKSAAKLLAAEVKDPKTDTVLRGRCAVHWVTPDGFPVWQEYKKPIQTRLNLMFLGQFRLQPTINTNKDSEIDAHKQESGIAPNFVHSQDGNHLRMTVVWAHEKYGIESFALIHDSFGTIPADAANLFKAVRETFVDTYESCDVLADFYDQFADQLHESQRDKMPALPAKGNLNLRDILKSDFAFA

SEQ ID NO: 1087 - DNA, 2670 bp, synthetic construct
  misc_feature 1..2670: note = Variant of RNA polymerase
  source 1..2670: mol_type = other DNA
atgcaccatcaccatcaccatatgaacacgattaacattgctaagaacgacttctctgacatcgaactggctgctatcccgttcaacactctggctgaccattacggtgagcgtttagctcgcgaacagttggcccttgagcatgagtcttacgagatgggtgaagcacgcttccgcaagatgtttgagcgtcaacttaaagctggtgaggttgcggataacgctgccgccaagcctctcatcactaccctactccctaagatgattgcacgcatcaacgactggtttgaggaagtgaaagctaagcgcggcaagcgcccgacagccttccagttcctgcaagaaatcaagccggaagccgtagcgtacatcaccattaagaccactctggcttgcctaaccagtgcggacaatacaaccgttcaggctgtagcaagcgcaatcggtcgggccattgaggacgaggctcgcttcggtcgtatccgtgaccttgaagctaagcacttcaagaagaacgttgaggaacaactcaacaagcgcgtagggcacgtctacaagaaagcatttatgcaagttgtcgagcacgacatgctctctaagggtctactcggtggcgaggcgtggtcttcgtggcataaggaagactctattcatgtaggagtacgctgcatcgagatgctcattgagtcaaccggaatggttagcttacaccgccaaaatgctggcgtagtaggtcaagactctgagactatcgaactcgcacctgaatacgctgaggctatcgcaacccgtgcaggtgcgctggctggcatctctccgatgttccaaccttgcgtagttcctcctaagccgtggactggcattactggtggtggctattgggctgcggggcgcaaacccctgcagttagtacgtactcgcagtctggcggcgcttcgccgctatgaagaagtgtcgatgccggaggtcatcaaagcagtcaacattgcgcagaatacagcatggcgtattaacaagaaagttctcgacgtagcgaataccatcacccaatggcagcactgtccagtcgcggatgtgcctgcgatggatcgtggcgaaatgccagctcgtccgttggacatcgataccaacgagattgcacttaaagcgtggaagaaagaagcttccgcgttctaccgcaaagacaaagcacgcgttagccgtcgtctgtcaatggagtttatgttatctcaggcgaacaagtttgcgaattatgaggcaatctggtttccgcaaaacatggattggcgtgggcgcgtgtacgctgtcccgatgttcaatcctcagggcaacgatatgacgaaaggcctgctgacctttgcgcaggagaaacccattggtgaagacggcttctattggctcaagattcatggcgcaaatacagctggagtggataaagtaccgtttccacaacgcatcaaatttgttgaggataaccatacgaatattatggaatgcgcgaaagcaccgctggaaaacacttggtgggcggaacaggactcgccgttccgctttctggcgttctgctttgagtatgctggcgtcatcaatagtggtctgtcgtacaactgtagcttgcctctggcatttgatggtagttgctccggcctgcaacatttctcagcgatgttacgcgacgaaattggcggcaaagctgtgaatctcctcccatctgcggaataccaggatatttatcgtatcgtcagcgacaaagttaacgagatgctgaaacaagatctgattaacggtacctctaccaccgtggaaacggtgactgataaaaagacaggcgaaattacccaacgcacgaaatacgggaccaaagttatggcacagtggtggttagaacacggtgtgaatcgtggcgtcacgaaacgctcggttatgactttggtgtatgggagcaaagagtttggattccgcgatcaagtgctgagtgacaccattcaaccggcgatcgataacggcaaaggtgacatgtttctgaatccgaatcaggctgctggttacatggcgaaactgatctggaacgcagtgtccgggaccgtagtcgcagcagttgaggcgatgaactggctgaaaagtgcggcgaaattacttgctgctgaagtgaaggatcctaagacggatacagttctgcgtggccgctgcgcagtacattgggtgactcccgacggcttccctgtgtggcaggaatacaagaagcctattcagacgcgcttgaacctgatgttcctcggtcagttccgcttacagcctaccattaacaccaacaaagatagcgagattgatgcacacaaacaggagtctggtatcgctcctaactttgtacacagccaagacggtaaccaccttcgtatgactgtagtgtgggcacacgagaagtacggaatcgaatcttttgcactgattcacgactccttcggtaccattccggctgacgctgcgaacctgttcaaagcagtgcgcgaaactttcgttgacacatatgagtcttgtgatgtactggctgatttctacgaccagttcgctgaccagttgcacgagtctcaacgcgacaaaatgccagcacttccggctaaaggtaacttgaacctccgtgacatcttaaaatcggacttcgcgttcgcg

SEQ ID NO: 1088 - protein, 890 aa, synthetic construct
  REGION 1..890: note = Variant of RNA polymerase
MHHHHHHMNTINIAKNDFSDIELAAIPFNTLADHYGERLAREQLALEHESYEMGEARFRKMFERQLKAGEVADNAAAKPLITTLLPKMIARINDWFEEVKAKRGKRPTAFQFLQEIKPEAVAYITIKTTLACLTSADNTTVQAVASAIGRAIEDEARFGRIRDLEAKHFKKNVEEQLNKRVGHVYKKAFMQVVEHDMLSKGLLGGEAWSSWHKEDSIHVGVRCIEMLIESTGMVSLHRQNAGVVGQDSETIELAPEYAEAIATRAGALAGISPMFQPCVVPPKPWTGITGGGYWAAGRKPLQLVRTRSLAALRRYEEVSMPEVIKAVNIAQNTAWRINKKVLDVANTITQWQHCPVADVPAMDRGEMPARPLDIDTNEIALKAWKKEASAFYRKDKARVSRRLSMEFMLSQANKFANYEAIWFPQNMDWRGRVYAVPMFNPQGNDMTKGLLTFAQEKPIGEDGFYWLKIHGANTAGVDKVPFPQRIKFVEDNHTNIMECAKAPLENTWWAEQDSPFRFLAFCFEYAGVINSGLSYNCSLPLAFDGSCSGLQHFSAMLRDEIGGKAVNLLPSAEYQDIYRIVSDKVNEMLKQDLINGTSTTVETVTDKKTGEITQRTKYGTKVMAQWWLEHGVNRGVTKRSVMTLVYGSKEFGFRDQVLSDTIQPAIDNGKGDMFLNPNQAAGYMAKLIWNAVSGTVVAAVEAMNWLKSAAKLLAAEVKDPKTDTVLRGRCAVHWVTPDGFPVWQEYKKPIQTRLNLMFLGQFRLQPTINTNKDSEIDAHKQESGIAPNFVHSQDGNHLRMTVVWAHEKYGIESFALIHDSFGTIPADAANLFKAVRETFVDTYESCDVLADFYDQFADQLHESQRDKMPALPAKGNLNLRDILKSDFAFA

SEQ ID NO: 1089 - DNA, 2670 bp, synthetic construct
  misc_feature 1..2670: note = Variant of RNA polymerase
  source 1..2670: mol_type = other DNA
atgcaccatcaccatcacaatatgaacacgattaacattgctaagaacgacttctctgacatcgaactggctgctatcccgttcaacactctggctgaccattacggtgagcgtttagctcgcgaacagttggcccttgagcatgagtcttacgagatgggtgaagcacgcttccgcaagatgtttgagcgtcaacttaaagctggtgaggttgcggataacgctgccgccaagcctctcatcactaccctactccctaagatgattgcacgcatcaacgactggtttgaggaagtgaaagctaagcgcggcaagcgcccgacagccttccagttcctgcaagaaatcaagccggaagccgtagcgtacatcaccattaagaccactctggcttgcctgacccgtgaggacaatacaaccgttcaggctgtagcaagcgcaatcggtcgggccattgaggacgaggctcgcttcggtcgtatccgtgaccttgaagctaagcacttcaagaagaacgttgaggaacaactcaacaagcgcgtagggcacgtctacaagaaagcatttatgcaagttgtcgagcacgacatgctctctaagggtctactcggtggcgaggcgtggtcttcgtggcataaggaagactctattcatgtaggagtacgctgcatcgagatgctcattgagtcaaccggaatggttagcttacaccgccaaaatgctggcgtagtgggtcaggactctgagactatcgaactcgcacctgaatacgctgaggctatcgcaacccgtgcaggtgcgctggctggcatctctccgatgttccaaccttgcgtagttcctcctaagccgtggactggcattactggtggtggctattgggctgcggggcgcaaacccctgcagttagtacgtactcgcagtctggcggcgcttcgccgctatgaagaagtgtcgatgccggaggtcatcaaagcagtcaacattgcgcagaatacagcatggcgtattaacaagctggttctcgacgtagcgaataccatcacccaatggcagcactgtccagtcgcggatgtgcctgcgatggatcgcggcgaaatgccagctcgtccgttggacatcgataccaacgagagtgcacttaaagcgtggaagaaagaagcttccgcgttctaccgcaaagacaaagcacgcgttagccgtcgtctgtcaatggagtttatgttatctcaggcgaacaagtttgtcaattatgaggcaatctggtttccgcaaaacatggattggcgtgggcgcgtgtacgctgtcccgatgttcaatcctcagggcaacgatatgacgaaaggcctgctgacctttgcgcaggagaaacccattggtgaagacggcttctattggctcaagattcatggcgcaaatacagctggagtggataaagtaccgtttccacaacgcatcaaatttgttgaggataaccatacgaatattatggaatgcgcgaaagcaccgctggaaaacacttggtgggcggaacaggactcgccgttctgttttctggcgttctgctttgagtatgctggcgtcatcaatagtggtctgtcgtacaactgtagcttgcctctggcatttgatggtagttgctccggcctgcaacatttctcagcgatgttacgcgacgaaattggcggcaaagctgtgaatctcctcccatctgcggaataccaggatatttatcgtatcgtcagcgacaaagttaacgagatgctgaaacaagatctgattaacggtacctctaccaccgtggaaacggtgactgataagaagacaggcgaaattacccaacgcacgaaatacgggaccaaagttatggcacagtggtggttagaacacggtgtgaatcgtggcgtcacgaaacgctcggttatgactttggtgtatgggagcaaagagtttggattccgcgatcaagtgctgagtgacaccattcaaccggcgatcgataacggcaaaggtgacatgtttctgaatccgaatcaggctgctggttacatggcgaaactgatctggaacgcagtgtccgggaccgtagtcgcagcagttgaggcgatgaactggctgaaaagtgcggcgaaattacttgctgctgaagtgaaggatcctaagacggatacagttctgcgtggccgctgcgcagtacattgggtgactcccgacggcttccctgtgtggcaggaatacaagaagcctattcagacgcgcttgaacctgatgttcctcggtcagttccgcttacagcctaccattaacaccaacaaagatagcgagattgatgcacacaaacaggagtctggtatcgctcctaactttgtacacagccaagacggtaaccaccttcgtatgactgtagtgtgggcacacgagaagtacggaatcgaatcttttgcactgattcacgactccttcggtaccattccggctgacgctgcgaacctgttcaaagcagtgcgcgaaactttcgttgacacatatgagtcttgtgatgtactggctgatttctacgaccagttcgctgaccagttgcacgagtctcaacgcgacaaaatgccagcacttccggctaaaggtaacttgaacctccgtgacatcttaaaatcggacttcgcgttcgcg

SEQ ID NO: 1090 - protein, 890 aa, synthetic construct
  REGION 1..890: note = Variant of RNA polymerase
MHHHHHNMNTINIAKNDFSDIELAAIPFNTLADHYGERLAREQLALEHESYEMGEARFRKMFERQLKAGEVADNAAAKPLITTLLPKMIARINDWFEEVKAKRGKRPTAFQFLQEIKPEAVAYITIKTTLACLTREDNTTVQAVASAIGRAIEDEARFGRIRDLEAKHFKKNVEEQLNKRVGHVYKKAFMQVVEHDMLSKGLLGGEAWSSWHKEDSIHVGVRCIEMLIESTGMVSLHRQNAGVVGQDSETIELAPEYAEAIATRAGALAGISPMFQPCVVPPKPWTGITGGGYWAAGRKPLQLVRTRSLAALRRYEEVSMPEVIKAVNIAQNTAWRINKLVLDVANTITQWQHCPVADVPAMDRGEMPARPLDIDTNESALKAWKKEASAFYRKDKARVSRRLSMEFMLSQANKFVNYEAIWFPQNMDWRGRVYAVPMFNPQGNDMTKGLLTFAQEKPIGEDGFYWLKIHGANTAGVDKVPFPQRIKFVEDNHTNIMECAKAPLENTWWAEQDSPFCFLAFCFEYAGVINSGLSYNCSLPLAFDGSCSGLQHFSAMLRDEIGGKAVNLLPSAEYQDIYRIVSDKVNEMLKQDLINGTSTTVETVTDKKTGEITQRTKYGTKVMAQWWLEHGVNRGVTKRSVMTLVYGSKEFGFRDQVLSDTIQPAIDNGKGDMFLNPNQAAGYMAKLIWNAVSGTVVAAVEAMNWLKSAAKLLAAEVKDPKTDTVLRGRCAVHWVTPDGFPVWQEYKKPIQTRLNLMFLGQFRLQPTINTNKDSEIDAHKQESGIAPNFVHSQDGNHLRMTVVWAHEKYGIESFALIHDSFGTIPADAANLFKAVRETFVDTYESCDVLADFYDQFADQLHESQRDKMPALPAKGNLNLRDILKSDFAFA

SEQ ID NO: 1091 - DNA, 2670 bp, synthetic construct
  misc_feature 1..2670: note = Variant of RNA polymerase
  source 1..2670: mol_type = other DNA
atgcaccatcaccatcaccatatgaacacgattaacattgctaagaacgacttctctgacatcgaactggctgctatcccgttcaacactctggctgaccattacggtgagcgtttagctcgcgaacagttggcccttgagcatgagtcttacgagatgggtgaagcacgcttccgcaagatgtttgagcgtcaacttaaagctggtgaggttgcggataacgctgccgccaagcctctcatcactaccctactccctaagatgattgcacgcatcaacgactggtttgaggaagtgaaagctaagcgcggcaagcgcccgacagccttccagttcctgcaagaaatcaagccggaagccgtagcgtacatcaccattaagaccactctggcttgcctaaccagtgcggacaatacaaccgttcaggctgtagcaagcgcaatcggtcgggccattgaggacgaggctcgcttcggtcgtatccgtgaccttgaagctaagcacttcaagaagaacgttgaggaacaactcaacaagcgcgtagggcacgtctacaagaaagcatttatgcaagttgtcgagcacgacatgctctctaagggtctactcggtggcgaggcgtggtcttcgtggcataaggaagactctattcatgtaggagtacgctgcatcgagatgctcattgagtcaaccggaatggttagcttacaccgccaaaatgctggcgtagtgggtgcagactctgagactatcgaactcgcacctgaatacgctgaggctatcgcaacccgtgcaggtgcgctggctggcatctctccgatgttccaaccttgcgtagttcctcctaagccgtggactggcattactggtggtggctattgggctgcggggcgcaaacccctgcagttagtacgtactcgcagtctggcggcgcttcgccgctatgaagaagtgtcgatgccggaggtcatcaaagcagtcaacattgcgcagaatacagcatggcgtattaacaagaaagttctcgacgtagcgaataccatcacccaatggcagcactgtccagtcgcggatgtgcctgcgatggatcgtggcgaaatgccagctcgtccgttggacatcgataccaacgagattgcacttaaagcgtggaagaaagaagcttccgcgttctaccgcaaagacaaagcacgcgttagccgtcgtctgtcaatggagtttatgttatctcaggcgaacaagtttgcgaattatgaggcaatctggtttccgcaaaacatggattggcgtgggcgcgtgtacgctgtcccgatgttcaatcctcagggcaacgatatgacgaaaggcctgctgacctttgcgcaggagaaacccattggtgaagacggcttctattggctcaagattcatggcgcaaatacagctggagtggataaagtaccgtttccacaacgcatcaaatttgttgaggataaccatacgaatattatggaatgcgcgaaagcaccgctggaaaacacttggtgggcggaacaggactcgccgttctattttctggcgttctgctttgagtatgctggcgtcatcaatagtggtctgtcgtacaactgtagcttgcctctggcatttgatggtagttgctccggcctgcaacatttctcagcgatgttacgcgacgaaattggcggcaaagctgtgaatctcctcccatctgcggaataccaggatatttatcgtatcgtcagcgacaaagttaacgagatgctgaaacaagatctgattaacggtacctctaccaccgtggaaacggtgactgataagaagacaggcgaaattacccaacgcacgaaatacgggaccaaagttatggcacagtggtggttagaacacggtgtgaatcgtggcgtcacgaaacgctcggttatgactttggtgtatgggagcaaagagtttggattccgcgatcaagtgctgagtgacaccattcaacctgcgatcgataacggcaaaggtgacatgtttctgaatccgaatcaggctgctggttacatggcgaaactgatctggaacgcagtgtccgggaccgtagtcgcagcagttgaggcgatgaactggctgaaaagtgcggcgaaattacttgctgctgaagtgaaggatcctaagacggatacagttctgcgtggccgctgcgcagtacattgggtgactcccgacggcttccctgtgtggcaggaatacaagaagcctattcgtacgcgcttgaacctgatgttcctcggtcagttccgcttacagcctaccattaacaccaacaaagatagcgagattgatgcacacaaacaggagtctggtatcgctcctaactttgtacacagccaagacggtaaccaccttcgtatgactgtagtgtgggcacacgagaagtacggaatcgaatcttttgcactgattcacgactccttcggtaccattccggctgacgctgcgaacctgttcaaagcagtgcgcgaaactttcgttgacacatatgagtcttgtgatgtactggctgatttctacgaccagattgctgaccagttgcacgagtctcaacgcgacaaaatgccagcacttccggctaaaggtaacttgaacctccgtgacatcttaaaatcggacttcgcgttcgcg

SEQ ID NO: 1092 - protein, 890 aa, synthetic construct
  REGION 1..890: note = Variant of RNA polymerase
MHHHHHHMNTINIAKNDFSDIELAAIPFNTLADHYGERLAREQLALEHESYEMGEARFRKMFERQLKAGEVADNAAAKPLITTLLPKMIARINDWFEEVKAKRGKRPTAFQFLQEIKPEAVAYITIKTTLACLTSADNTTVQAVASAIGRAIEDEARFGRIRDLEAKHFKKNVEEQLNKRVGHVYKKAFMQVVEHDMLSKGLLGGEAWSSWHKEDSIHVGVRCIEMLIESTGMVSLHRQNAGVVGADSETIELAPEYAEAIATRAGALAGISPMFQPCVVPPKPWTGITGGGYWAAGRKPLQLVRTRSLAALRRYEEVSMPEVIKAVNIAQNTAWRINKKVLDVANTITQWQHCPVADVPAMDRGEMPARPLDIDTNEIALKAWKKEASAFYRKDKARVSRRLSMEFMLSQANKFANYEAIWFPQNMDWRGRVYAVPMFNPQGNDMTKGLLTFAQEKPIGEDGFYWLKIHGANTAGVDKVPFPQRIKFVEDNHTNIMECAKAPLENTWWAEQDSPFYFLAFCFEYAGVINSGLSYNCSLPLAFDGSCSGLQHFSAMLRDEIGGKAVNLLPSAEYQDIYRIVSDKVNEMLKQDLINGTSTTVETVTDKKTGEITQRTKYGTKVMAQWWLEHGVNRGVTKRSVMTLVYGSKEFGFRDQVLSDTIQPAIDNGKGDMFLNPNQAAGYMAKLIWNAVSGTVVAAVEAMNWLKSAAKLLAAEVKDPKTDTVLRGRCAVHWVTPDGFPVWQEYKKPIRTRLNLMFLGQFRLQPTINTNKDSEIDAHKQESGIAPNFVHSQDGNHLRMTVVWAHEKYGIESFALIHDSFGTIPADAANLFKAVRETFVDTYESCDVLADFYDQIADQLHESQRDKMPALPAKGNLNLRDILKSDFAFA

SEQ ID NO: 1093 - DNA, 2670 bp, synthetic construct
  misc_feature 1..2670: note = Variant of RNA polymerase
  source 1..2670: mol_type = other DNA
atgcaccatcaccatcaccatatgaacacgattaacattgctaagaacgacttctctgacatcgaactggctgctatcccgttcaacactctggctgaccattacggtgagcgtttagctcgcgaacagttggcccttgagcatgagtcttacgagatgggtgaagcacgcttccgcaagatgtttgagcgtcaacttaaagctggtgaggttgcggataacgctgccgccaagcctctcatcactaccctactccctaagatgattgcacgcatcaacgactggtttgaggaagtgaaagctaagcgcggcaagcgcccgacagccttccagttcctgcaagaaatcaagccggaagccgtagcgtacatcaccattaagaccactctggcttgcctaaccagtgcggacaatacaaccgttcaggctgtagcaagcgcaatcggtcgggccattgaggacgaggctcgcttcggtcgtatccgtgaccttgaagctaagcacttcaagaagaacgttgaggaacaactcaacaagcgcgtagggcacgtctacaagaaagcatttatgcaagttgtcgagcacgacatgctctctaagggtctactcggtggcgaggcgtggtcttcgtggcataaggaagactctattcatgtaggagtacgctgcatcgagatgctcattgagtcaaccggaatggttagcttacaccgccaaaatgctggcgtagtaggtcaagactctgagactatcgaactcgcacctgaatacgctgaggctatcgcaacccgtgcaggtgcgctggctggcatctctccgatgttccaaccttgcgtagttcctcctaagccgtggactggcattactggtggtggctattgggctgcggggcgcaaacccctgcagttagtacgtactcgcagtctggcggcgcttcgccgctatgaagaagtgtcgatgccggaggtcatcaaagcagtcaacattgcgcagaatacagcatggcgtattaacaagaaagttctcgacgtagcgaataccatcacccaatggcagcactgtccagtcgcggatgtgcctgcgatggatcgtggcgaaatgccagctcgtccgttggacatcgataccaacgagattgcacttaaagcgtggaagaaagaagcttccgcgttctaccgcaaagacaaagcacgcgtgagccgtcgtctgtcgatggagtttatgttatctcaggcgaacaagtttgcgaattatgaggcaatctggtttccgcaaaacatggattggcgtgggcgcgtgtacgctgtcccgatgttcaatcctcagggcaacgatatgacgaaaggcctgctgacctttgcgcaggagaaacccattggtgaagacggcttctattggctcaagattcatggcgcaaatacagctggagtggataaagtaccgtttccacaacgcatcaaatttgttgaggataaccatacgaatattatggaatgcgcgaaagcaccgctggaaaacacttggtgggcggaacaggactcgccgttctattttctggcgttctgctttgagtatgctggcgtcatcaatagtggtctgtcgtacaactgtagcttgcctctggcatttgatggtagttgctccggcctgcaacatttctcagcgatgttacgcgacgaaattggcggcaaagctgtgaatctcctcccatctgcggaataccaggatatttatcgtatcgtcagcgacaaagttaacgagatgctgaaacaagatctgattaacggtacctctaccaccgtggaaacggtgactgataaaaagacaggcgaaattacccaacgcacgaaatacgggaccaaagttatggcacagtggtggttagaacacggtgtgaatcgtggcgtcacgaaacgctcggttatgactttggtgtatgggagcaaagagtttggattccgcgatcaagtgctgagtgacaccattcaacctgcgatcgataacggcaacggtgacatgtttctgaatccgaatcaggctgctggttacatggcgaaactgatctggaacgcagtgtccgggaccgtagtcgcagcagttgaggcgatgaactggctgaaaagtgcggcgaaattacttgctgctgaagtgaaggatgagaagacggatacagttctgcgtggccgctgcgcagtacattgggtgactcccgacggcttccctgtgtggcaggaatacaagaagcctattcgtacgcgcttgaacctgatgttcctcggtcagttccgcttacagcctaccattaacaccaacaaagatagcgagattgatgcacgcaaacaggtgtctggtatcgctcctaactttgtacacagccaagacggtaaccaccttcgtatgactgtagtgtgggcacacgagaagtacggaatcgaatcttttgcactgattcacgactccttcggtaccattccggctgacgctgcgaacctgttcaaagcagtgcgcgaaactttcgttgacacatatgagtcttgtgatgtactggctgatttctacgaccagattgctgaccagttgcacgagtctcaacgcgacaaaatgccagcacttccggctaaaggtaacttgaacctccgtgacatcttaaaatcggacttcgcgttcgcg

SEQ ID NO: 1094 - protein, 890 aa, synthetic construct
  REGION 1..890: note = Variant of RNA polymerase
MHHHHHHMNTINIAKNDFSDIELAAIPFNTLADHYGERLAREQLALEHESYEMGEARFRKMFERQLKAGEVADNAAAKPLITTLLPKMIARINDWFEEVKAKRGKRPTAFQFLQEIKPEAVAYITIKTTLACLTSADNTTVQAVASAIGRAIEDEARFGRIRDLEAKHFKKNVEEQLNKRVGHVYKKAFMQVVEHDMLSKGLLGGEAWSSWHKEDSIHVGVRCIEMLIESTGMVSLHRQNAGVVGQDSETIELAPEYAEAIATRAGALAGISPMFQPCVVPPKPWTGITGGGYWAAGRKPLQLVRTRSLAALRRYEEVSMPEVIKAVNIAQNTAWRINKKVLDVANTITQWQHCPVADVPAMDRGEMPARPLDIDTNEIALKAWKKEASAFYRKDKARVSRRLSMEFMLSQANKFANYEAIWFPQNMDWRGRVYAVPMFNPQGNDMTKGLLTFAQEKPIGEDGFYWLKIHGANTAGVDKVPFPQRIKFVEDNHTNIMECAKAPLENTWWAEQDSPFYFLAFCFEYAGVINSGLSYNCSLPLAFDGSCSGLQHFSAMLRDEIGGKAVNLLPSAEYQDIYRIVSDKVNEMLKQDLINGTSTTVETVTDKKTGEITQRTKYGTKVMAQWWLEHGVNRGVTKRSVMTLVYGSKEFGFRDQVLSDTIQPAIDNGNGDMFLNPNQAAGYMAKLIWNAVSGTVVAAVEAMNWLKSAAKLLAAEVKDEKTDTVLRGRCAVHWVTPDGFPVWQEYKKPIRTRLNLMFLGQFRLQPTINTNKDSEIDARKQVSGIAPNFVHSQDGNHLRMTVVWAHEKYGIESFALIHDSFGTIPADAANLFKAVRETFVDTYESCDVLADFYDQIADQLHESQRDKMPALPAKGNLNLRDILKSDFAFA

SEQ ID NO: 1095 - DNA, 2670 bp, synthetic construct
  misc_feature 1..2670: note = Variant of RNA polymerase
  source 1..2670: mol_type = other DNA
atgcaccatcaccatcaccatatgaacacgattaacattgctaagaacgacttctctgacatcgaactggctgctatcccgttcaacactctggctgaccattacggtgagcgtttagctcgcgaacagttggcccttgagcatgagtcttacgagatgggtgaagcacgcttccgcaagatgtttgagcgtcaacttaaagctggtgaggttgcggataacgctgccgccaagcctctcatcactaccctactccctaagatgattgcacgcatcaacgactggtttgaggaagtgaaagctaagcgcggcaagcgcccgacagccttccagttcctgcaagaaatcaagccggaagccgtagcgtacatcaccattaagaccactctggcttgcctgacccgtgaggacaatacaaccgttcaggctgtagcaagcgcaatcggtcgggccattgaggacgaggctcgcttcggtcgtatccgtgaccttgaagctaagcacttcaagaagaacgttgaggaacaactcaacaagcgcgtagggcacgtctacaagaaagcatttatgcaagttgtcgagcacgacatgctctctaagggtctactcggtggcgaggcgtggtcttcgtggcataaggaagactctattcatgtaggagtacgctgcatcgagatgctcattgagtcaaccggaatggttagcttacaccgccaaaatgctggcgtagtgggtcaggactctgagactatcgaactcgcacctgaatacgctgaggctatcgcaacccgtgcaggtgcgctggctggcatctctccgatgttccaaccttgcgtagttcctcctaagccgtggactggcattactggtggtggctattgggctgcggggcgcaaacccctgcagttagtacgtactcgcagtctggcggcgcttcgccgctatgaagaagtgtcgatgccggaggtcatcaaagcagtcaacattgcgcagaatacagcatggcgtattaacaaggaagttctcgacgtagcgaataccatcacccaatggcagcactgtccagtcgcggatgtgcctgcgatggatcgtggcgaaatgccagctcgtccgttggacatcgataccaacgagattgcacttaaagcgtggaagaaagaagcttccgcgttctaccgcaaagacaaagcacgcgttagccgtcgtctgtcaatggagtttatgttatctcaggcgaacaagtttgccaattatgaggcaatctggtttccgcaaaacatggattggcgtgggcgcgtgtacgctgtcccgatgttcaatcctcagggcaacgatatgacgaaaggcctgctgacctttgcgcaggagaaacccattggtgaagacggcttctattggctcaagattcatggcgcaaatacagctggagtggataaagtaccgtttccacaacgcatcaaatttgttgaggataaccatacgaatattatggaatgcgcgaaagcaccgctggaaaacacttggtgggcggaacaggactcgccgttctgttttctggcgttctgctttgagtatgctggcgtcatcaatagtggtctgtcgtacaactgtagcttgcctctggcatttgatggtagttgctccggcctgcaacatttctcagcgatgttacgcgacgaaattggcggcaaagctgtgaatctcctcccatctgcggaataccaggatatttatcgtatcgtcagcgacaaagttaacgagatgctgaaacaagatctgattaacggtacctctaccaccgtggaaacggtgactgataagaagacaggcgaaattacccaacgcacgaaatacgggaccaaagttatggcacagtggtggttagaacacggtgtgaatcgtggcgtcacgaaacgctcggttatgactttggtgtatgggagcaaagagtttggattccgcgatcaagtgctgagtgacaccattcaaccggcgatcgataacggcaaaggtgacatgtttctgaatccgaatcaggctgctggttacatggcgaaactgatctggaacgcagtgtccgggaccgtagtcgcagcagttgaggcgatgaactggctgaaaagtgcggcgaaattacttgctgctgaagtgaaggatcctaagacggatacagttctgcgtggccgctgcgcagtacattgggtgactcccgacggcttccctgtgtggcaggaatacaagaagcctattcagacgcgcttgaacctgatgttcctcggtcagttccgcttacagcctaccattaacaccaacaaagatagcgagattgatgcacacaaacaggagtctggtatcgctcctaactttgtacacagccaagacggtaaccaccttcgtatgactgtagtgtgggcacacgagaagtacggaatcgaatcttttgcactgattcacgactccttcggtaccattccggctgacgctgcgaacctgttcaaagcagtgcgcgaaactttcgttgacacatatgagtcttgtgatgtactggctgatttctacgaccagttcgctgaccagttgcacgagtctcaacgcgacaaaatgccagcacttccggctaaaggtaacttgaacctccgtgacatcttaaaatcggacttcgcgttcgcg

SEQ ID NO: 1096 - protein, 890 aa, synthetic construct
  REGION 1..890: note = Variant of RNA polymerase
MHHHHHHMNTINIAKNDFSDIELAAIPFNTLADHYGERLAREQLALEHESYEMGEARFRKMFERQLKAGEVADNAAAKPLITTLLPKMIARINDWFEEVKAKRGKRPTAFQFLQEIKPEAVAYITIKTTLACLTREDNTTVQAVASAIGRAIEDEARFGRIRDLEAKHFKKNVEEQLNKRVGHVYKKAFMQVVEHDMLSKGLLGGEAWSSWHKEDSIHVGVRCIEMLIESTGMVSLHRQNAGVVGQDSETIELAPEYAEAIATRAGALAGISPMFQPCVVPPKPWTGITGGGYWAAGRKPLQLVRTRSLAALRRYEEVSMPEVIKAVNIAQNTAWRINKEVLDVANTITQWQHCPVADVPAMDRGEMPARPLDIDTNEIALKAWKKEASAFYRKDKARVSRRLSMEFMLSQANKFANYEAIWFPQNMDWRGRVYAVPMFNPQGNDMTKGLLTFAQEKPIGEDGFYWLKIHGANTAGVDKVPFPQRIKFVEDNHTNIMECAKAPLENTWWAEQDSPFCFLAFCFEYAGVINSGLSYNCSLPLAFDGSCSGLQHFSAMLRDEIGGKAVNLLPSAEYQDIYRIVSDKVNEMLKQDLINGTSTTVETVTDKKTGEITQRTKYGTKVMAQWWLEHGVNRGVTKRSVMTLVYGSKEFGFRDQVLSDTIQPAIDNGKGDMFLNPNQAAGYMAKLIWNAVSGTVVAAVEAMNWLKSAAKLLAAEVKDPKTDTVLRGRCAVHWVTPDGFPVWQEYKKPIQTRLNLMFLGQFRLQPTINTNKDSEIDAHKQESGIAPNFVHSQDGNHLRMTVVWAHEKYGIESFALIHDSFGTIPADAANLFKAVRETFVDTYESCDVLADFYDQFADQLHESQRDKMPALPAKGNLNLRDILKSDFAFA

SEQ ID NO: 1097 - DNA, 2670 bp, synthetic construct
  misc_feature 1..2670: note = Variant of RNA polymerase
  source 1..2670: mol_type = other DNA
atgcaccatcaccatcaccatatgaacacgattaacattgctaagaacgacttctctgacatcgaactggctgctatcccgttcaacactctggctgaccattacggtgagcgtttagctcgcgaacagttggcccttgagcatgagtcttacgagatgggtgaagcacgcttccgcaagatgtttgagcgtcaacttaaagctggtgaggttgcggataacgctgccgccaagcctctcatcactaccctactccctaagatgattgcacgcatcaacgactggtttgaggaagtgaaagctaagcgcggcaagcgcccgacagccttccagttcctgcaagaaatcaagccggaagccgtagcgtacatcaccattaagaccactctggcttgcctaaccagtgcggacaatacaaccgttcaggctgtagcaagcgcaatcggtcgggccattgaggacgaggctcgcttcggtcgtatccgtgaccttgaagctaagcacttcaagaagaacgttgaggaacaactcaacaagcgcgtagggcacgtctacaagaaagcatttatgcaagttgtcgagcacgacatgctctctaagggtctactcggtggcgaggcgtggtcttcgtggcataaggaagactctattcatgtaggagtacgctgcatcgagatgctcattgagtcaaccggaatggttagcttacaccgccaaaatgctggcgtagtaggtcaagactctgagactatcgaactcgcacctgaatacgctgaggctatcgcaacccgtgcaggtgcgctggctggcatctctccgatgttccaaccttgcgtagttcctcctaagccgtggactggcattactggtggtggctattgggctgcggggcgcaaacccctgcagttagtacgtactcgcagtctggcggcgcttcgccgctatgaagaagtgtcgatgccggaggtcatcaaagcagtcaacattgcgcagaatacagcatggcgtattaacaagaaagttctcgacgtagcgaataccatcacccaatggcagcactgtccagtcgcggatgtgcctgcgatggatcgtggcgaaatgccagctcgtccgttggacatcgataccaacgagattgcacttaaagcgtggaagaaagaagcttccgcgttctaccgcaaagacaaagcacgcgtgagccgtcgtctgtcgatggagtttatgttatctcaggcgaacaagtttgcgaattatgaggcaatctggtttccgcaaaacatggattggcgtgggcgcgtgtacgctgtcccgatgttcaatcctcagggcaacgatatgacgaaaggcctgctgacctttgcgcaggagaaacccattggtgaagacggcttctattggctcaagattcatggcgcaaatacagctggagtggataaagtaccgtttccacaacgcatcaaatttgttgaggataaccatacgaatattatggaatgcgcgaaagcaccgctggaaaacacttggtgggcggaacaggactcgccgttctgctttctggcgttctgctttgagtatgctggcgtcatcaatagtggtctgtcgtacaactgtagcttgcctctggcatttgatggtagttgctccggcctgcaacatttctcagcgatgttacgcgacgaaattggcggcaaagctgtgaatctcctcccatctgcggaataccaggatatttatcgtatcgtcagcgacaaagttaacgagatgctgaaacaagatctgattaacggtacctctaccaccgtggaaacggtgactgataaaaagacaggcgaaattacccaacgcacgaaatacgggaccaaagttatggcacagtggtggttagaacacggtgtgaatcgtggcgtcacgaaacgcccggttatgactttggtgtatgggagcaaagagtttggattccgcgatcaagtgctgagtgacaccattcaatgggcgatcgataacggcaaaggtgacatgtttctgaatccgaatcaggctgctggttacatggcgaaactgatctggaacgcagtgtccgggaccgtagtcgcagcagttgaggcgatgaactggctgaaaagtgcggcgaaattacttgctgctgaagtgaaggatcctaagacggatacagttctgcgtggccgctgcgcagtacattgggtgactcccgacggcttccctgtgtggcaggaatacaagaagcctattcgtacgcgcttgaacctgatgttcctcggtcagttccgcttacagcctaccattaacaccaacaaagatagcgagattgatgcacacaaacaggagtctggtatcgctcctaactttgtacacagccaagacggtaaccaccttcgtatgactgtagtgtgggcacacgagaagtacggaatcgaatcttttgcactgattcacgactccttcggtaccattccggctgacgctgcgaacctgttcaaagcagtgcgcgaaactttcgttgacacatatgagtcttgtgatgtactggctgatttctacgaccagattgctgaccagttgcacgagtctcaacgcgacaaaatgccagcacttccggctaaaggtaagttgaacctccgtgacatcttaaaatcggacttcgcgttcgcg

SEQ ID NO: 1098 - protein, 890 aa, synthetic construct
  REGION 1..890: note = Variant of RNA polymerase
MHHHHHHMNTINIAKNDFSDIELAAIPFNTLADHYGERLAREQLALEHESYEMGEARFRKMFERQLKAGEVADNAAAKPLITTLLPKMIARINDWFEEVKAKRGKRPTAFQFLQEIKPEAVAYITIKTTLACLTSADNTTVQAVASAIGRAIEDEARFGRIRDLEAKHFKKNVEEQLNKRVGHVYKKAFMQVVEHDMLSKGLLGGEAWSSWHKEDSIHVGVRCIEMLIESTGMVSLHRQNAGVVGQDSETIELAPEYAEAIATRAGALAGISPMFQPCVVPPKPWTGITGGGYWAAGRKPLQLVRTRSLAALRRYEEVSMPEVIKAVNIAQNTAWRINKKVLDVANTITQWQHCPVADVPAMDRGEMPARPLDIDTNEIALKAWKKEASAFYRKDKARVSRRLSMEFMLSQANKFANYEAIWFPQNMDWRGRVYAVPMFNPQGNDMTKGLLTFAQEKPIGEDGFYWLKIHGANTAGVDKVPFPQRIKFVEDNHTNIMECAKAPLENTWWAEQDSPFCFLAFCFEYAGVINSGLSYNCSLPLAFDGSCSGLQHFSAMLRDEIGGKAVNLLPSAEYQDIYRIVSDKVNEMLKQDLINGTSTTVETVTDKKTGEITQRTKYGTKVMAQWWLEHGVNRGVTKRPVMTLVYGSKEFGFRDQVLSDTIQWAIDNGKGDMFLNPNQAAGYMAKLIWNAVSGTVVAAVEAMNWLKSAAKLLAAEVKDPKTDTVLRGRCAVHWVTPDGFPVWQEYKKPIRTRLNLMFLGQFRLQPTINTNKDSEIDAHKQESGIAPNFVHSQDGNHLRMTVVWAHEKYGIESFALIHDSFGTIPADAANLFKAVRETFVDTYESCDVLADFYDQIADQLHESQRDKMPALPAKGKLNLRDILKSDFAFA

SEQ ID NO: 1099 - DNA, 2670 bp, synthetic construct
  misc_feature 1..2670: note = Variant of RNA polymerase
  source 1..2670: mol_type = other DNA
atgcaccatcaccatcaccatatgaacacgattaacattgctaagaacgacttctctgacatcgaactggctgctatcccgttcaacactctggctgaccattacggtgagcgtttagctcgcgaacagttggcccttgagcatgagtcttacgagatgggtgaagcacgcttccgcaagatgtttgagcgtcaacttaaagctggtgaggttgcggataacgctgccgccaagcctctcatcactaccctactccctaagatgattgcacgcatcaacgactggtttgaggaagtgaaagctaagcgcggcaagcgcccgacagccttccagttcctgcaagaaatcaagccggaagccgtagcgtacatcaccattaagaccactctggcttgcctaaccagtgcggacaatacaaccgttcaggctgtagcaagcgcaatcggtcgggccattgaggacgaggctcgcttcggtcgtatccgtgaccttgaagctaagcacttcaagaagaacgttgaggaacaactcaacaagcgcgtagggcacgtctacaagaaagcatttatgcaagttgtcgagcacgacatgctctctaagggtctactcggtggcgaggcgtggtcttcgtggcataaggaagactctattcatgtaggagtacgctgcatcgagatgctcattgagtcaaccggaatggttagcttacaccgccaaaatgctggcgtagtaggtcaagactctgagactatcgaactcgcacctgaatacgctgaggctatcgcaacccgtgcaggtgcgctggctggcatctctccgatgttccaaccttgcgtagttcctcctaagccgtggactggcattactggtggtggctattgggctgcggggcgcaaacccctgcagttagtacgtactcgcagtctggcggcgcttcgccgctatgaagaagtgtcgatgccggaggtcatcaaagcagtcaacattgcgcagaatacagcatggcgtattaacaagaaagttctcgacgtagcgaataccatcacccaatggcagcactgtccagtcgcggatgtgcctgcgatggatcgtggcgaaatgccagctcgtccgttggacatcgataccaacgagattgcacttaaagcgtggaagaaagaagcttccgcgttctaccgcaaagacaaagcacgcatgagccgtcgtctgctgatggagtttatgttatctcaggcgaacaagtttgcgaattatgaggcaatctggtttccgcaaaacatggattggcgtgggcgcgtgtacgctgtcccgatgttcaatcctcagggcaacgatatgacgaaaggcctgctgacctttgcgcaggagaaacccattggtgaagacggcttctattggctcaagattcatggcgcaaatacagctggagtggataaagtaccgtttccacaacgcatcaaatttgttgaggataaccatacgaatattatggaatgcgcgaaagcaccgctggaaaacacttggtgggcggaacaggactcgccgttctattttctggcgttctgctttgagtatgctggcgtcatcaatagtggtctgtcgtacaactgtagcttgcctctggcatttgatggtagttgctccggcctgcaacatttctcagcgatgttacgcgacgaaattggcggcaaagctgtgaatctcctcccatctgcggaataccaggatatttatcgtatcgtcagcgacaaagttaacgagatgctgaaacaagatctgattaacggtacctctaccaccgtggaaacggtgactgataaaaagacaggcgaaattacccaacgcacgaaatacgggaccaaagttatggcacagtggtggttagaacacggtgtgaatcgtggcgtcacgaaacgctcggttatgactttggtgtatgggagcaaagagtttggattccgcgatcaagtgctgagtgacaccattcaaccggcgatcgataacggcaaaggtgacatgtttctgaatccgaatcaggctgctggttacatggcgaaactgatctggaacgcagtgtccgggaccgtagtcgcagcagttgaggcgatgaactggctgaaaagtgcggcgaaattacttgctgctgaagtgaaggatcctaagacggatacagttctgcgtggccgctgcgcagtacattgggtgactcccgacggcttccctgtgtggcaggaatacaagaagcctattcagacgcgcttgaacctgatgttcctcggtcagttccgcttacagcctaccattaacaccaacaaagatagcgagattgatgcacgcaaacaggtgtctggtatcgctcctaactttgtacacagccaagacggtaaccaccttcgtatgactgtagtgtgggcacacgagaagtacggaatcgaatcttttgcactgattcacgactccttcggtaccattccggctgacgctgcgaacctgttcaaagcagtgcgcgaaactttcgttgacacatatgagtcttgtgatgtactggctgatttctacgaccagttcgctgaccagttgcacgagtctcaacgcgacaaaatgccagcacttccggctaaaggtaacttgaacctccgtgacatcttaaaatcggacttcgcgttcgcg

SEQ ID NO: 1100 - protein, 890 aa, synthetic construct
  REGION 1..890: note = Variant of RNA polymerase
MHHHHHHMNTINIAKNDFSDIELAAIPFNTLADHYGERLAREQLALEHESYEMGEARFRKMFERQLKAGEVADNAAAKPLITTLLPKMIARINDWFEEVKAKRGKRPTAFQFLQEIKPEAVAYITIKTTLACLTSADNTTVQAVASAIGRAIEDEARFGRIRDLEAKHFKKNVEEQLNKRVGHVYKKAFMQVVEHDMLSKGLLGGEAWSSWHKEDSIHVGVRCIEMLIESTGMVSLHRQNAGVVGQDSETIELAPEYAEAIATRAGALAGISPMFQPCVVPPKPWTGITGGGYWAAGRKPLQLVRTRSLAALRRYEEVSMPEVIKAVNIAQNTAWRINKKVLDVANTITQWQHCPVADVPAMDRGEMPARPLDIDTNEIALKAWKKEASAFYRKDKARMSRRLLMEFMLSQANKFANYEAIWFPQNMDWRGRVYAVPMFNPQGNDMTKGLLTFAQEKPIGEDGFYWLKIHGANTAGVDKVPFPQRIKFVEDNHTNIMECAKAPLENTWWAEQDSPFYFLAFCFEYAGVINSGLSYNCSLPLAFDGSCSGLQHFSAMLRDEIGGKAVNLLPSAEYQDIYRIVSDKVNEMLKQDLINGTSTTVETVTDKKTGEITQRTKYGTKVMAQWWLEHGVNRGVTKRSVMTLVYGSKEFGFRDQVLSDTIQPAIDNGKGDMFLNPNQAAGYMAKLIWNAVSGTVVAAVEAMNWLKSAAKLLAAEVKDPKTDTVLRGRCAVHWVTPDGFPVWQEYKKPIQTRLNLMFLGQFRLQPTINTNKDSEIDARKQVSGIAPNFVHSQDGNHLRMTVVWAHEKYGIESFALIHDSFGTIPADAANLFKAVRETFVDTYESCDVLADFYDQFADQLHESQRDKMPALPAKGNLNLRDILKSDFAFA

SEQ ID NO: 1101 - DNA, 2670 bp, synthetic construct
  misc_feature 1..2670: note = Variant of RNA polymerase
  source 1..2670: mol_type = other DNA
atgcaccatcaccatcaccatatgaacacgattaacattgctaagaacgacttctctgacatcgaactggctgctatcccgttcaacactctggctgaccattacggtgagcgtttagctcgcgaacagttggcccttgagcatgagtcttacgagatgggtgaagcacgcttccgcaagatgtttgagcgtcaacttaaagctggtgaggttgcggataacgctgccgccaagcctctcatcactaccctactccctaagatgattgcacgcatcaacgactggtttgaggaagtgaaagctaagcgcggcaagcgcccgacagccttccagttcctgcaagaaatcaagccggaagccgtagcgtacatcaccattaagaccactctggcttgcctaaccagtgcggacaatacaaccgttcaggctgtagcaagcgcaatcggtcgggccattgaggacgaggctcgcttcggtcgtatccgtgaccttgaagctaagcacttcaagaagaacgttgaggaacaactcaacaagcgcgtagggcacgtctacaagaaagcatttatgcaagttgtcgagcacgacatgctctctaagggtctactcggtggcgaggcgtggtcttcgtggcataaggaagactctattcatgtaggagtacgctgcatcgagatgctcattgagtcaaccggaatggttagcttacaccgccaaaatgctggcgtagtaggtcaagactctgagactatcgaactcgcacctgaatacgctgaggctatcgcaacccgtgcaggtgcgctggctggcatctctccgatgttccaaccttgcgtagttcctcctaagccgtggactggcattactggtggtggctattgggctgcggggcgcaaacccctgcagttagtacgtactcgcagtctggcggcgcttcgccgctatgaagaagtgtcgatgccggaggtcatcaaagcagtcaacattgcgcagaatacagcatggcgtattaacaagaaagttctcgacgtagcgaataccatcacccaatggcagcactgtccagtcgcggatgtgcctgcgatggatcgtggcgaaatgccagctcgtccgttggacatcgataccaacgagattgcacttaaagcgtggaagaaagaagcttccgcgttctaccgcaaagacaaagcacgcgtgagccgtcgtctgtcgatggagtttatgttatctcaggcgaacaagtttgcgaattatgaggcaatctggtttccgcaaaacatggattggcgtgggcgcgtgtacgctgtcccgatgttcaatcctcagggcaacgatatgacgaaaggcctgctgacctttgcgcaggagaaacccattggtgaagacggcttctattggctcaagattcatggcgcaaatacagctggagtggataaagtaccgtttccacaacgcatcaaatttgttgaggataaccatacgaatattatggaatgcgcgaaagcaccgctggaaaacacttggtgggcggaacaggactcgccgttctgctttctggcgttctgctttgagtatgctggcgtcatcaatagtggtctgtcgtacaactgtagcttgcctctggcatttgatggtagttgctccggcctgcaacatttctcagcgatgttacgcgacgaaattggcggcaaagctgtgaatctcctcccatctgcggaataccaggatatttatcgtatcgtcagcgacaaagttaacgagatgctgaaacaagatctgattaacggtacctctaccaccgtggaaacggtgactgataagaagacaggcgaaattacccaacgcacgaaatacgggaccaaagttatggcacagtggtggttagaacacggtgtgaatcgtggcgtcacgaaacgcccggttatgactttggtgtatgggagcaaagagtttggattccgcgatcaagtgctgagtgacaccattcaaccggcgatcgataacggcaaaggtgacatgtttctgaatccgaatcaggctgctggttacatggcgaaactgatctggaacgcagtgtccgggaccgtagtcgcagcagttgaggcgatgaactggctgaaaagtgcggcgaaattacttgctgctgaagtgaaggatcctaagacggatacagttctgcgtggccgctgcgcagtacattgggtgactcccgacggcttccctgtgtggcaggaatacaagaagcctattcagacgcgcttgaacctgatgttcctcggtcagttccgcttacagcctaccattaacaccaacaaagatagcgagattgatgcacgcaaacaggggtctggtatcgctcctaactttgtacacagccaagacggtaaccaccttcgtatgactgtagtgtgggcacacgagaagtacggaatcgaatcttttgcactgattcacgactccttcggtaccattccggctgacgctgcgaacctgttcaaagcagtgcgcgaaactttcgttgacacatatgagtcttgtgatgtactggctgatttctacgaccagattgctgaccagttgcacgagtctcaacgcgacaaaatgccagcacttccggctaaaggtaacttgaacctccgtgacatcttaaaatcggacttcgcgttcgcg

SEQ ID NO: 1102 - protein, 890 aa, synthetic construct
  REGION 1..890: note = Variant of RNA polymerase
MHHHHHHMNTINIAKNDFSDIELAAIPFNTLADHYGERLAREQLALEHESYEMGEARFRKMFERQLKAGEVADNAAAKPLITTLLPKMIARINDWFEEVKAKRGKRPTAFQFLQEIKPEAVAYITIKTTLACLTSADNTTVQAVASAIGRAIEDEARFGRIRDLEAKHFKKNVEEQLNKRVGHVYKKAFMQVVEHDMLSKGLLGGEAWSSWHKEDSIHVGVRCIEMLIESTGMVSLHRQNAGVVGQDSETIELAPEYAEAIATRAGALAGISPMFQPCVVPPKPWTGITGGGYWAAGRKPLQLVRTRSLAALRRYEEVSMPEVIKAVNIAQNTAWRINKKVLDVANTITQWQHCPVADVPAMDRGEMPARPLDIDTNEIALKAWKKEASAFYRKDKARVSRRLSMEFMLSQANKFANYEAIWFPQNMDWRGRVYAVPMFNPQGNDMTKGLLTFAQEKPIGEDGFYWLKIHGANTAGVDKVPFPQRIKFVEDNHTNIMECAKAPLENTWWAEQDSPFCFLAFCFEYAGVINSGLSYNCSLPLAFDGSCSGLQHFSAMLRDEIGGKAVNLLPSAEYQDIYRIVSDKVNEMLKQDLINGTSTTVETVTDKKTGEITQRTKYGTKVMAQWWLEHGVNRGVTKRPVMTLVYGSKEFGFRDQVLSDTIQPAIDNGKGDMFLNPNQAAGYMAKLIWNAVSGTVVAAVEAMNWLKSAAKLLAAEVKDPKTDTVLRGRCAVHWVTPDGFPVWQEYKKPIQTRLNLMFLGQFRLQPTINTNKDSEIDARKQGSGIAPNFVHSQDGNHLRMTVVWAHEKYGIESFALIHDSFGTIPADAANLFKAVRETFVDTYESCDVLADFYDQIADQLHESQRDKMPALPAKGNLNLRDILKSDFAFA

SEQ ID NO: 1103 - DNA, 2670 bp, synthetic construct
  misc_feature 1..2670: note = Variant of RNA polymerase
  source 1..2670: mol_type = other DNA
atgcaccatcaccatcaccatatgaacacgattaacattgctaagaacgacttctctgacatcgaactggctgctatcccgttcaacactctggctgaccattacggtgagcgtttagctcgcgaacagttggcccttgagcatgagtcttacgagatgggtgaagcacgcttccgcaagatgtttgagcgtcaacttaaagctggtgaggttgcggataacgctgccgccaagcctctcatcactaccctactccctaagatgattgcacgcatcaacgactggtttgaggaagtgaaagctaagcgcggcaagcgcccgacagccttccagttcctgcaagaaatcaagccggaagccgtagcgtacatcaccattaagaccactctggcttgcctgaccagtgaggacaatacaaccgttcaggctgtagcaagcgcaatcggtcgggccattgaggacgaggctcgcttcggtcgtatccgtgaccttgaagctaagcacttcaagaagaacgttgaggaacaactcaacaagcgcgtagggcacgtctacaagaaagcatttatgcaagttgtcgagcacgacatgctctctaagggtctactcggtggcgaggcgtggtcttcgtggcataaggaagactctattcatgtaggagtacgctgcatcgagatgctcattgagtcaaccggaatggttagcttacaccgccaaaatgctggcgtagtgggtgcagactctgagactatcgaactcgcacctgaatacgctgaggctatcgcaacccgtgcaggtgcgctggctggcatctctccgatgttccaaccttgcgtagttcctcctaagccgtggactggcattactggtggtggctattgggctgcggggcgcaaacccctgcagttagtacgtactcgcagtctggcggcgcttcgccgctatgaagaagtgtcgatgccggaggtcatcaaagcagtcaacattgcgcagaatacagcatggcgtattaacaagaaagttctcgacgtagcgaataccatcacccaatggcagcactgtccagtcgcggatgtgcctgcgatggatcgtggcgaaatgccagctcgtccgttggacatcgataccaacgagattgcacttaaagcgtggaagaaagaagcttccgcgttctaccgcaaagacaaagcacgcgttagccgtcgtctgtcaatggagtttatgttatctcaggcgaacaagtttgcgaattatgaggcaatctggtttccgcaaaacatggattggcgtgggcgcgtgtacgctgtcccgatgttcaatcctcagggcaacgatatgacgaaaggcctgctgacctttgcgcaggagaaacccattggtgaagacggcttctattggctcaagattcatggcgcaaatacagctggagtggataaagtaccgtttccacaacgcatcaaatttgttgaggataaccatacgaatattatggaatgcgcgaaagcaccgctggaaaacacttggtgggcggaacaggactcgccgttctgttttctggcgttctgctttgagtatgctggcgtcatcaatagtggtctgtcgtacaactgtagcttgcctctggcatttgatggtagttgctccggcctgcaacatttctcagcgatgttacgcgacgaaattggcggcaaagctgtgaatctcctcccatctgcggaataccaggatatttatcgtatcgtcagcgacaaagttaacgagatgctgaaacaagatctgattaacggtacctctaccaccgtggaaacggtgactgataagaagacaggcgaaattacccaacgcacgaaatacgggaccaaagttatggcacagtggtggttagaacacggtgtgaatcgtggcgtcacgaaacgctcggttatgactttggtgtatgggagcaaagagtttggattccgcgatcaagtgctgagtgacaccattcaaccggcgatcgataacggcaaaggtgacatgtttctgaatccgaatcaggctgctggttacatggcgaaactgatctggaacgcagtgtccgggaccgtagtcgcagcagttgaggcgatgaactggctgaaaagtgcggcgaaattacttgctgctgaagtgaaggatcctaagacggatacagttctgcgtggccgctgcgcagtacattgggtgactcccgacggcttccctgtgtggcaggaatacaagaagcctattcagacgcgcttgaacctgatgttcctcggtcagttccgcttacagcctaccattaacaccaacaaagatagcgagattgatgcacacaaacaggagtctggtatcgctcctaactttgtacacagccaagacggtaaccaccttcgtatgactgtagtgtgggcacacgagaagtacggaatcgaatcttttgcactgattcacgactccttcggtaccattccggctgacgctgcgaacctgttcaaagcagtgcgcgaaactttcgttgacacatatgagtcttgtgatgtactggctgatttctacgaccagttcgctgaccagttgcacgagtctcaacgcgacaaaatgccagcacttccggctaaaggtaacttgaacctccgtgacatcttaaaatcggacttcgcgttcgcg

SEQ ID NO: 1104 - protein, 890 aa, synthetic construct
  REGION 1..890: note = Variant of RNA polymerase
MHHHHHHMNTINIAKNDFSDIELAAIPFNTLADHYGERLAREQLALEHESYEMGEARFRKMFERQLKAGEVADNAAAKPLITTLLPKMIARINDWFEEVKAKRGKRPTAFQFLQEIKPEAVAYITIKTTLACLTSEDNTTVQAVASAIGRAIEDEARFGRIRDLEAKHFKKNVEEQLNKRVGHVYKKAFMQVVEHDMLSKGLLGGEAWSSWHKEDSIHVGVRCIEMLIESTGMVSLHRQNAGVVGADSETIELAPEYAEAIATRAGALAGISPMFQPCVVPPKPWTGITGGGYWAAGRKPLQLVRTRSLAALRRYEEVSMPEVIKAVNIAQNTAWRINKKVLDVANTITQWQHCPVADVPAMDRGEMPARPLDIDTNEIALKAWKKEASAFYRKDKARVSRRLSMEFMLSQANKFANYEAIWFPQNMDWRGRVYAVPMFNPQGNDMTKGLLTFAQEKPIGEDGFYWLKIHGANTAGVDKVPFPQRIKFVEDNHTNIMECAKAPLENTWWAEQDSPFCFLAFCFEYAGVINSGLSYNCSLPLAFDGSCSGLQHFSAMLRDEIGGKAVNLLPSAEYQDIYRIVSDKVNEMLKQDLINGTSTTVETVTDKKTGEITQRTKYGTKVMAQWWLEHGVNRGVTKRSVMTLVYGSKEFGFRDQVLSDTIQPAIDNGKGDMFLNPNQAAGYMAKLIWNAVSGTVVAAVEAMNWLKSAAKLLAAEVKDPKTDTVLRGRCAVHWVTPDGFPVWQEYKKPIQTRLNLMFLGQFRLQPTINTNKDSEIDAHKQESGIAPNFVHSQDGNHLRMTVVWAHEKYGIESFALIHDSFGTIPADAANLFKAVRETFVDTYESCDVLADFYDQFADQLHESQRDKMPALPAKGNLNLRDILKSDFAFA

SEQ ID NO: 1105 - DNA, 2670 bp, synthetic construct
  misc_feature 1..2670: note = Variant of RNA polymerase
  source 1..2670: mol_type = other DNA
atgcaccatcaccatcaccatatgaacacgattaacattgctaagaacgacttctctgacatcgaactggctgctatcccgttcaacactctggctgaccattacggtgagcgtttagctcgcgaacagttggcccttgagcatgagtcttacgagatgggtgaagcacgcttccgcaagatgtttgagcgtcaacttaaagctggtgaggttgcggataacgctgccgccaagcctctcatcactaccctactccctaagatgattgcacgcatcaacgactggtttgaggaagtgaaagctaagcgcggcaagcgcccgacagccttccagttcctgcaagaaatcaagccggaagccgtagcgtacatcaccattaagaccactctggcttgcctaaccagtgcggacaatacaaccgttcaggctgtagcaagcgcaatcggtcgggccattgaggacgaggctcgcttcggtcgtatccgtgaccttgaagctaagcacttcaagaagaacgttgaggaacaactcaacaagcgcgtagggcacgtctacaagaaagcatttatgcaagttgtcgagcacgacatgctctctaagggtctactcggtggcgaggcgtggtcttcgtggcataaggaagactctattcatgtaggagtacgctgcatcgagatgctcattgagtcaaccggaatggttagcttacaccgccaaaatgctggcgtagtaggtcaagactctgagactatcgaactcgcacctgaatacgctgaggctatcgcaacccgtgcaggtgcgctggctggcatctctccgatgttccaaccttgcgtagttcctcctaagccgtggactggcattactggtggtggctattgggctgcggggcgcaaacccctgcagttagtacgtactcgcagtctggcggcgcttcgccgctatgaagaagtgtcgatgccggaggtcatcaaagcagtcaacattgcgcagaatacagcatggcgtattaacaagaaagttctcgacgtagcgaataccatcacccaatggcagcactgtccagtcgcggatgtgcctgcgatggatcgtggcgaaatgccagctcgtccgttggacatcgataccaacgagattgcacttaaagcgtggaagaaagaagcttccgcgttctaccgcaaagacaaagcacgcatgagccgtcgtctgctgatggagtttatgttatctcaggcgaacaagtttgcgaattatgaggcaatctggtttccgcaaaacatggattggcgtgggcgcgtgtacgctgtcccgatgttcaatcctcagggcaacgatatgacgaaaggcctgctgacctttgcgcaggagaaacccattggtgaagacggcttctattggctcaagattcatggcgcaaatacagctggagtggataaagtaccgtttccacaacgcatcaaatttgttgaggataaccatacgaatattatggaatgcgcgaaagcaccgctggaaaacacttggtgggcggaacaggactcgccgttccgctttctggcgttctgctttgagtatgctggcgtcatcaatagtggtctgtcgtacaactgtagcttgcctctggcatttgatggtagttgctccggcctgcaacatttctcagcgatgttacgcgacgaaattggcggcaaagctgtgaatctcctcccatctgcggaataccaggatatttatcgtatcgtcagcgacaaagttaacgagatgctgaaacaagatctgattaacggtacctctaccaccgtggaaacggtgactgataagaagacaggcgaaattacccaacgcacgaaatacgggaccaaagttatggcacagtggtggttagaacacggtgtgaatcgtggcgtcacgaaacgctcggttatgactttggtgtatgggagcaaagagtttggattccgcgatcaagtgctgagtgacaccattcaacctgcgatcgataacggcaaaggtgacatgtttctgaatccgaatcaggctgctggttacatggcgaaactgatctggaacgcagtgtccgggaccgtagtcgcagcagttgaggcgatgaactggctgaaaagtgcggcgaaattacttgctgctgaagtgaaggatcctaagacggatacagttctgcgtggccgctgcgcagtacattgggtgactcccgacggcttccctgtgtggcaggaatacaagaagcctattcagacgcgcttgaacctgatgttcctcggtcagttccgcttacagcctaccattaacaccaacaaagatagcgagattgatgcacacaaacaggagtctggtatcgctcctaactttgtacacagccaagacggtaaccaccttcgtatgactgtagtgtgggcacacgagaagtacggaatcgaatcttttgcactgattcacgactccttcggtaccattccggctgacgctgcgaacctgttcaaagcagtgcgcgaaactttcgttgacacatatgagtcttgtgatgtactggctgatttctacgaccagttcgctgaccagttgcacgagtctcaacgcgacaaaatgccagcacttccggctaaaggtaacttgaacctccgtgacatcttaaaatcggacttcgcgttcgcg

SEQ ID NO: 1106 - protein, 890 aa, synthetic construct
  REGION 1..890: note = Variant of RNA polymerase
MHHHHHHMNTINIAKNDFSDIELAAIPFNTLADHYGERLAREQLALEHESYEMGEARFRKMFERQLKAGEVADNAAAKPLITTLLPKMIARINDWFEEVKAKRGKRPTAFQFLQEIKPEAVAYITIKTTLACLTSADNTTVQAVASAIGRAIEDEARFGRIRDLEAKHFKKNVEEQLNKRVGHVYKKAFMQVVEHDMLSKGLLGGEAWSSWHKEDSIHVGVRCIEMLIESTGMVSLHRQNAGVVGQDSETIELAPEYAEAIATRAGALAGISPMFQPCVVPPKPWTGITGGGYWAAGRKPLQLVRTRSLAALRRYEEVSMPEVIKAVNIAQNTAWRINKKVLDVANTITQWQHCPVADVPAMDRGEMPARPLDIDTNEIALKAWKKEASAFYRKDKARMSRRLLMEFMLSQANKFANYEAIWFPQNMDWRGRVYAVPMFNPQGNDMTKGLLTFAQEKPIGEDGFYWLKIHGANTAGVDKVPFPQRIKFVEDNHTNIMECAKAPLENTWWAEQDSPFRFLAFCFEYAGVINSGLSYNCSLPLAFDGSCSGLQHFSAMLRDEIGGKAVNLLPSAEYQDIYRIVSDKVNEMLKQDLINGTSTTVETVTDKKTGEITQRTKYGTKVMAQWWLEHGVNRGVTKRSVMTLVYGSKEFGFRDQVLSDTIQPAIDNGKGDMFLNPNQAAGYMAKLIWNAVSGTVVAAVEAMNWLKSAAKLLAAEVKDPKTDTVLRGRCAVHWVTPDGFPVWQEYKKPIQTRLNLMFLGQFRLQPTINTNKDSEIDAHKQESGIAPNFVHSQDGNHLRMTVVWAHEKYGIESFALIHDSFGTIPADAANLFKAVRETFVDTYESCDVLADFYDQFADQLHESQRDKMPALPAKGNLNLRDILKSDFAFA

SEQ ID NO: 1107 - DNA, 2670 bp, synthetic construct
  misc_feature 1..2670: note = Variant of RNA polymerase
  source 1..2670: mol_type = other DNA
atgcaccatcaccatcaccatatgaacacgattaacattgctaagaacgacttctctgacatcgaactggctgctatcccgttcaacactctggctgaccattacggtgagcgtttagctcgcgaacagttggcccttgagcatgagtcttacgagatgggtgaagcacgcttccgcaagatgtttgagcgtcaacttaaagctggtgaggttgcggataacgctgccgccaagcctctcatcactaccctactccctaagatgattgcacgcatcaacgactggtttgaggaagtgaaagctaagcgcggcaagcgcccgacagccttccagttcctgcaagaaatcaagccggaagccgtagcgtacatcaccattaagaccactctggcttgcctaaccagtgcggacaatacaaccgttcaggctgtagcaagcgcaatcggtcgggccattgaggacgaggctcgcttcggtcgtatccgtgaccttgaagctaagcacttcaagaagaacgttgaggaacaactcaacaagcgcgtagggcacgtctacaagaaagcatttatgcaagttgtcgagcacgacatgctctctaagggtctactcggtggcgaggcgtggtcttcgtggcataaggaagactctattcatgtaggagtacgctgcatcgagatgctcattgagtcaaccggaatggttagcttacaccgccaaaatgctggcgtagtgggtgcagactctgagactatcgaactcgcacctgaatacgctgaggctatcgcaacccgtgcaggtgcgctggctggcatctctccgatgttccaaccttgcgtagttcctcctaagccgtggactggcattactggtggtggctattgggctgcggggcgcaaacccctgcagttagtacgtactcgcagtctggcggcgcttcgccgctatgaagaagtgtcgatgccggaggtcatcaaagcagtcaacattgcgcagaatacagcatggcgtattaacaaggaagttctcgacgtagcgaataccatcacccaatggcagcactgtccagtcgcggatgtgcctgcgatggatcgtggcgaaatgccagctcgtccgttggacatcgataccaacgagattgcacttaaagcgtggaagaaagaagcttccgcgttctaccgcaaagacaaagcacgcgttagccgtcgtctgtcaatggagtttatgttatctcaggcgaacaagtttgtcaattatgaggcaatctggtttccgcaaaacatggattggcgtgggcgcgtgtacgctgtcccgatgttcaatcctcagggcaacgatatgacgaaaggcctgctgacctttgcgcaggagaaacccattggtgaagacggcttctattggctcaagattcatggcgcaaatacagctggagtggataaagtaccgtttccacaacgcatcaaatttgttgaggataaccatacgaatattatggaatgcgcgaaagcaccgctggaaaacacttggtgggcggaacaggactcgccgttctgttttctggcgttctgctttgagtatgctggcgtcatcaatagtggtctgtcgtacaactgtagcttgcctctggcatttgatggtagttgctccggcctgcaacatttctcagcgatgttacgcgacgaaattggcggcaaagctgtgaatctcctcccatctgcggaataccaggatatttatcgtatcgtcagcgacaaagttaacgagatgctgaaacaagatctgattaacggtacctctaccaccgtggaaacggtgactgataagaagacaggcgaaattacccaacgcacgaaatacgggaccaaagttatggcacagtggtggttagaacacggtgtgaatcgtggcgtcacgaaacgctcggttatgactttggtgtatgggagcaaagagtttggattccgcgatcaagtgctgagtgacaccattcaaccggcgatcgataacggcaaaggtgacatgtttctgaatccgaatcaggctgctggttacatggcgaaactgatctggaacgcagtgtccgggaccgtagtcgcagcagttgaggcgatgaactggctgaaaagtgcggcgaaattacttgctgctgaagtgaaggatcctaagacggatacagttctgcgtggccgctgcgcagtacattgggtgactcccgacggcttccctgtgtggcaggaatacaagaagcctattcagacgcgcttgaacctgatgttcctcggtcagttccgcttacagcctaccattaacaccaacaaagatagcgagattgatgcacacaaacaggagtctggtatcgctcctaactttgtacacagccaagacggtaaccaccttcgtatgactgtagtgtgggcacacgagaagtacggaatcgaatcttttgcactgattcacgactccttcggtaccattccggctgacgctgcgaacctgttcaaagcagtgcgcgaaactttcgttgacacatatgagtcttgtgatgtactggctgatttctacgaccagttcgctgaccagttgcacgagtctcaacgcgacaaaatgccagcacttccggctaaaggtaacttgaacctccgtgacatcttaaaatcggacttcgcgttcgcg

SEQ ID NO: 1108 - protein, 890 aa, synthetic construct
  REGION 1..890: note = Variant of RNA polymerase
MHHHHHHMNTINIAKNDFSDIELAAIPFNTLADHYGERLAREQLALEHESYEMGEARFRKMFERQLKAGEVADNAAAKPLITTLLPKMIARINDWFEEVKAKRGKRPTAFQFLQEIKPEAVAYITIKTTLACLTSADNTTVQAVASAIGRAIEDEARFGRIRDLEAKHFKKNVEEQLNKRVGHVYKKAFMQVVEHDMLSKGLLGGEAWSSWHKEDSIHVGVRCIEMLIESTGMVSLHRQNAGVVGADSETIELAPEYAEAIATRAGALAGISPMFQPCVVPPKPWTGITGGGYWAAGRKPLQLVRTRSLAALRRYEEVSMPEVIKAVNIAQNTAWRINKEVLDVANTITQWQHCPVADVPAMDRGEMPARPLDIDTNEIALKAWKKEASAFYRKDKARVSRRLSMEFMLSQANKFVNYEAIWFPQNMDWRGRVYAVPMFNPQGNDMTKGLLTFAQEKPIGEDGFYWLKIHGANTAGVDKVPFPQRIKFVEDNHTNIMECAKAPLENTWWAEQDSPFCFLAFCFEYAGVINSGLSYNCSLPLAFDGSCSGLQHFSAMLRDEIGGKAVNLLPSAEYQDIYRIVSDKVNEMLKQDLINGTSTTVETVTDKKTGEITQRTKYGTKVMAQWWLEHGVNRGVTKRSVMTLVYGSKEFGFRDQVLSDTIQPAIDNGKGDMFLNPNQAAGYMAKLIWNAVSGTVVAAVEAMNWLKSAAKLLAAEVKDPKTDTVLRGRCAVHWVTPDGFPVWQEYKKPIQTRLNLMFLGQFRLQPTINTNKDSEIDAHKQESGIAPNFVHSQDGNHLRMTVVWAHEKYGIESFALIHDSFGTIPADAANLFKAVRETFVDTYESCDVLADFYDQFADQLHESQRDKMPALPAKGNLNLRDILKSDFAFA

SEQ ID NO: 1109 - DNA, 2670 bp, synthetic construct
  misc_feature 1..2670: note = Variant of RNA polymerase
  source 1..2670: mol_type = other DNA
atgcaccatcaccatcaccatatgaacacgattaacattgctaagaacgacttctctgacatcgaactggctgctatcccgttcaacactctggctgaccattacggtgagcgtttagctcgcgaacagttggcccttgagcatgagtcttacgagatgggtgaagcacgcttccgcaagatgtttgagcgtcaacttaaagctggtgaggttgcggataacgctgccgccaagcctctcatcactaccctactccctaagatgattgcacgcatcaacgactggtttgaggaagtgaaagctaagcgcggcaagcgcccgacagccttccagttcctgcaagaaatcaagccggaagccgtagcgtacatcaccattaagaccactctggcttgcctgaccagtgaggacaatacaaccgttcaggctgtagcaagcgcaatcggtcgggccattgaggacgaggctcgcttcggtcgtatccgtgaccttgaagctaagcacttcaagaagaacgttgaggaacaactcaacaagcgcgtagggcacgtctacaagaaagcatttatgcaagttgtcgagcacgacatgctctctaagggtctactcggtggcgaggcgtggtcttcgtggcataaggaagactctattcatgtaggagtacgctgcatcgagatgctcattgagtcaaccggaatggttagcttacaccgccaaaatgctggcgtagtgggtgcagactctgagactatcgaactcgcacctgaatacgctgaggctatcgcaacccgtgcaggtgcgctggctggcatctctccgatgttccaaccttgcgtagttcctcctaagccgtggactggcattactggtggtggctattgggctgcggggcgcaaacccctgcagttagtacgtactcgcagtctggcggcgcttcgccgctatgaagaagtgtcgatgccggaggtcatcaaagcagtcaacattgcgcagaatacagcatggcgtattaacaaggaagttctcgacgtagcgaataccatcacccaatggcagcactgtccagtcgcggatgtgcctgcgatggatcgcggcgaaatgccagctcgtccgttggacatcgataccaacgagattgcacttaaagcgtggaagaaagaagcttccgcgttctaccgcaaagacaaagcacgcgttagccgtcgtctgtcaatggagtttatgttatctcaggcgaacaagtttgcgaattatgaggcaatctggtttccgcaaaacatggattggcgtgggcgcgtgtacgctgtcccgatgttcaatcctcagggcaacgatatgacgaaaggcctgctgacctttgcgcaggagaaacccattggtgaagacggcttctattggctcaagattcatggcgcaaatacagctggagtggataaagtaccgtttccacaacgcatcaaatttgttgaggataaccatacgaatattatggaatgcgcgaaagcaccgctggaaaacacttggtgggcggaacaggactcgccgttctgttttctggcgttctgctttgagtatgctggcgtcatcaatagtggtctgtcgtacaactgtagcttgcctctggcatttgatggtagttgctccggcctgcaacatttctcagcgatgttacgcgacgaaattggcggcaaagctgtgaatctcctcccatctgcggaataccaggatatttatcgtatcgtcagcgacaaagttaacgagatgctgaaacaagatctgattaacggtacctctaccaccgtggaaacggtgactgataagaagacaggcgaaattacccaacgcacgaaatacgggaccaaagttatggcacagtggtggttagaacacggtgtgaatcgtggcgtcacgaaacgctcggttatgactttggtgtatgggagcaaagagtttggattccgcgatcaagtgctgagtgacaccattcaaccggcgatcgataacggcaaaggtgacatgtttctgaatccgaatcaggctgctggttacatggcgaaactgatctggaacgcagtgtccgggaccgtagtcgcagcagttgaggcgatgaactggctgaaaagtgcggcgaaattacttgctgctgaagtgaaggatcctaagacggatacagttctgcgtggccgctgcgcagtacattgggtgactcccgacggcttccctgtgtggcaggaatacaagaagcctattcagacgcgcttgaacctgatgttcctcggtcagttccgcttacagcctaccattaacaccaacaaagatagcgagattgatgcacacaaacaggagtctggtatcgctcctaactttgtacacagccaagacggtaaccaccttcgtatgactgtagtgtgggcacacgagaagtacggaatcgaatcttttgcactgattcacgactccttcggtaccattccggctgacgctgcgaacctgttcaaagcagtgcgcgaaactttcgttgacacatatgagtcttgtgatgtactggctgatttctacgaccagttcgctgaccagttgcacgagtctcaacgcgacaaaatgccagcacttccggctaaaggtaacttgaacctccgtgacatcttaaaatcggacttcgcgttcgcg

SEQ ID NO: 1110 - protein, 890 aa, synthetic construct
  REGION 1..890: note = Variant of RNA polymerase
MHHHHHHMNTINIAKNDFSDIELAAIPFNTLADHYGERLAREQLALEHESYEMGEARFRKMFERQLKAGEVADNAAAKPLITTLLPKMIARINDWFEEVKAKRGKRPTAFQFLQEIKPEAVAYITIKTTLACLTSEDNTTVQAVASAIGRAIEDEARFGRIRDLEAKHFKKNVEEQLNKRVGHVYKKAFMQVVEHDMLSKGLLGGEAWSSWHKEDSIHVGVRCIEMLIESTGMVSLHRQNAGVVGADSETIELAPEYAEAIATRAGALAGISPMFQPCVVPPKPWTGITGGGYWAAGRKPLQLVRTRSLAALRRYEEVSMPEVIKAVNIAQNTAWRINKEVLDVANTITQWQHCPVADVPAMDRGEMPARPLDIDTNEIALKAWKKEASAFYRKDKARVSRRLSMEFMLSQANKFANYEAIWFPQNMDWRGRVYAVPMFNPQGNDMTKGLLTFAQEKPIGEDGFYWLKIHGANTAGVDKVPFPQRIKFVEDNHTNIMECAKAPLENTWWAEQDSPFCFLAFCFEYAGVINSGLSYNCSLPLAFDGSCSGLQHFSAMLRDEIGGKAVNLLPSAEYQDIYRIVSDKVNEMLKQDLINGTSTTVETVTDKKTGEITQRTKYGTKVMAQWWLEHGVNRGVTKRSVMTLVYGSKEFGFRDQVLSDTIQPAIDNGKGDMFLNPNQAAGYMAKLIWNAVSGTVVAAVEAMNWLKSAAKLLAAEVKDPKTDTVLRGRCAVHWVTPDGFPVWQEYKKPIQTRLNLMFLGQFRLQPTINTNKDSEIDAHKQESGIAPNFVHSQDGNHLRMTVVWAHEKYGIESFALIHDSFGTIPADAANLFKAVRETFVDTYESCDVLADFYDQFADQLHESQRDKMPALPAKGNLNLRDILKSDFAFA

SEQ ID NO: 1111 - DNA, 2670 bp, synthetic construct
  misc_feature 1..2670: note = Variant of RNA polymerase
  source 1..2670: mol_type = other DNA
atgcaccatcaccatcaccatatgaacacgattaacattgctaagaacgacttctctgacatcgaactggctgctatcccgttcaacactctggctgaccattacggtgagcgtttagctcgcgaacagttggcccttgagcatgagtcttacgagatgggtgaagcacgcttccgcaagatgtttgagcgtcaacttaaagctggtgaggttgcggataacgctgccgccaagcctctcatcactaccctactccctaagatgattgcacgcatcaacgactggtttgaggaagtgaaagctaagcgcggcaagcgcccgacagccttccagttcctgcaagaaatcaagccggaagccgtagcgtacatcaccattaagaccactctggcttgcctaaccagtgcggacaatacaaccgttcaggctgtagcaagcgcaatcggtcgggccattgaggacgaggctcgcttcggtcgtatccgtgaccttgaagctaagcacttcaagaagaacgttgaggaacaactcaacaagcgcgtagggcacgtctacaagaaagcatttatgcaagttgtcgagcacgacatgctctctaagggtctactcggtggcgaggcgtggtcttcgtggcataaggaagactctattcatgtaggagtacgctgcatcgagatgctcattgagtcaaccggaatggttagcttacaccgccaaaatgctggcgtagtaggtcaagactctgagactatcgaactcgcacctgaatacgctgaggctatcgcaacccgtgcaggtgcgctggctggcatctctccgatgttccaaccttgcgtagttcctcctaagccgtggactggcattactggtggtggctattgggctgcggggcgcaaacccctgcagttagtacgtactcgcagtctggcggcgcttcgccgctatgaagaagtgtcgatgccggaggtcatcaaagcagtcaacattgcgcagaatacagcatggcgtattaacaagaaagttctcgacgtagcgaataccatcacccaatggcagcactgtccagtcgcggatgtgcctgcgatggatcgtggcgaaatgccagctcgtccgttggacatcgataccaacgagattgcacttaaagcgtggaagaaagaagcttccgcgttctaccgcaaagacaaagcacgcgttagccgtcgtctgtcaatggagtttatgttatctcaggcgaacaagtttgccaattatgaggcaatctggtttccgcaaaacatggattggcgtgggcgcgtgtacgctgtcccgatgttcaatcctcagggcaacgatatgacgaaaggcctgctgacctttgcgcaggagaaacccattggtgaagacggcttctattggctcaagattcatggcgcaaatacagctggagtggataaagtaccgtttccacaacgcatcaaatttgttgaggataaccatacgaatattatggaatgcgcgaaagcaccgctggaaaacacttggtgggcggaacaggactcgccgttccgctttctggcgttctgctttgagtatgctggcgtcatcaatagtggtctgtcgtacaactgtagcttgcctctggcatttgatggtagttgctccggcctgcaacatttctcagcgatgttacgcgacgaaattggcggcaaagctgtgaatctcctcccatctgcggaataccaggatatttatcgtatcgtcagcgacaaagttaacgagatgctgaaacaagatctgattaacggtacctctaccaccgtggaaacggtgactgataaaaagacaggcgaaattacccaacgcacgaaatacgggaccaaagttatggcacagtggtggttagaacacggtgtgaatcgtggcgtcacgaaacgctcggttatgactttggtgtatgggagcaaagagtttggattccgcgatcaagtgctgagtgacaccattcaaaaagcgatcgataacggcaaaggtgacatgtttctgaatccgaatcaggctgctggttacatggcgaaactgatctggaacgcagtgtccgggaccgtagtcgcagcagttgaggcgatgaactggctgaaaagtgcggcgaaattacttgctgctgaagtgaaggatcctaagacggatacagttctgcgtggccgctgcgcagtacattgggtgactcccgacggcttccctgtgtggcaggaatacaagaagcctattcgtacgcgcttgaacctgatgttcctcggtcagttccgcttacagcctaccattaacaccaacaaagatagcgagattgatgcacacaaacaggagtctggtatcgctcctaactttgtacacagccaagacggtaaccaccttcgtatgactgtagtgtgggcacacgagaagtacggaatcgaatcttttgcactgattcacgactccttcggtaccattccggctgacgctgcgaacctgttcaaagcagtgcgcgaaactttcgttgacacatatgagtcttgtgatgtactggctgatttctacgaccagattgctgaccagttgcacgagtctcaacgcgacaaaatgccagcacttccggctaaaggtaacttgaacctccgtgacatcttaaaatcggacttcgcgttcgcg

SEQ ID NO: 1112 - protein, 890 aa, synthetic construct
  REGION 1..890: note = Variant of RNA polymerase
MHHHHHHMNTINIAKNDFSDIELAAIPFNTLADHYGERLAREQLALEHESYEMGEARFRKMFERQLKAGEVADNAAAKPLITTLLPKMIARINDWFEEVKAKRGKRPTAFQFLQEIKPEAVAYITIKTTLACLTSADNTTVQAVASAIGRAIEDEARFGRIRDLEAKHFKKNVEEQLNKRVGHVYKKAFMQVVEHDMLSKGLLGGEAWSSWHKEDSIHVGVRCIEMLIESTGMVSLHRQNAGVVGQDSETIELAPEYAEAIATRAGALAGISPMFQPCVVPPKPWTGITGGGYWAAGRKPLQLVRTRSLAALRRYEEVSMPEVIKAVNIAQNTAWRINKKVLDVANTITQWQHCPVADVPAMDRGEMPARPLDIDTNEIALKAWKKEASAFYRKDKARVSRRLSMEFMLSQANKFANYEAIWFPQNMDWRGRVYAVPMFNPQGNDMTKGLLTFAQEKPIGEDGFYWLKIHGANTAGVDKVPFPQRIKFVEDNHTNIMECAKAPLENTWWAEQDSPFRFLAFCFEYAGVINSGLSYNCSLPLAFDGSCSGLQHFSAMLRDEIGGKAVNLLPSAEYQDIYRIVSDKVNEMLKQDLINGTSTTVETVTDKKTGEITQRTKYGTKVMAQWWLEHGVNRGVTKRSVMTLVYGSKEFGFRDQVLSDTIQKAIDNGKGDMFLNPNQAAGYMAKLIWNAVSGTVVAAVEAMNWLKSAAKLLAAEVKDPKTDTVLRGRCAVHWVTPDGFPVWQEYKKPIRTRLNLMFLGQFRLQPTINTNKDSEIDAHKQESGIAPNFVHSQDGNHLRMTVVWAHEKYGIESFALIHDSFGTIPADAANLFKAVRETFVDTYESCDVLADFYDQIADQLHESQRDKMPALPAKGNLNLRDILKSDFAFA

SEQ ID NO: 1113 - DNA, 2670 bp, synthetic construct
  misc_feature 1..2670: note = Variant of RNA polymerase
  source 1..2670: mol_type = other DNA
atgcaccatcaccatcaccatatgaacacgattaacattgctaagaacgacttctctgacatcgaactggctgctatcccgttcaacactctggctgaccattacggtgagcgtttagctcgcgaacagttggcccttgagcatgagtcttacgagatgggtgaagcacgcttccgcaagatgtttgagcgtcaacttaaagctggtgaggttgcggataacgctgccgccaagcctctcatcactaccctactccctaagatgattgcacgcatcaacgactggtttgaggaagtgaaagctaagcgcggcaagcgcccgacagccttccagttcctgcaagaaatcaagccggaagccgtagcgtacatcaccattaagaccactctggcttgcctaaccagtgcggacaatacaaccgttcaggctgtagcaagcgcaatcggtcgggccattgaggacgaggctcgcttcggtcgtatccgtgaccttgaagctaagcacttcaagaagaacgttgaggaacaactcaacaagcgcgtagggcacgtctacaagaaagcatttatgcaagttgtcgagcacgacatgctctctaagggtctactcggtggcgaggcgtggtcttcgtggcataaggaagactctattcatgtaggagtacgctgcatcgagatgctcattgagtcaaccggaatggttagcttacaccgccaaaatgctggcgtagtgggtcaggactctgagactatcgaactcgcacctgaatacgctgaggctatcgcaacccgtgcaggtgcgctggctggcatctctccgatgttccaaccttgcgtagttcctcctaagccgtggactggcattactggtggtggctattgggctgcggggcgcaaacccctgcagttagtacgtactcgcagtctggcggcgcttcgccgctatgaagaagtgtcgatgccggaggtcatcaaagcagtcaacattgcgcagaatacagcatggcgtattaacaagaaagttctcgacgtagcgaataccatcacccaatggcagcactgtccagtcgcggatgtgcctgcgatggatcgtggcgaaatgccagctcgtccgttggacatcgataccaacgagattgcacttaaagcgtggaagaaagaagcttccgcgttctaccgcaaagacaaagcacgcgtgagccgtcgtctgctgatggagtttatgttatctcaggcgaacaagtttgcgaattatgaggcaatctggtttccgcaaaacatggattggcgtgggcgcgtgtacgctgtcccgatgttcaatcctcagggcaacgatatgacgaaaggcctgctgacctttgcgcaggagaaacccattggtgaagacggcttctattggctcaagattcatggcgcaaatacagctggagtggataaagtaccgtttccacaacgcatcaaatttgttgaggataaccatacgaatattatggaatgcgcgaaagcaccgctggaaaacacttggtgggcggaacaggactcgccgttctgctttctggcgttctgctttgagtatgctggcgtcatcaatagtggtctgtcgtacaactgtagcttgcctctggcatttgatggtagttgctccggcctgcaacatttctcagcgatgttacgcgacgaaattggcggcaaagctgtgaatctcctcccatctgcggaataccaggatatttatcgtatcgtcagcgacaaagttaacgagatgctgaaacaagatctgattaacggtacctctaccaccgtggaaacggtgactgataaaaagacaggcgaaattacccaacgcacgaaatacgggaccaaagttatggcacagtggtggttagaacacggtgtgaatcgtggcgtcacgaaacgcccggttatgactttggtgtatgggagcaaagagtttggattccgcgatcaagtgctgagtgacaccattcaatgggcgatcgataacggcaaaggtgacatgtttctgaatccgaatcaggctgctggttacatggcgaaactgatctggaacgcagtgtccgggaccgtagtcgcagcagttgaggcgatgaactggctgaaaagtgcggcgaaattacttgctgctgaagtgaaggatcctaagacggatacagttctgcgtggccgctgcgcagtacattgggtgactcccgacggcttccctgtgtggcaggaatacaagaagcctattcagacgcgcttgaacctgatgttcctcggtcagttccgcttacagcctaccattaacaccaacaaagatagcgagattgatgcacacaaacaggagtctggtatcgctcctaactttgtacacagccaagacggtaaccaccttcgtatgactgtagtgtgggcacacgagaagtacggaatcgaatcttttgcactgattcacgactccttcggtaccattccggctgacgctgcgaacctgttcaaagcagtgcgcgaaactttcgttgacacatatgagtcttgtgatgtactggctgatttctacgaccagttcgctgaccagttgcacgagtctcaacgcgacaaaatgccagcacttccggctaaaggtaacttgaacctccgtgacatcttaaaatcggacttcgcgttcgcg

SEQ ID NO: 1114 - protein, 890 aa, synthetic construct
  REGION 1..890: note = Variant of RNA polymerase
MHHHHHHMNTINIAKNDFSDIELAAIPFNTLADHYGERLAREQLALEHESYEMGEARFRKMFERQLKAGEVADNAAAKPLITTLLPKMIARINDWFEEVKAKRGKRPTAFQFLQEIKPEAVAYITIKTTLACLTSADNTTVQAVASAIGRAIEDEARFGRIRDLEAKHFKKNVEEQLNKRVGHVYKKAFMQVVEHDMLSKGLLGGEAWSSWHKEDSIHVGVRCIEMLIESTGMVSLHRQNAGVVGQDSETIELAPEYAEAIATRAGALAGISPMFQPCVVPPKPWTGITGGGYWAAGRKPLQLVRTRSLAALRRYEEVSMPEVIKAVNIAQNTAWRINKKVLDVANTITQWQHCPVADVPAMDRGEMPARPLDIDTNEIALKAWKKEASAFYRKDKARVSRRLLMEFMLSQANKFANYEAIWFPQNMDWRGRVYAVPMFNPQGNDMTKGLLTFAQEKPIGEDGFYWLKIHGANTAGVDKVPFPQRIKFVEDNHTNIMECAKAPLENTWWAEQDSPFCFLAFCFEYAGVINSGLSYNCSLPLAFDGSCSGLQHFSAMLRDEIGGKAVNLLPSAEYQDIYRIVSDKVNEMLKQDLINGTSTTVETVTDKKTGEITQRTKYGTKVMAQWWLEHGVNRGVTKRPVMTLVYGSKEFGFRDQVLSDTIQWAIDNGKGDMFLNPNQAAGYMAKLIWNAVSGTVVAAVEAMNWLKSAAKLLAAEVKDPKTDTVLRGRCAVHWVTPDGFPVWQEYKKPIQTRLNLMFLGQFRLQPTINTNKDSEIDAHKQESGIAPNFVHSQDGNHLRMTVVWAHEKYGIESFALIHDSFGTIPADAANLFKAVRETFVDTYESCDVLADFYDQFADQLHESQRDKMPALPAKGNLNLRDILKSDFAFA

SEQ ID NO: 1115 - DNA, 2670 bp, synthetic construct
  misc_feature 1..2670: note = Variant of RNA polymerase
  source 1..2670: mol_type = other DNA
atgcaccatcaccatcaccatatgaacacgattaacattgctaagaacgacttctctgacatcgaactggctgctatcccgttcaacactctggctgaccattacggtgagcgtttagctcgcgaacagttggcccttgagcatgagtcttacgagatgggtgaagcacgcttccgcaagatgtttgagcgtcaacttaaagctggtgaggttgcggataacgctgccgccaagcctctcatcactaccctactccctaagatgattgcacgcatcaacgactggtttgaggaagtgaaagctaagcgcggcaagcgcccgacagccttccagttcctgcaagaaatcaagccggaagccgtagcgtacatcaccattaagaccactctggcttgcctaaccagtgcggacaatacaaccgttcaggctgtagcaagcgcaatcggtcgggccattgaggacgaggctcgcttcggtcgtatccgtgaccttgaagctaagcacttcaagaagaacgttgaggaacaactcaacaagcgcgtagggcacgtctacaagaaagcatttatgcaagttgtcgagcacgacatgctctctaagggtctactcggtggcgaggcgtggtcttcgtggcataaggaagactctattcatgtaggagtacgctgcatcgagatgctcattgagtcaaccggaatggttagcttacaccgccaaaatgctggcgtagtgggtgcagactctgagactatcgaactcgcacctgaatacgctgaggctatcgcaacccgtgcaggtgcgctggctggcatctctccgatgttccaaccttgcgtagttcctcctaagccgtggactggcattactggtggtggctattgggctgcggggcgcaaacccctgcagttagtacgtactcgcagtctggcggcgcttcgccgctatgaagaagtgtcgatgccggaggtcatcaaagcagtcaacattgcgcagaatacagcatggcgtattaacaagaaagttctcgacgtagcgaataccatcacccaatggcagcactgtccagtcgcggatgtgcctgcgatggatcgtggcgaaatgccagctcgtccgttggacatcgataccaacgagattgcacttaaagcgtggaagaaagaagcttccgcgttctaccgcaaagacaaagcacgcgttagccgtcgtctgtcaatggagtttatgttatctcaggcgaacaagtttgcgaattatgaggcaatctggtttccgcaaaacatggattggcgtgggcgcgtgtacgctgtcccgatgttcaatcctcagggcaacgatatgacgaaaggcctgctgacctttgcgcaggagaaacccattggtgaagacggcttctattggctcaagattcatggcgcaaatacagctggagtggataaagtaccgtttccacaacgcatcaaatttgttgaggataaccatacgaatattatggaatgcgcgaaagcaccgctggaaaacacttggtgggcggaacaggactcgccgttctattttctggcgttctgctttgagtatgctggcgtcatcaatagtggtctgtcgtacaactgtagcttgcctctggcatttgatggtagttgctccggcctgcaacatttctcagcgatgttacgcgacgaaattggcggcaaagctgtgaatctcctcccatctgcggaataccaggatatttatcgtatcgtcagcgacaaagttaacgagatgctgaaacaagatctgattaacggtacctctaccaccgtggaaacggtgactgataagaagacaggcgaaattacccaacgcacgaaatacgggaccaaagttatggcacagtggtggttagaacacggtgtgaatcgtggcgtcacgaaacgctcggttatgactttggtgtatgggagcaaagagtttggattccgcgatcaagtgctgagtgacaccattcaaccggcgatcgataacggcaaaggtgacatgtttctgaatccgaatcaggctgctggttacatggcgaaactgatctggaacgcagtgtccgggaccgtagtcgcagcagttgaggcgatgaactggctgaaaagtgcggcgaaattacttgctgctgaagtgaaggatcctaagacggatacagttctgcgtggccgctgcgcagtacattgggtgactcccgacggcttccctgtgtggcaggaatacaagaagcctattcgtacgcgcttgaacctgatgttcctcggtcagttccgcttacagcctaccattaacaccaacaaagatagcgagattgatgcacgcaaacaggggtctggtatcgctcctaactttgtacacagccaagacggtaaccaccttcgtatgactgtagtgtgggcacacgagaagtacggaatcgaatcttttgcactgattcacgactccttcggtaccattccggctgacgctgcgaacctgttcaaagcagtgcgcgaaactttcgttgacacatatgagtcttgtgatgtactggctgatttctacgaccagattgctgaccagttgcacgagtctcaacgcgacaaaatgccagcacttccggctaaaggtaacttgaacctccgtgacatcttaaaatcggacttcgcgttcgcg

SEQ ID NO: 1116 - protein, 890 aa, synthetic construct
  REGION 1..890: note = Variant of RNA polymerase
MHHHHHHMNTINIAKNDFSDIELAAIPFNTLADHYGERLAREQLALEHESYEMGEARFRKMFERQLKAGEVADNAAAKPLITTLLPKMIARINDWFEEVKAKRGKRPTAFQFLQEIKPEAVAYITIKTTLACLTSADNTTVQAVASAIGRAIEDEARFGRIRDLEAKHFKKNVEEQLNKRVGHVYKKAFMQVVEHDMLSKGLLGGEAWSSWHKEDSIHVGVRCIEMLIESTGMVSLHRQNAGVVGADSETIELAPEYAEAIATRAGALAGISPMFQPCVVPPKPWTGITGGGYWAAGRKPLQLVRTRSLAALRRYEEVSMPEVIKAVNIAQNTAWRINKKVLDVANTITQWQHCPVADVPAMDRGEMPARPLDIDTNEIALKAWKKEASAFYRKDKARVSRRLSMEFMLSQANKFANYEAIWFPQNMDWRGRVYAVPMFNPQGNDMTKGLLTFAQEKPIGEDGFYWLKIHGANTAGVDKVPFPQRIKFVEDNHTNIMECAKAPLENTWWAEQDSPFYFLAFCFEYAGVINSGLSYNCSLPLAFDGSCSGLQHFSAMLRDEIGGKAVNLLPSAEYQDIYRIVSDKVNEMLKQDLINGTSTTVETVTDKKTGEITQRTKYGTKVMAQWWLEHGVNRGVTKRSVMTLVYGSKEFGFRDQVLSDTIQPAIDNGKGDMFLNPNQAAGYMAKLIWNAVSGTVVAAVEAMNWLKSAAKLLAAEVKDPKTDTVLRGRCAVHWVTPDGFPVWQEYKKPIRTRLNLMFLGQFRLQPTINTNKDSEIDARKQGSGIAPNFVHSQDGNHLRMTVVWAHEKYGIESFALIHDSFGTIPADAANLFKAVRETFVDTYESCDVLADFYDQIADQLHESQRDKMPALPAKGNLNLRDILKSDFAFA

SEQ ID NO: 1117 - DNA, 2670 bp, synthetic construct
  misc_feature 1..2670: note = Variant of RNA polymerase
  source 1..2670: mol_type = other DNA
atgcaccatcaccatcaccatatgaacacgattaacattgctaagaacgacttctctgacatcgaactggctgctatcccgttcaacactctggctgaccattacggtgagcgtttagctcgcgaacagttggcccttgagcatgagtcttacgagatgggtgaagcacgcttccgcaagatgtttgagcgtcaacttaaagctggtgaggttgcggataacgctgccgccaagcctctcatcactaccctactccctaagatgattgcacgcatcaacgactggtttgaggaagtgaaagctaagcgcggcaagcgcccgacagccttccagttcctgcaagaaatcaagccggaagccgtagcgtacatcaccattaagaccactctggcttgcctaaccagtgcggacaatacaaccgttcaggctgtagcaagcgcaatcggtcgggccattgaggacgaggctcgcttcggtcgtatccgtgaccttgaagctaagcacttcaagaagaacgttgaggaacaactcaacaagcgcgtagggcacgtctacaagaaagcatttatgcaagttgtcgagcacgacatgctctctaagggtctactcggtggcgaggcgtggtcttcgtggcataaggaagactctattcatgtaggagtacgctgcatcgagatgctcattgagtcaaccggaatggttagcttacaccgccaaaatgctggcgtagtaggtcaagactctgagactatcgaactcgcacctgaatacgctgaggctatcgcaacccgtgcaggtgcgctggctggcatctctccgatgttccaaccttgcgtagttcctcctaagccgtggactggcattactggtggtggctattgggctgcggggcgcaaacccctgcagttagtacgtactcgcagtctggcggcgcttcgccgctatgaagaagtgtcgatgccggaggtcatcaaagcagtcaacattgcgcagaatacagcatggcgtattaacaagaaagttctcgacgtagcgaataccatcacccaatggcagcactgtccagtcgcggatgtgcctgcgatggatcgtggcgaaatgccagctcgtccgttggacatcgataccaacgagattgcacttaaagcgtggaagaaagaagcttccgcgttctaccgcaaagacaaagcacgcatgagccgtcgtctgtcgatggagtttatgttatctcaggcgaacaagtttgcgaattatgaggcaatctggtttccgcaaaacatggattggcgtgggcgcgtgtacgctgtcccgatgttcaatcctcagggcaacgatatgacgaaaggcctgctgacctttgcgcaggagaaacccattggtgaagacggcttctattggctcaagattcatggcgcaaatacagctggagtggataaagtaccgtttccacaacgcatcaaatttgttgaggataaccatacgaatattatggaatgcgcgaaagcaccgctggaaaacacttggtgggcggaacaggactcgccgttccgctttctggcgttctgctttgagtatgctggcgtcatcaatagtggtctgtcgtacaactgtagcttgcctctggcatttgatggtagttgctccggcctgcaacatttctcagcgatgttacgcgacgaaattggcggcaaagctgtgaatctcctcccatctgcggaataccaggatatttatcgtatcgtcagcgacaaagttaacgagatgctgaaacaagatctgattaacggtacctctaccaccgtggaaacggtgactgataaaaagacaggcgaaattacccaacgcacgaaatacgggaccaaagttatggcacagtggtggttagaacacggtgtgaatcgtggcgtcacgaaacgctcggttatgactttggtgtatgggagcaaagagtttggattccgcgatcaagtgctgagtgacaccattcaaaaagcgatcgataacggcaaaggtgacatgtttctgaatccgaatcaggctgctggttacatggcgaaactgatctggaacgcagtgtccgggaccgtagtcgcagcagttgaggcgatgaactggctgaaaagtgcggcgaaattacttgctgctgaagtgaaggatcctaagacggatacagttctgcgtggccgctgcgcagtacattgggtgactcccgacggcttccctgtgtggcaggaatacaagaagcctattcagacgcgcttgaacctgatgttcctcggtcagttccgcttacagcctaccattaacaccaacaaagatagcgagattgatgcacacaaacaggagtctggtatcgctcctaactttgtacacagccaagacggtaaccaccttcgtatgactgtagtgtgggcacacgagaagtacggaatcgaatcttttgcactgattcacgactccttcggtaccattccggctgacgctgcgaacctgttcaaagcagtgcgcgaaactttcgttgacacatatgagtcttgtgatgtactggctgatttctacgaccagattgctgaccagttgcacgagtctcaacgcgacaaaatgccagcacttccggctaaaggtaacttgaacctccgtgacatcttaaaatcggacttcgcgttcgcg

SEQ ID NO: 1118 - protein, 890 aa, synthetic construct
  REGION 1..890: note = Variant of RNA polymerase
MHHHHHHMNTINIAKNDFSDIELAAIPFNTLADHYGERLAREQLALEHESYEMGEARFRKMFERQLKAGEVADNAAAKPLITTLLPKMIARINDWFEEVKAKRGKRPTAFQFLQEIKPEAVAYITIKTTLACLTSADNTTVQAVASAIGRAIEDEARFGRIRDLEAKHFKKNVEEQLNKRVGHVYKKAFMQVVEHDMLSKGLLGGEAWSSWHKEDSIHVGVRCIEMLIESTGMVSLHRQNAGVVGQDSETIELAPEYAEAIATRAGALAGISPMFQPCVVPPKPWTGITGGGYWAAGRKPLQLVRTRSLAALRRYEEVSMPEVIKAVNIAQNTAWRINKKVLDVANTITQWQHCPVADVPAMDRGEMPARPLDIDTNEIALKAWKKEASAFYRKDKARMSRRLSMEFMLSQANKFANYEAIWFPQNMDWRGRVYAVPMFNPQGNDMTKGLLTFAQEKPIGEDGFYWLKIHGANTAGVDKVPFPQRIKFVEDNHTNIMECAKAPLENTWWAEQDSPFRFLAFCFEYAGVINSGLSYNCSLPLAFDGSCSGLQHFSAMLRDEIGGKAVNLLPSAEYQDIYRIVSDKVNEMLKQDLINGTSTTVETVTDKKTGEITQRTKYGTKVMAQWWLEHGVNRGVTKRSVMTLVYGSKEFGFRDQVLSDTIQKAIDNGKGDMFLNPNQAAGYMAKLIWNAVSGTVVAAVEAMNWLKSAAKLLAAEVKDPKTDTVLRGRCAVHWVTPDGFPVWQEYKKPIQTRLNLMFLGQFRLQPTINTNKDSEIDAHKQESGIAPNFVHSQDGNHLRMTVVWAHEKYGIESFALIHDSFGTIPADAANLFKAVRETFVDTYESCDVLADFYDQIADQLHESQRDKMPALPAKGNLNLRDILKSDFAFA

SEQ ID NO: 1119 - DNA, 2670 bp, synthetic construct
  misc_feature 1..2670: note = Variant of RNA polymerase
  source 1..2670: mol_type = other DNA
atgcaccatcaccatcaccatatgaacacgattaacattgctaagaacgacttctctgacatcgaactggctgctatcccgttcaacactctggctgaccattacggtgagcgtttagctcgcgaacagttggcccttgagcatgagtcttacgagatgggtgaagcacgcttccgcaagatgtttgagcgtcaacttaaagctggtgaggttgcggataacgctgccgccaagcctctcatcactaccctactccctaagatgattgcacgcatcaacgactggtttgaggaagtgaaagctaagcgcggcaagcgcccgacagccttccagttcctgcaagaaatcaagccggaagccgtagcgtacatcaccattaagaccactctggcttgcctaaccagtgcggacaatacaaccgttcaggctgtagcaagcgcaatcggtcgggccattgaggacgaggctcgcttcggtcgtatccgtgaccttgaagctaagcacttcaagaagaacgttgaggaacaactcaacaagcgcgtagggcacgtctacaagaaagcatttatgcaagttgtcgagcacgacatgctctctaagggtctactcggtggcgaggcgtggtcttcgtggcataaggaagactctattcatgtaggagtacgctgcatcgagatgctcattgagtcaaccggaatggttagcttacaccgccaaaatgctggcgtagtaggtcaagactctgagactatcgaactcgcacctgaatacgctgaggctatcgcaacccgtgcaggtgcgctggctggcatctctccgatgttccaaccttgcgtagttcctcctaagccgtggactggcattactggtggtggctattgggctgcggggcgcaaacccctgcagttagtacgtactcgcagtctggcggcgcttcgccgctatgaagaagtgtcgatgccggaggtcatcaaagcagtcaacattgcgcagaatacagcatggcgtattaacaagaaagttctcgacgtagcgaataccatcacccaatggcagcactgtccagtcgcggatgtgcctgcgatggatcgtggcgaaatgccagctcgtccgttggacatcgataccaacgagattgcacttaaagcgtggaagaaagaagcttccgcgttctaccgcaaagacaaagcacgcgttagccgtcgtctgtcaatggagtttatgttatctcaggcgaacaagtttgcgaattatgaggcaatctggtttccgcaaaacatggattggcgtgggcgcgtgtacgctgtcccgatgttcaatcctcagggcaacgatatgacgaaaggcctgctgacctttgcgcaggagaaacccattggtgaagacggcttctattggctcaagattcatggcgcaaatacagctggagtggataaagtaccgtttccacaacgcatcaaatttgttgaggataaccatacgaatattatggaatgcgcgaaagcaccgctggaaaacacttggtgggcggaacaggactcgccgttccgctttctggcgttctgctttgagtatgctggcgtcatcaatagtggtctgtcgtacaactgtagcttgcctctggcatttgatggtagttgctccggcctgcaacatttctcagcgatgttacgcgacgaaattggcggcaaagctgtgaatctcctcccatctgcggaataccaggatatttatcgtatcgtcagcgacaaagttaacgagatgctgaaacaagatctgattaacggtacctctaccaccgtggaaacggtgactgataaaaagacaggcgaaattacccaacgcacgaaatacgggaccaaagttatggcacagtggtggttagaacacggtgtgaatcgtggcgtcacgaaacgctcggttatgactttggtgtatgggagcaaagagtttggattccgcgatcaagtgctgagtgacaccattcaacgtgcgatcgataacggcaaaggtgacatgtttctgaatccgaatcaggctgctggttacatggcgaaactgatctggaacgcagtgtccgggaccgtagtcgcagcagttgaggcgatgaactggctgaaaagtgcggcgaaattacttgctgctgaagtgaaggatcagaagacggatacagttctgcgtggccgctgcgcagtacattgggtgactcccgacggcttccctgtgtggcaggaatacaagaagcctattcagacgcgcttgaacctgatgttcctcggtcagttccgcttacagcctaccattaacaccaacaaagatagcgagattgatgcacacaaacaggagtctggtatcgctcctaactttgtacacagccaagacggtaaccaccttcgtatgactgtagtgtgggcacacgagaagtacggaatcgaatcttttgcactgattcacgactccttcggtaccattccggctgacgctgcgaacctgttcaaagcagtgcgcgaaactttcgttgacacatatgagtcttgtgatgtactggctgatttctacgaccagtttgctgaccagttgcacgagtctcaacgcgacaaaatgccagcacttccggctaaaggtaacttgaacctccgtgacatcttaaaatcggacttcgcgttcgcg

SEQ ID NO: 1120 - protein, 890 aa, synthetic construct
  REGION 1..890: note = Variant of RNA polymerase
MHHHHHHMNTINIAKNDFSDIELAAIPFNTLADHYGERLAREQLALEHESYEMGEARFRKMFERQLKAGEVADNAAAKPLITTLLPKMIARINDWFEEVKAKRGKRPTAFQFLQEIKPEAVAYITIKTTLACLTSADNTTVQAVASAIGRAIEDEARFGRIRDLEAKHFKKNVEEQLNKRVGHVYKKAFMQVVEHDMLSKGLLGGEAWSSWHKEDSIHVGVRCIEMLIESTGMVSLHRQNAGVVGQDSETIELAPEYAEAIATRAGALAGISPMFQPCVVPPKPWTGITGGGYWAAGRKPLQLVRTRSLAALRRYEEVSMPEVIKAVNIAQNTAWRINKKVLDVANTITQWQHCPVADVPAMDRGEMPARPLDIDTNEIALKAWKKEASAFYRKDKARVSRRLSMEFMLSQANKFANYEAIWFPQNMDWRGRVYAVPMFNPQGNDMTKGLLTFAQEKPIGEDGFYWLKIHGANTAGVDKVPFPQRIKFVEDNHTNIMECAKAPLENTWWAEQDSPFRFLAFCFEYAGVINSGLSYNCSLPLAFDGSCSGLQHFSAMLRDEIGGKAVNLLPSAEYQDIYRIVSDKVNEMLKQDLINGTSTTVETVTDKKTGEITQRTKYGTKVMAQWWLEHGVNRGVTKRSVMTLVYGSKEFGFRDQVLSDTIQRAIDNGKGDMFLNPNQAAGYMAKLIWNAVSGTVVAAVEAMNWLKSAAKLLAAEVKDQKTDTVLRGRCAVHWVTPDGFPVWQEYKKPIQTRLNLMFLGQFRLQPTINTNKDSEIDAHKQESGIAPNFVHSQDGNHLRMTVVWAHEKYGIESFALIHDSFGTIPADAANLFKAVRETFVDTYESCDVLADFYDQFADQLHESQRDKMPALPAKGNLNLRDILKSDFAFA

SEQ ID NO: 1121 - DNA, 2670 bp, synthetic construct
  misc_feature 1..2670: note = Variant of RNA polymerase
  source 1..2670: mol_type = other DNA
atgcaccatcaccatcaccatatgaacacgattaacattgctaagaacgacttctctgacatcgaactggctgctatcccgttcaacactctggctgaccattacggtgagcgtttagctcgcgaacagttggcccttgagcatgagtcttacgagatgggtgaagcacgcttccgcaagatgtttgagcgtcaacttaaagctggtgaggttgcggataacgctgccgccaagcctctcatcactaccctactccctaagatgattgcacgcatcaacgactggtttgaggaagtgaaagctaagcgcggcaagcgcccgacagccttccagttcctgcaagaaatcaagccggaagccgtagcgtacatcaccattaagaccactctggcttgcctaaccagtgcggacaatacaaccgttcaggctgtagcaagcgcaatcggtcgggccattgaggacgaggctcgcttcggtcgtatccgtgaccttgaagctaagcacttcaagaagaacgttgaggaacaactcaacaagcgcgtagggcacgtctacaagaaagcatttatgcaagttgtcgagcacgacatgctctctaagggtctactcggtggcgaggcgtggtcttcgtggcataaggaagactctattcatgtaggagtacgctgcatcgagatgctcattgagtcaaccggaatggttagcttacaccgccaaaatgctggcgtagtaggtcaagactctgagactatcgaactcgcacctgaatacgctgaggctatcgcaacccgtgcaggtgcgctggctggcatctctccgatgttccaaccttgcgtagttcctcctaagccgtggactggcattactggtggtggctattgggctgcggggcgcaaacccctgcagttagtacgtactcgcagtctggcggcgcttcgccgctatgaagaagtgtcgatgccggaggtcatcaaagcagtcaacattgcgcagaatacagcatggcgtattaacaagaaagttctcgacgtagcgaataccatcacccaatggcagcactgtccagtcgcggatgtgcctgcgatggatcgtggcgaaatgccagctcgtccgttggacatcgataccaacgagattgcacttaaagcgtggaagaaagaagcttccgcgttctaccgcaaagacaaagcacgcgtgagccgtcgtctgctgatggagtttatgttatctcaggcgaacaagtttgcgaattatgaggcaatctggtttccgcaaaacatggattggcgtgggcgcgtgtacgctgtcccgatgttcaatcctcagggcaacgatatgacgaaaggcctgctgacctttgcgcaggagaaacccattggtgaagacggcttctattggctcaagattcatggcgcaaatacagctggagtggataaagtaccgtttccacaacgcatcaaatttgttgaggataaccatacgaatattatggaatgcgcgaaagcaccgctggaaaacacttggtgggcggaacaggactcgccgttccgctttctggcgttctgctttgagtatgctggcgtcatcaatagtggtctgtcgtacaactgtagcttgcctctggcatttgatggtagttgctccggcctgcaacatttctcagcgatgttacgcgacgaaattggcggcaaagctgtgaatctcctcccatctgcggaataccaggatatttatcgtatcgtcagcgacaaagttaacgagatgctgaaacaagatctgattaacggtacctctaccaccgtggaaacggtgactgataagaagacaggcgaaattacccaacgcacgaaatacgggaccaaagttatggcacagtggtggttagaacacggtgtgaatcgtggcgtcacgaaacgctcggttatgactttggtgtatgggagcaaagagtttggattccgcgatcaagtgctgagtgacaccattcaaaaagcgatcgataacggcaaaggtgacatgtttctgaatccgaatcaggctgctggttacatggcgaaactgatctggaacgcagtgtccgggaccgtagtcgcagcagttgaggcgatgaactggctgaaaagtgcggcgaaattacttgctgctgaagtgaaggatcgtaagacggatacagttctgcgtggccgctgcgcagtacattgggtgactcccgacggcttccctgtgtggcaggaatacaagaagcctattcagacgcgcttgaacctgatgttcctcggtcagttccgcttacagcctaccattaacaccaacaaagatagcgagattgatgcacacaaacaggtgtctggtatcgctcctaactttgtacacagccaagacggtaaccaccttcgtatgactgtagtgtgggcacacgagaagtacggaatcgaatcttttgcactgattcacgactccttcggtaccattccggctgacgctgcgaacctgttcaaagcagtgcgcgaaactttcgttgacacatatgagtcttgtgatgtactggctgatttctacgaccagttcgctgaccagttgcacgagtctcaacgcgacaaaatgccagcacttccggctaaaggtaacttgaacctccgtgacatcttaaaatcggacttcgcgttcgcg

SEQ ID NO: 1122 - protein, 890 aa, synthetic construct
  REGION 1..890: note = Variant of RNA polymerase
MHHHHHHMNTINIAKNDFSDIELAAIPFNTLADHYGERLAREQLALEHESYEMGEARFRKMFERQLKAGEVADNAAAKPLITTLLPKMIARINDWFEEVKAKRGKRPTAFQFLQEIKPEAVAYITIKTTLACLTSADNTTVQAVASAIGRAIEDEARFGRIRDLEAKHFKKNVEEQLNKRVGHVYKKAFMQVVEHDMLSKGLLGGEAWSSWHKEDSIHVGVRCIEMLIESTGMVSLHRQNAGVVGQDSETIELAPEYAEAIATRAGALAGISPMFQPCVVPPKPWTGITGGGYWAAGRKPLQLVRTRSLAALRRYEEVSMPEVIKAVNIAQNTAWRINKKVLDVANTITQWQHCPVADVPAMDRGEMPARPLDIDTNEIALKAWKKEASAFYRKDKARVSRRLLMEFMLSQANKFANYEAIWFPQNMDWRGRVYAVPMFNPQGNDMTKGLLTFAQEKPIGEDGFYWLKIHGANTAGVDKVPFPQRIKFVEDNHTNIMECAKAPLENTWWAEQDSPFRFLAFCFEYAGVINSGLSYNCSLPLAFDGSCSGLQHFSAMLRDEIGGKAVNLLPSAEYQDIYRIVSDKVNEMLKQDLINGTSTTVETVTDKKTGEITQRTKYGTKVMAQWWLEHGVNRGVTKRSVMTLVYGSKEFGFRDQVLSDTIQKAIDNGKGDMFLNPNQAAGYMAKLIWNAVSGTVVAAVEAMNWLKSAAKLLAAEVKDRKTDTVLRGRCAVHWVTPDGFPVWQEYKKPIQTRLNLMFLGQFRLQPTINTNKDSEIDAHKQVSGIAPNFVHSQDGNHLRMTVVWAHEKYGIESFALIHDSFGTIPADAANLFKAVRETFVDTYESCDVLADFYDQFADQLHESQRDKMPALPAKGNLNLRDILKSDFAFA

SEQ ID NO: 1123 - DNA, 2670 bp, synthetic construct
  misc_feature 1..2670: note = Variant of RNA polymerase
  source 1..2670: mol_type = other DNA
atgcaccatcaccatcaccatatgaacacgattaacattgctaagaacgacttctctgacatcgaactggctgctatcccgttcaacactctggctgaccattacggtgagcgtttagctcgcgaacagttggcccttgagcatgagtcttacgagatgggtgaagcacgcttccgcaagatgtttgagcgtcaacttaaagctggtgaggttgcggataacgctgccgccaagcctctcatcactaccctactccctaagatgattgcacgcatcaacgactggtttgaggaagtgaaagctaagcgcggcaagcgcccgacagccttccagttcctgcaagaaatcaagccggaagccgtagcgtacatcaccattaagaccactctggcttgcctgacccgtgcggacaatacaaccgttcaggctgtagcaagcgcaatcggtcgggccattgaggacgaggctcgcttcggtcgtatccgtgaccttgaagctaagcacttcaagaagaacgttgaggaacaactcaacaagcgcgtagggcacgtctacaagaaagcatttatgcaagttgtcgagcacgacatgctctctaagggtctactcggtggcgaggcgtggtcttcgtggcataaggaagactctattcatgtaggagtacgctgcatcgagatgctcattgagtcaaccggaatggttagcttacaccgccaaaatgctggcgtagtaggtcaagactctgagactatcgaactcgcacctgaatacgctgaggctatcgcaacccgtgcaggtgcgctggctggcatctctccgatgttccaaccttgcgtagttcctcctaagccgtggactggcattactggtggtggctattgggctgcggggcgcaaacccctgcagttagtacgtactcgcagtctggcggcgcttcgccgctatgaagaagtgtcgatgccggaggtcatcaaagcagtcaacattgcgcagaatacagcatggcgtattaacaagaaagttctcgacgtagcgaataccatcacccaatggcagcactgtccagtcgcggatgtgcctgcgatggatcacggcgaaatgccagctcgtccgttggacatcgataccaacgagattgcacttaaagcgtggaagaaagaagcttccgcgttctaccgcaaagacaaagcacgcgttagccgtcgtctgtcaatggagtttatgttatctcaggcgaacaagtttgcgaattatgaggcaatctggtttccgcaaaacatggattggcgtgggcgcgtgtacgctgtcccgatgttcaatcctcagggcaacgatatgacgaaaggcctgctgacctttgcgcaggagaaacccattggtgaagacggcttctattggctcaagattcatggcgcaaatacagctggagtggataaagtaccgtttccacaacgcatcaaatttgttgaggataaccatacgaatattatggaatgcgcgaaagcaccgctggaaaacacttggtgggcggaacaggactcgccgttctgttttctggcgttctgctttgagtatgctggcgtcatcaatagtggtctgtcgtacaactgtagcttgcctctggcatttgatggtagttgctccggcctgcaacatttctcagcgatgttacgcgacgaaattggcggcaaagctgtgaatctcctcccatctgcggaataccaggatatttatcgtatcgtcagcgacaaagttaacgagatgctgaaacaagatctgattaacggtacctctaccaccgtggaaacggtgactgataagaagacaggcgaaattacccaacgcacgaaatacgggaccaaagttatggcacagtggtggttagaacacggtgtgaatcgtggcgtcacgaaacgctcggttatgactttggtgtatgggagcaaagagtttggattccgcgatcaagtgctgagtgacaccattcaaccggcgatcgataacggcaaaggtgacatgtttctgaatccgaatcaggctgctggttacatggcgaaactgatctggaacgcagtgtccgggaccgtagtcgcagcagttgaggcgatgaactggctgaaaagtgcggcgaaattacttgctgctgaagtgaaggatcctaagacggatacagttctgcgtggccgctgcgcagtacattgggtgactcccgacggcttccctgtgtggcaggaatacaagaagcctattcagacgcgcttgaacctgatgttcctcggtcagttccgcttacagcctaccattaacaccaacaaagatagcgagattgatgcacacaaacaggagtctggtatcgctcctaactttgtacacagccaagacggtaaccaccttcgtatgactgtagtgtgggcacacgagaagtacggaatcgaatcttttgcactgattcacgactccttcggtaccattccggctgacgctgcgaacctgttcaaagcagtgcgcgaaactttcgttgacacatatgagtcttgtgatgtactggctgatttctacgaccagttcgctgaccagttgcacgagtctcaacgcgacaaaatgccagcacttccggctaaaggtaacttgaacctccgtgacatcttaaaatcggacttcgcgttcgcg

SEQ ID NO: 1124 - protein, 890 aa, synthetic construct
  REGION 1..890: note = Variant of RNA polymerase
MHHHHHHMNTINIAKNDFSDIELAAIPFNTLADHYGERLAREQLALEHESYEMGEARFRKMFERQLKAGEVADNAAAKPLITTLLPKMIARINDWFEEVKAKRGKRPTAFQFLQEIKPEAVAYITIKTTLACLTRADNTTVQAVASAIGRAIEDEARFGRIRDLEAKHFKKNVEEQLNKRVGHVYKKAFMQVVEHDMLSKGLLGGEAWSSWHKEDSIHVGVRCIEMLIESTGMVSLHRQNAGVVGQDSETIELAPEYAEAIATRAGALAGISPMFQPCVVPPKPWTGITGGGYWAAGRKPLQLVRTRSLAALRRYEEVSMPEVIKAVNIAQNTAWRINKKVLDVANTITQWQHCPVADVPAMDHGEMPARPLDIDTNEIALKAWKKEASAFYRKDKARVSRRLSMEFMLSQANKFANYEAIWFPQNMDWRGRVYAVPMFNPQGNDMTKGLLTFAQEKPIGEDGFYWLKIHGANTAGVDKVPFPQRIKFVEDNHTNIMECAKAPLENTWWAEQDSPFCFLAFCFEYAGVINSGLSYNCSLPLAFDGSCSGLQHFSAMLRDEIGGKAVNLLPSAEYQDIYRIVSDKVNEMLKQDLINGTSTTVETVTDKKTGEITQRTKYGTKVMAQWWLEHGVNRGVTKRSVMTLVYGSKEFGFRDQVLSDTIQPAIDNGKGDMFLNPNQAAGYMAKLIWNAVSGTVVAAVEAMNWLKSAAKLLAAEVKDPKTDTVLRGRCAVHWVTPDGFPVWQEYKKPIQTRLNLMFLGQFRLQPTINTNKDSEIDAHKQESGIAPNFVHSQDGNHLRMTVVWAHEKYGIESFALIHDSFGTIPADAANLFKAVRETFVDTYESCDVLADFYDQFADQLHESQRDKMPALPAKGNLNLRDILKSDFAFA

SEQ ID NO: 1125 - DNA, 2670 bp, synthetic construct
  misc_feature 1..2670: note = Variant of RNA polymerase
  source 1..2670: mol_type = other DNA
atgcaccatcaccatcaccatatgaacacgattaacattgctaagaacgacttctctgacatcgaactggctgctatcccgttcaacactctggctgaccattacggtgagcgtttagctcgcgaacagttggcccttgagcatgagtcttacgagatgggtgaagcacgcttccgcaagatgtttgagcgtcaacttaaagctggtgaggttgcggataacgctgccgccaagcctctcatcactaccctactccctaagatgattgcacgcatcaacgactggtttgaggaagtgaaagctaagcgcggcaagcgcccgacagccttccagttcctgcaagaaatcaagccggaagccgtagcgtacatcaccattaagaccactctggcttgcctaaccagtgcggacaatacaaccgttcaggctgtagcaagcgcaatcggtcgggccattgaggacgaggctcgcttcggtcgtatccgtgaccttgaagctaagcacttcaagaagaacgttgaggaacaactcaacaagcgcgtagggcacgtctacaagaaagcatttatgcaagttgtcgagcacgacatgctctctaagggtctactcggtggcgaggcgtggtcttcgtggcataaggaagactctattcatgtaggagtacgctgcatcgagatgctcattgagtcaaccggaatggttagcttacaccgccaaaatgctggcgtagtaggtcaagactctgagactatcgaactcgcacctgaatacgctgaggctatcgcaacccgtgcaggtgcgctggctggcatctctccgatgttccaaccttgcgtagttcctcctaagccgtggactggcattactggtggtggctattgggctgcggggcgcaaacccctgcagttagtacgtactcgcagtctggcggcgcttcgccgctatgaagaagtgtcgatgccggaggtcatcaaagcagtcaacattgcgcagaatacagcatggcgtattaacaagaaagttctcgacgtagcgaataccatcacccaatggcagcactgtccagtcgcggatgtgcctgcgatggatcgtggcgaaatgccagctcgtccgttggacatcgataccaacgagattgcacttaaagcgtggaagaaagaagcttccgcgttctaccgcaaagacaaagcacgcgttagccgtcgtctgtcaatggagtttatgttatctcaggcgaacaagtttgcgaattatgaggcaatctggtttccgcaaaacatggattggcgtgggcgcgtgtacgctgtcccgatgttcaatcctcagggcaacgatatgacgaaaggcctgctgacctttgcgcaggagaaacccattggtgaagacggcttctattggctcaagattcatggcgcaaatacagctggagtggataaagtaccgtttccacaacgcatcaaatttgttgaggataaccatacgaatattatggaatgcgcgaaagcaccgctggaaaacacttggtgggcggaacaggactcgccgttccgctttctggcgttctgctttgagtatgctggcgtcatcaatagtggtctgtcgtacaactgtagcttgcctctggcatttgatggtagttgctccggcctgcaacatttctcagcgatgttacgcgacgaaattggcggcaaagctgtgaatctcctcccatctgcggaataccaggatatttatcgtatcgtcagcgacaaagttaacgagatgctgaaacaagatctgattaacggtacctctaccaccgtggaaacggtgactgattataagacaggcgaaattacccaacgcacgaaatacgggaccaaagttatggcacagtggtggttagaacacggtgtgaatcgtggcgtcacgaaacgcccggttatgactttggtgtatgggagcaaagagtttggattccgcgatcaagtgctgagtgacaccattcaacgtgcgatcgataacggcaaaggtgacatgtttctgaatccgaatcaggctgctggttacatggcgaaactgatctggaacgcagtgtccgggaccgtagtcgcagcagttgaggcgatgaactggctgaaaagtgcggcgaaattacttgctgctgaagtgaaggatgagaagacggatacagttctgcgtggccgctgcgcagtacattgggtgactcccgacggcttccctgtgtggcaggaatacaagaagcctattcaaacgcgcttgaacctgatgttcctcggtcagttccgcttacagcctaccattaacaccaacaaagatagcgagattgatgcacgcaaacaggggtctggtatcgctcctaactttgtacacagccaggacggtaaccaccttcgtatgactgtagtgtgggcacacgagaagtacggaatcgaatcttttgcactgattcacgactccttcggtaccattccggctgacgctgcgaacctgttcaaagcagtgcgcgaaactttcgttgacacatatgagtcttgtgatgtactggctgatttctacgaccagattgctgaccagttgcacgagtctcaacgcgacaaaatgccagcacttccggctaaaggtaacttgaacctccgtgacatcttaaaatcggacttcgcgttcgcg

SEQ ID NO: 1126 - protein, 890 aa, synthetic construct
  REGION 1..890: note = Variant of RNA polymerase
MHHHHHHMNTINIAKNDFSDIELAAIPFNTLADHYGERLAREQLALEHESYEMGEARFRKMFERQLKAGEVADNAAAKPLITTLLPKMIARINDWFEEVKAKRGKRPTAFQFLQEIKPEAVAYITIKTTLACLTSADNTTVQAVASAIGRAIEDEARFGRIRDLEAKHFKKNVEEQLNKRVGHVYKKAFMQVVEHDMLSKGLLGGEAWSSWHKEDSIHVGVRCIEMLIESTGMVSLHRQNAGVVGQDSETIELAPEYAEAIATRAGALAGISPMFQPCVVPPKPWTGITGGGYWAAGRKPLQLVRTRSLAALRRYEEVSMPEVIKAVNIAQNTAWRINKKVLDVANTITQWQHCPVADVPAMDRGEMPARPLDIDTNEIALKAWKKEASAFYRKDKARVSRRLSMEFMLSQANKFANYEAIWFPQNMDWRGRVYAVPMFNPQGNDMTKGLLTFAQEKPIGEDGFYWLKIHGANTAGVDKVPFPQRIKFVEDNHTNIMECAKAPLENTWWAEQDSPFRFLAFCFEYAGVINSGLSYNCSLPLAFDGSCSGLQHFSAMLRDEIGGKAVNLLPSAEYQDIYRIVSDKVNEMLKQDLINGTSTTVETVTDYKTGEITQRTKYGTKVMAQWWLEHGVNRGVTKRPVMTLVYGSKEFGFRDQVLSDTIQRAIDNGKGDMFLNPNQAAGYMAKLIWNAVSGTVVAAVEAMNWLKSAAKLLAAEVKDEKTDTVLRGRCAVHWVTPDGFPVWQEYKKPIQTRLNLMFLGQFRLQPTINTNKDSEIDARKQGSGIAPNFVHSQDGNHLRMTVVWAHEKYGIESFALIHDSFGTIPADAANLFKAVRETFVDTYESCDVLADFYDQIADQLHESQRDKMPALPAKGNLNLRDILKSDFAFA

SEQ ID NO: 1127 - DNA, 2670 bp, synthetic construct
  misc_feature 1..2670: note = Variant of RNA polymerase
  source 1..2670: mol_type = other DNA
atgcaccatcaccatcaccatatgaacacgattaacattgctaagaacgacttctctgacatcgaactggctgctatcccgttcaacactctggctgaccattacggtgagcgtttagctcgcgaacagttggcccttgagcatgagtcttacgagatgggtgaagcacgcttccgcaagatgtttgagcgtcaacttaaagctggtgaggttgcggataacgctgccgccaagcctctcatcactaccctactccctaagatgattgcacgcatcaacgactggtttgaggaagtgaaagctaagcgcggcaagcgcccgacagccttccagttcctgcaagaaatcaagccggaagccgtagcgtacatcaccattaagaccactctggcttgcctgaccagtgaggacaatacaaccgttcaggctgtagcaagcgcaatcggtcgggccattgaggacgaggctcgcttcggtcgtatccgtgaccttgaagctaagcacttcaagaagaacgttgaggaacaactcaacaagcgcgtagggcacgtctacaagaaagcatttatgcaagttgtcgagcacgacatgctctctaagggtctactcggtggcgaggcgtggtcttcgtggcataaggaagactctattcatgtaggagtacgctgcatcgagatgctcattgagtcaaccggaatggttagcttacaccgccaaaatgctggcgtagtgggtcaggactctgagactatcgaactcgcacctgaatacgctgaggctatcgcaacccgtgcaggtgcgctggctggcatctctccgatgttccaaccttgcgtagttcctcctaagccgtggactggcattactggtggtggctattgggctgcggggcgcaaacccctgcagttagtacgtactcgcagtctggcggcgcttcgccgctatgaagaagtgtcgatgccggaggtcatcaaagcagtcaacattgcgcagaatacagcatggcgtattaacaagaaagttctcgacgtagcgaataccatcacccaatggcagcactgtccagtcgcggatgtgcctgcgatggatcacggcgaaatgccagctcgtccgttggacatcgataccaacgagattgcacttaaagcgtggaagaaagaagcttccgcgttctaccgcaaagacaaagcacgcatgagccgtcgtctgctgatggagtttatgttatctcaggcgaacaagtttgcgaattatgaggcaatctggtttccgcaaaacatggattggcgtgggcgcgtgtacgctgtcccgatgttcaatcctcagggcaacgatatgacgaaaggcctgctgacctttgcgcaggagaaacccattggtgaagacggcttctattggctcaagattcatggcgcaaatacagctggagtggataaagtaccgtttccacaacgcatcaaatttgttgaggataaccatacgaatattatggaatgcgcgaaagcaccgctggaaaacacttggtgggcggaacaggactcgccgttctgttttctggcgttctgctttgagtatgctggcgtcatcaatagtggtctgtcgtacaactgtagcttgcctctggcatttgatggtagttgctccggcctgcaacatttctcagcgatgttacgcgacgaaattggcggcaaagctgtgaatctcctcccatctgcggaataccaggatatttatcgtatcgtcagcgacaaagttaacgagatgctgaaacaagatctgattaacggtacctctaccaccgtggaaacggtgactgataagaagacaggcgaaattacccaacgcacgaaatacgggaccaaagttatggcacagtggtggttagaacacggtgtgaatcgtggcgtcacgaaacgctcggttatgactttggtgtatgggagcaaagagtttggattccgcgatcaagtgctgagtgacaccattcaaccggcgatcgataacggcaaaggtgacatgtttctgaatccgaatcaggctgctggttacatggcgaaactgatctggaacgcagtgtccgggaccgtagtcgcagcagttgaggcgatgaactggctgaaaagtgcggcgaaattacttgctgctgaagtgaaggatcctaagacggatacagttctgcgtggccgctgcgcagtacattgggtgactcccgacggcttccctgtgtggcaggaatacaagaagcctattcagacgcgcttgaacctgatgttcctcggtcagttccgcttacagcctaccattaacaccaacaaagatagcgagattgatgcacacaaacaggagtctggtatcgctcctaactttgtacacagccaagacggtaaccaccttcgtatgactgtagtgtgggcacacgagaagtacggaatcgaatcttttgcactgattcacgactccttcggtaccattccggctgacgctgcgaacctgttcaaagcagtgcgcgaaactttcgttgacacatatgagtcttgtgatgtactggctgatttctacgaccagttcgctgaccagttgcacgagtctcaacgcgacaaaatgccagcacttccggctaaaggtaacttgaacctccgtgacatcttaaaatcggacttcgcgttcgcg

SEQ ID NO: 1128 - protein, 890 aa, synthetic construct
  REGION 1..890: note = Variant of RNA polymerase
MHHHHHHMNTINIAKNDFSDIELAAIPFNTLADHYGERLAREQLALEHESYEMGEARFRKMFERQLKAGEVADNAAAKPLITTLLPKMIARINDWFEEVKAKRGKRPTAFQFLQEIKPEAVAYITIKTTLACLTSEDNTTVQAVASAIGRAIEDEARFGRIRDLEAKHFKKNVEEQLNKRVGHVYKKAFMQVVEHDMLSKGLLGGEAWSSWHKEDSIHVGVRCIEMLIESTGMVSLHRQNAGVVGQDSETIELAPEYAEAIATRAGALAGISPMFQPCVVPPKPWTGITGGGYWAAGRKPLQLVRTRSLAALRRYEEVSMPEVIKAVNIAQNTAWRINKKVLDVANTITQWQHCPVADVPAMDHGEMPARPLDIDTNEIALKAWKKEASAFYRKDKARMSRRLLMEFMLSQANKFANYEAIWFPQNMDWRGRVYAVPMFNPQGNDMTKGLLTFAQEKPIGEDGFYWLKIHGANTAGVDKVPFPQRIKFVEDNHTNIMECAKAPLENTWWAEQDSPFCFLAFCFEYAGVINSGLSYNCSLPLAFDGSCSGLQHFSAMLRDEIGGKAVNLLPSAEYQDIYRIVSDKVNEMLKQDLINGTSTTVETVTDKKTGEITQRTKYGTKVMAQWWLEHGVNRGVTKRSVMTLVYGSKEFGFRDQVLSDTIQPAIDNGKGDMFLNPNQAAGYMAKLIWNAVSGTVVAAVEAMNWLKSAAKLLAAEVKDPKTDTVLRGRCAVHWVTPDGFPVWQEYKKPIQTRLNLMFLGQFRLQPTINTNKDSEIDAHKQESGIAPNFVHSQDGNHLRMTVVWAHEKYGIESFALIHDSFGTIPADAANLFKAVRETFVDTYESCDVLADFYDQFADQLHESQRDKMPALPAKGNLNLRDILKSDFAFA

SEQ ID NO: 1129 - DNA, 2670 bp, synthetic construct
  misc_feature 1..2670: note = Variant of RNA polymerase
  source 1..2670: mol_type = other DNA
atgcaccatcaccatcaccatatgaacacgattaacattgctaagaacgacttctctgacatcgaactggctgctatcccgttcaacactctggctgaccattacggtgagcgtttagctcgcgaacagttggcccttgagcatgagtcttacgagatgggtgaagcacgcttccgcaagatgtttgagcgtcaacttaaagctggtgaggttgcggataacgctgccgccaagcctctcatcactaccctactccctaagatgattgcacgcatcaacgactggtttgaggaagtgaaagctaagcgcggcaagcgcccgacagccttccagttcctgcaagaaatcaagccggaagccgtagcgtacatcaccattaagaccactctggcttgcctgaccagtgaggacaatacaaccgttcaggctgtagcaagcgcaatcggtcgggccattgaggacgaggctcgcttcggtcgtatccgtgaccttgaagctaagcacttcaagaagaacgttgaggaacaactcaacaagcgcgtagggcacgtctacaagaaagcatttatgcaagttgtcgagcacgacatgctctctaagggtctactcggtggcgaggcgtggtcttcgtggcataaggaagactctattcatgtaggagtacgctgcatcgagatgctcattgagtcaaccggaatggttagcttacaccgccaaaatgctggcgtagtgggtcaggactctgagactatcgaactcgcacctgaatacgctgaggctatcgcaacccgtgcaggtgcgctggctggcatctctccgatgttccaaccttgcgtagttcctcctaagccgtggactggcattactggtggtggctattgggctgcggggcgcaaacccctgcagttagtacgtactcgcagtctggcggcgcttcgccgctatgaagaagtgtcgatgccggaggtcatcaaagcagtcaacattgcgcagaatacagcatggcgtattaacaaggaagttctcgacgtagcgaataccatcacccaatggcagcactgtccagtcgcggatgtgcctgcgatggatcgtggcgaaatgccagctcgtccgttggacatcgataccaacgagattgcacttaaagcgtggaagaaagaagcttccgcgttctaccgcaaagacaaagcacgcgttagccgtcgtctgtcaatggagtttatgttatctcaggcgaacaagtttgcgaattatgaggcaatctggtttccgcaaaacatggattggcgtgggcgcgtgtacgctgtcccgatgttcaatcctcagggcaacgatatgacgaaaggcctgctgacctttgcgcaggagaaacccattggtgaagacggcttctattggctcaagattcatggcgcaaatacagctggagtggataaagtaccgtttccacaacgcatcaaatttgttgaggataaccatacgaatattatggaatgcgcgaaagcaccgctggaaaacacttggtgggcggaacaggactcgccgttctgttttctggcgttctgctttgagtatgctggcgtcatcaatagtggtctgtcgtacaactgtagcttgcctctggcatttgatggtagttgctccggcctgcaacatttctcagcgatgttacgcgacgaaattggcggcaaagctgtgaatctcctcccatctgcggaataccaggatatttatcgtatcgtcagcgacaaagttaacgagatgctgaaacaagatctgattaacggtacctctaccaccgtggaaacggtgactgataagaagacaggcgaaattacccaacgcacgaaatacgggaccaaagttatggcacagtggtggttagaacacggtgtgaatcgtggcgtcacgaaacgctcggttatgactttggtgtatgggagcaaagagtttggattccgcgatcaagtgctgagtgacaccattcaaccggcgatcgataacggcaaaggtgacatgtttctgaatccgaatcaggctgctggttacatggcgaaactgatctggaacgcagtgtccgggaccgtagtcgcagcagttgaggcgatgaactggctgaaaagtgcggcgaaattacttgctgctgaagtgaaggatcctaagacggatacagttctgcgtggccgctgcgcagtacattgggtgactcccgacggcttccctgtgtggcaggaatacaagaagcctattcagacgcgcttgaacctgatgttcctcggtcagttccgcttacagcctaccattaacaccaacaaagatagcgagattgatgcacacaaacaggagtctggtatcgctcctaactttgtacacagccaagacggtaaccaccttcgtatgactgtagtgtgggcacacgagaagtacggaatcgaatcttttgcactgattcacgactccttcggtaccattccggctgacgctgcgaacctgttcaaagcagtgcgcgaaactttcgttgacacatatgagtcttgtgatgtactggctgatttctacgaccagttcgctgaccagttgcacgagtctcaacgcgacaaaatgccagcacttccggctaaaggtaacttgaacctccgtgacatcttaaaatcggacttcgcgttcgcg

SEQ ID NO: 1130 - protein, 890 aa, synthetic construct
  REGION 1..890: note = Variant of RNA polymerase
MHHHHHHMNTINIAKNDFSDIELAAIPFNTLADHYGERLAREQLALEHESYEMGEARFRKMFERQLKAGEVADNAAAKPLITTLLPKMIARINDWFEEVKAKRGKRPTAFQFLQEIKPEAVAYITIKTTLACLTSEDNTTVQAVASAIGRAIEDEARFGRIRDLEAKHFKKNVEEQLNKRVGHVYKKAFMQVVEHDMLSKGLLGGEAWSSWHKEDSIHVGVRCIEMLIESTGMVSLHRQNAGVVGQDSETIELAPEYAEAIATRAGALAGISPMFQPCVVPPKPWTGITGGGYWAAGRKPLQLVRTRSLAALRRYEEVSMPEVIKAVNIAQNTAWRINKEVLDVANTITQWQHCPVADVPAMDRGEMPARPLDIDTNEIALKAWKKEASAFYRKDKARVSRRLSMEFMLSQANKFANYEAIWFPQNMDWRGRVYAVPMFNPQGNDMTKGLLTFAQEKPIGEDGFYWLKIHGANTAGVDKVPFPQRIKFVEDNHTNIMECAKAPLENTWWAEQDSPFCFLAFCFEYAGVINSGLSYNCSLPLAFDGSCSGLQHFSAMLRDEIGGKAVNLLPSAEYQDIYRIVSDKVNEMLKQDLINGTSTTVETVTDKKTGEITQRTKYGTKVMAQWWLEHGVNRGVTKRSVMTLVYGSKEFGFRDQVLSDTIQPAIDNGKGDMFLNPNQAAGYMAKLIWNAVSGTVVAAVEAMNWLKSAAKLLAAEVKDPKTDTVLRGRCAVHWVTPDGFPVWQEYKKPIQTRLNLMFLGQFRLQPTINTNKDSEIDAHKQESGIAPNFVHSQDGNHLRMTVVWAHEKYGIESFALIHDSFGTIPADAANLFKAVRETFVDTYESCDVLADFYDQFADQLHESQRDKMPALPAKGNLNLRDILKSDFAFA

SEQ ID NO: 1131 - DNA, 2670 bp, synthetic construct
  misc_feature 1..2670: note = Variant of RNA polymerase
  source 1..2670: mol_type = other DNA
atgcaccatcaccatcaccatatgaacacgattaacattgctaagaacgacttctctgacatcgaactggctgctatcccgttcaacactctggctgaccattacggtgagcgtttagctcgcgaacagttggcccttgagcatgagtcttacgagatgggtgaagcacgcttccgcaagatgtttgagcgtcaacttaaagctggtgaggttgcggataacgctgccgccaagcctctcatcactaccctactccctaagatgattgcacgcatcaacgactggtttgaggaagtgaaagctaagcgcggcaagcgcccgacagccttccagttcctgcaagaaatcaagccggaagccgtagcgtacatcaccattaagaccactctggcttgcctaaccagtgcggacaatacaaccgttcaggctgtagcaagcgcaatcggtcgggccattgaggacgaggctcgcttcggtcgtatccgtgaccttgaagctaagcacttcaagaagaacgttgaggaacaactcaacaagcgcgtagggcacgtctacaagaaagcatttatgcaagttgtcgagcacgacatgctctctaagggtctactcggtggcgaggcgtggtcttcgtggcataaggaagactctattcatgtaggagtacgctgcatcgagatgctcattgagtcaaccggaatggttagcttacaccgccaaaatgctggcgtagtaggtcaagactctgagactatcgaactcgcacctgaatacgctgaggctatcgcaacccgtgcaggtgcgctggctggcatctctccgatgttccaaccttgcgtagttcctcctaagccgtggactggcattactggtggtggctattgggctgcggggcgcaaacccctgcagttagtacgtactcgcagtctggcggcgcttcgccgctatgaagaagtgtcgatgccggaggtcatcaaagcagtcaacattgcgcagaatacagcatggcgtattaacaagaaagttctcgacgtagcgaataccatcacccaatggcagcactgtccagtcgcggatgtgcctgcgatggatcgtggcgaaatgccagctcgtccgttggacatcgataccaacgagattgcacttaaagcgtggaagaaagaagcttccgcgttctaccgcaaagacaaagcacgcatgagccgtcgtctgctgatggagtttatgttatctcaggcgaacaagtttgcgaattatgaggcaatctggtttccgcaaaacatggattggcgtgggcgcgtgtacgctgtcccgatgttcaatcctcagggcaacgatatgacgaaaggcctgctgacctttgcgcaggagaaacccattggtgaagacggcttctattggctcaagattcatggcgcaaatacagctggagtggataaagtaccgtttccacaacgcatcaaatttgttgaggataaccatacgaatattatggaatgcgcgaaagcaccgctggaaaacacttggtgggcggaacaggactcgccgttccgctttctggcgttctgctttgagtatgctggcgtcatcaatagtggtctgtcgtacaactgtagcttgcctctggcatttgatggtagttgctccggcctgcaacatttctcagcgatgttacgcgacgaaattggcggcaaagctgtgaatctcctcccatctgcggaataccaggatatttatcgtatcgtcagcgacaaagttaacgagatgctgaaacaagatctgattaacggtacctctaccaccgtggaaacggtgactgataagaagacaggcgaaattacccaacgcacgaaatacgggaccaaagttatggcacagtggtggttagaacacggtgtgaatcgtggcgtcacgaaacgctcggttatgactttggtgtatgggagcaaagagtttggattccgcgatcaagtgctgagtgacaccattcaacctgcgatcgataacggcaaaggtgacatgtttctgaatccgaatcaggctgctggttacatggcgaaactgatctggaacgcagtgtccgggaccgtagtcgcagcagttgaggcgatgaactggctgaaaagtgcggcgaaattacttgctgctgaagtgaaggatcagaagacggatacagttctgcgtggccgctgcgcagtacattgggtgactcccgacggcttccctgtgtggcaggaatacaagaagcctattcaaacgcgcttgaacctgatgttcctcggtcagttccgcttacagcctaccattaacaccaacaaagatagcgagattgatgcacacaaacaggagtctggtatcgctcctaactttgtacacagccaagacggtaaccaccttcgtatgactgtagtgtgggcacacgagaagtacggaatcgaatcttttgcactgattcacgactccttcggtaccattccggctgacgctgcgaacctgttcaaagcagtgcgcgaaactttcgttgacacatatgagtcttgtgatgtactggctgatttctacgaccagtttgctgaccagttgcacgagtctcaacgcgacaaaatgccagcacttccggctaaaggtaagttgaacctccgtgacatcttaaaatcggacttcgcgttcgcg

SEQ ID NO: 1132 - protein, 890 aa, synthetic construct
  REGION 1..890: note = Variant of RNA polymerase
MHHHHHHMNTINIAKNDFSDIELAAIPFNTLADHYGERLAREQLALEHESYEMGEARFRKMFERQLKAGEVADNAAAKPLITTLLPKMIARINDWFEEVKAKRGKRPTAFQFLQEIKPEAVAYITIKTTLACLTSADNTTVQAVASAIGRAIEDEARFGRIRDLEAKHFKKNVEEQLNKRVGHVYKKAFMQVVEHDMLSKGLLGGEAWSSWHKEDSIHVGVRCIEMLIESTGMVSLHRQNAGVVGQDSETIELAPEYAEAIATRAGALAGISPMFQPCVVPPKPWTGITGGGYWAAGRKPLQLVRTRSLAALRRYEEVSMPEVIKAVNIAQNTAWRINKKVLDVANTITQWQHCPVADVPAMDRGEMPARPLDIDTNEIALKAWKKEASAFYRKDKARMSRRLLMEFMLSQANKFANYEAIWFPQNMDWRGRVYAVPMFNPQGNDMTKGLLTFAQEKPIGEDGFYWLKIHGANTAGVDKVPFPQRIKFVEDNHTNIMECAKAPLENTWWAEQDSPFRFLAFCFEYAGVINSGLSYNCSLPLAFDGSCSGLQHFSAMLRDEIGGKAVNLLPSAEYQDIYRIVSDKVNEMLKQDLINGTSTTVETVTDKKTGEITQRTKYGTKVMAQWWLEHGVNRGVTKRSVMTLVYGSKEFGFRDQVLSDTIQPAIDNGKGDMFLNPNQAAGYMAKLIWNAVSGTVVAAVEAMNWLKSAAKLLAAEVKDQKTDTVLRGRCAVHWVTPDGFPVWQEYKKPIQTRLNLMFLGQFRLQPTINTNKDSEIDAHKQESGIAPNFVHSQDGNHLRMTVVWAHEKYGIESFALIHDSFGTIPADAANLFKAVRETFVDTYESCDVLADFYDQFADQLHESQRDKMPALPAKGKLNLRDILKSDFAFA

SEQ ID NO: 1133 - DNA, 2670 bp, synthetic construct
  misc_feature 1..2670: note = Variant of RNA polymerase
  source 1..2670: mol_type = other DNA
atgcaccatcaccatcaccatatgaacacgattaacattgctaagaacgacttctctgacatcgaactggctgctatcccgttcaacactctggctgaccattacggtgagcgtttagctcgcgaacagttggcccttgagcatgagtcttacgagatgggtgaagcacgcttccgcaagatgtttgagcgtcaacttaaagctggtgaggttgcggataacgctgccgccaagcctctcatcactaccctactccctaagatgattgcacgcatcaacgactggtttgaggaagtgaaagctaagcgcggcaagcgcccgacagccttccagttcctgcaagaaatcaagccggaagccgtagcgtacatcaccattaagaccactctggcttgcctaaccagtgcggacaatacaaccgttcaggctgtagcaagcgcaatcggtcgggccattgaggacgaggctcgcttcggtcgtatccgtgaccttgaagctaagcacttcaagaagaacgttgaggaacaactcaacaagcgcgtagggcacgtctacaagaaagcatttatgcaagttgtcgagcacgacatgctctctaagggtctactcggtggcgaggcgtggtcttcgtggcataaggaagactctattcatgtaggagtacgctgcatcgagatgctcattgagtcaaccggaatggttagcttacaccgccaaaatgctggcgtagtaggtcaagactctgagactatcgaactcgcacctgaatacgctgaggctatcgcaacccgtgcaggtgcgctggctggcatctctccgatgttccaaccttgcgtagttcctcctaagccgtggactggcattactggtggtggctattgggctgcggggcgcaaacccctgcagttagtacgtactcgcagtctggcggcgcttcgccgctatgaagaagtgtcgatgccggaggtcatcaaagcagtcaacattgcgcagaatacagcatggcgtattaacaagaaagttctcgacgtagcgaataccatcacccaatggcagcactgtccagtcgcggatgtgcctgcgatggatcgtggcgaaatgccagctcgtccgttggacatcgataccaacgagattgcacttaaagcgtggaagaaagaagcttccgcgttctaccgcaaagacaaagcacgcgtgagccgtcgtctgctgatggagtttatgttatctcaggcgaacaagtttgtcaattatgaggcaatctggtttccgcaaaacatggattggcgtgggcgcgtgtacgctgtcccgatgttcaatcctcagggcaacgatatgacgaaaggcctgctgacctttgcgcaggagaaacccattggtgaagacggcttctattggctcaagattcatggcgcaaatacagctggagtggataaagtaccgtttccacaacgcatcaaatttgttgaggataaccatacgaatattatggaatgcgcgaaagcaccgctggaaaacacttggtgggcggaacaggactcgccgttctattttctggcgttctgctttgagtatgctggcgtcatcaatagtggtctgtcgtacaactgtagcttgcctctggcatttgatggtagttgctccggcctgcaacatttctcagcgatgttacgcgacgaaattggcggcaaagctgtgaatctcctcccatctgcggaataccaggatatttatcgtatcgtcagcgacaaagttaacgagatgctgaaacaagatctgattaacggtacctctaccaccgtggaaacggtgactgataaaaagacaggcgaaattacccaacgcacgaaatacgggaccaaagttatggcacagtggtggttagaacacggtgtgaatcgtggcgtcacgaaacgcccggttatgactttgccgtatgggagcaaagagtttggattccgcgatcaagtgctgagtgacaccattcaacctgcgatcgataacggcaagggtgacatgtttctgaatccgaatcaggctgctggttacatggcgaaactgatctggaacgcagtgtccgggaccgtagtcgcagcagttgaggcgatgaactggctgaaaagtgcggcgaaattacttgctgctgaagtgaaggatcagaagacggatacagttctgcgtggccgctgcgcagtacattgggtgactcccgacggcttccctgtgtggcaggaatacaagaagcctattcgtacgcgcttgaacctgatgttcctcggtcagttccgcttacagcctaccattaacaccaacaaagatagcgagattgatgcacgcaaacaggtgtctggtatcgctcctaactttgtacacagccaagacggtaaccaccttcgtatgactgtagtgtgggcacacgagaagtacggaatcgaatcttttgcactgattcacgactccttcggtaccattccggctgacgctgcgaacctgttcaaagcagtgcgcgaaactttcgttgacacatatgagtcttgtgatgtactggctgatttctacgaccagtttgctgaccagttgcacgagtctcaacgcgacaaaatgccagcacttccggctaaaggtaatttgaacctccgtgacatcttaaaatcggacttcgcgttcgcg

SEQ ID NO: 1134 - protein, 890 aa, synthetic construct
  REGION 1..890: note = Variant of RNA polymerase
MHHHHHHMNTINIAKNDFSDIELAAIPFNTLADHYGERLAREQLALEHESYEMGEARFRKMFERQLKAGEVADNAAAKPLITTLLPKMIARINDWFEEVKAKRGKRPTAFQFLQEIKPEAVAYITIKTTLACLTSADNTTVQAVASAIGRAIEDEARFGRIRDLEAKHFKKNVEEQLNKRVGHVYKKAFMQVVEHDMLSKGLLGGEAWSSWHKEDSIHVGVRCIEMLIESTGMVSLHRQNAGVVGQDSETIELAPEYAEAIATRAGALAGISPMFQPCVVPPKPWTGITGGGYWAAGRKPLQLVRTRSLAALRRYEEVSMPEVIKAVNIAQNTAWRINKKVLDVANTITQWQHCPVADVPAMDRGEMPARPLDIDTNEIALKAWKKEASAFYRKDKARVSRRLLMEFMLSQANKFVNYEAIWFPQNMDWRGRVYAVPMFNPQGNDMTKGLLTFAQEKPIGEDGFYWLKIHGANTAGVDKVPFPQRIKFVEDNHTNIMECAKAPLENTWWAEQDSPFYFLAFCFEYAGVINSGLSYNCSLPLAFDGSCSGLQHFSAMLRDEIGGKAVNLLPSAEYQDIYRIVSDKVNEMLKQDLINGTSTTVETVTDKKTGEITQRTKYGTKVMAQWWLEHGVNRGVTKRPVMTLPYGSKEFGFRDQVLSDTIQPAIDNGKGDMFLNPNQAAGYMAKLIWNAVSGTVVAAVEAMNWLKSAAKLLAAEVKDQKTDTVLRGRCAVHWVTPDGFPVWQEYKKPIRTRLNLMFLGQFRLQPTINTNKDSEIDARKQVSGIAPNFVHSQDGNHLRMTVVWAHEKYGIESFALIHDSFGTIPADAANLFKAVRETFVDTYESCDVLADFYDQFADQLHESQRDKMPALPAKGNLNLRDILKSDFAFA

SEQ ID NO: 1135 - DNA, 2670 bp, synthetic construct
  misc_feature 1..2670: note = Variant of RNA polymerase
  source 1..2670: mol_type = other DNA
atgcaccatcaccatcaccatatgaacacgattaacattgctaagaacgacttctctgacatcgaactggctgctatcccgttcaacactctggctgaccattacggtgagcgtttagctcgcgaacagttggcccttgagcatgagtcttacgagatgggtgaagcacgcttccgcaagatgtttgagcgtcaacttaaagctggtgaggttgcggataacgctgccgccaagcctctcatcactaccctactccctaagatgattgcacgcatcaacgactggtttgaggaagtgaaagctaagcgcggcaagcgcccgacagccttccagttcctgcaagaaatcaagccggaagccgtagcgtacatcaccattaagaccactctggcttgcctaaccagtgcggacaatacaaccgttcaggctgtagcaagcgcaatcggtcgggccattgaggacgaggctcgcttcggtcgtatccgtgaccttgaagctaagcacttcaagaagaacgttgaggaacaactcaacaagcgcgtagggcacgtctacaagaaagcatttatgcaagttgtcgagcacgacatgctctctaagggtctactcggtggcgaggcgtggtcttcgtggcataaggaagactctattcatgtaggagtacgctgcatcgagatgctcattgagtcaaccggaatggttagcttacaccgccaaaatgctggcgtagtgggtgcagactctgagactatcgaactcgcacctgaatacgctgaggctatcgcaacccgtgcaggtgcgctggctggcatctctccgatgttccaaccttgcgtagttcctcctaagccgtggactggcattactggtggtggctattgggctgcggggcgcaaacccctgcagttagtacgtactcgcagtctggcggcgcttcgccgctatgaagaagtgtcgatgccggaggtcatcaaagcagtcaacattgcgcagaatacagcatggcgtattaacaagaaagttctcgacgtagcgaataccatcacccaatggcagcactgtccagtcgcggatgtgcctgcgatggatcgtggcgaaatgccagctcgtccgttggacatcgataccaacgagattgcacttaaagcgtggaagaaagaagcttccgcgttctaccgcaaagacaaagcacgcgttagccgtcgtctgtcaatggagtttatgttatctcaggcgaacaagtttgtcaattatgaggcaatctggtttccgcaaaacatggattggcgtgggcgcgtgtacgctgtcccgatgttcaatcctcagggcaacgatatgacgaaaggcctgctgacctttgcgcaggagaaacccattggtgaagacggcttctattggctcaagattcatggcgcaaatacagctggagtggataaagtaccgtttccacaacgcatcaaatttgttgaggataaccatacgaatattatggaatgcgcgaaagcaccgctggaaaacacttggtgggcggaacaggactcgccgttctgttttctggcgttctgctttgagtatgctggcgtcatcaatagtggtctgtcgtacaactgtagcttgcctctggcatttgatggtagttgctccggcctgcaacatttctcagcgatgttacgcgacgaaattggcggcaaagctgtgaatctcctcccatctgcggaataccaggatatttatcgtatcgtcagcgacaaagttaacgagatgctgaaacaagatctgattaacggtacctctaccaccgtggaaacggtgactgataagaagacaggcgaaattacccaacgcacgaaatacgggaccaaagttatggcacagtggtggttagaacacggtgtgaatcgtggcgtcacgaaacgctcggttatgactttggtgtatgggagcaaagagtttggattccgcgatcaagtgctgagtgacaccattcaaccggcgatcgataacggcaaaggtgacatgtttctgaatccgaatcaggctgctggttacatggcgaaactgatctggaacgcagtgtccgggaccgtagtcgcagcagttgaggcgatgaactggctgaaaagtgcggcgaaattacttgctgctgaagtgaaggatcctaagacggatacagttctgcgtggccgctgcgcagtacattgggtgactcccgacggcttccctgtgtggcaggaatacaagaagcctattcagacgcgcttgaacctgatgttcctcggtcagttccgcttacagcctaccattaacaccaacaaagatagcgagattgatgcacacaaacaggagtctggtatcgctcctaactttgtacacagccaagacggtaaccaccttcgtatgactgtagtgtgggcacacgagaagtacggaatcgaatcttttgcactgattcacgactccttcggtaccattccggctgacgctgcgaacctgttcaaagcagtgcgcgaaactttcgttgacacatatgagtcttgtgatgtactggctgatttctacgaccagttcgctgaccagttgcacgagtctcaacgcgacaaaatgccagcacttccggctaaaggtaacttgaacctccgtgacatcttaaaatcggacttcgcgttcgcg

SEQ ID NO: 1136 - protein, 890 aa, synthetic construct
  REGION 1..890: note = Variant of RNA polymerase
MHHHHHHMNTINIAKNDFSDIELAAIPFNTLADHYGERLAREQLALEHESYEMGEARFRKMFERQLKAGEVADNAAAKPLITTLLPKMIARINDWFEEVKAKRGKRPTAFQFLQEIKPEAVAYITIKTTLACLTSADNTTVQAVASAIGRAIEDEARFGRIRDLEAKHFKKNVEEQLNKRVGHVYKKAFMQVVEHDMLSKGLLGGEAWSSWHKEDSIHVGVRCIEMLIESTGMVSLHRQNAGVVGADSETIELAPEYAEAIATRAGALAGISPMFQPCVVPPKPWTGITGGGYWAAGRKPLQLVRTRSLAALRRYEEVSMPEVIKAVNIAQNTAWRINKKVLDVANTITQWQHCPVADVPAMDRGEMPARPLDIDTNEIALKAWKKEASAFYRKDKARVSRRLSMEFMLSQANKFVNYEAIWFPQNMDWRGRVYAVPMFNPQGNDMTKGLLTFAQEKPIGEDGFYWLKIHGANTAGVDKVPFPQRIKFVEDNHTNIMECAKAPLENTWWAEQDSPFCFLAFCFEYAGVINSGLSYNCSLPLAFDGSCSGLQHFSAMLRDEIGGKAVNLLPSAEYQDIYRIVSDKVNEMLKQDLINGTSTTVETVTDKKTGEITQRTKYGTKVMAQWWLEHGVNRGVTKRSVMTLVYGSKEFGFRDQVLSDTIQPAIDNGKGDMFLNPNQAAGYMAKLIWNAVSGTVVAAVEAMNWLKSAAKLLAAEVKDPKTDTVLRGRCAVHWVTPDGFPVWQEYKKPIQTRLNLMFLGQFRLQPTINTNKDSEIDAHKQESGIAPNFVHSQDGNHLRMTVVWAHEKYGIESFALIHDSFGTIPADAANLFKAVRETFVDTYESCDVLADFYDQFADQLHESQRDKMPALPAKGNLNLRDILKSDFAFA

SEQ ID NO: 1137 - DNA, 2670 bp, synthetic construct
  misc_feature 1..2670: note = Variant of RNA polymerase
  source 1..2670: mol_type = other DNA
atgcaccatcaccatcaccatatgaacacgattaacattgctaagaacgacttctctgacatcgaactggctgctatcccgttcaacactctggctgaccattacggtgagcgtttagctcgcgaacagttggcccttgagcatgagtcttacgagatgggtgaagcacgcttccgcaagatgtttgagcgtcaacttaaagctggtgaggttgcggataacgctgccgccaagcctctcatcactaccctactccctaagatgattgcacgcatcaacgactggtttgaggaagtgaaagctaagcgcggcaagcgcccgacagccttccagttcctgcaagaaatcaagccggaagccgtagcgtacatcaccattaagaccactctggcttgcctgaccagtgaggacaatacaaccgttcaggctgtagcaagcgcaatcggtcgggccattgaggacgaggctcgcttcggtcgtatccgtgaccttgaagctaagcacttcaagaagaacgttgaggaacaactcaacaagcgcgtagggcacgtctacaagaaagcatttatgcaagttgtcgagcacgacatgctctctaagggtctactcggtggcgaggcgtggtcttcgtggcataaggaagactctattcatgtaggagtacgctgcatcgagatgctcattgagtcaaccggaatggttagcttacaccgccaaaatgctggcgtagtgggtcaggactctgagactatcgaactcgcacctgaatacgctgaggctatcgcaacccgtgcaggtgcgctggctggcatctctccgatgttccaaccttgcgtagttcctcctaagccgtggactggcattactggtggtggctattgggctgcggggcgcaaacccctgcagttagtacgtactcgcagtctggcggcgcttcgccgctatgaagaagtgtcgatgccggaggtcatcaaagcagtcaacattgcgcagaatacagcatggcgtattaacaagaaagttctcgacgtagcgaataccatcacccaatggcagcactgtccagtcgcggatgtgcctgcgatggatcgtggcgaaatgccagctcgtccgttggacatcgataccaacgagattgcacttaaagcgtggaagaaagaagcttccgcgttctaccgcaaagacaaagcacgcgttagccgtcgtctgtcaatggagtttatgttatctcaggcgaacaagtttgccaattatgaggcaatctggtttccgcaaaacatggattggcgtgggcgcgtgtacgctgtcccgatgttcaatcctcagggcaacgatatgacgaaaggcctgctgacctttgcgcaggagaaacccattggtgaagacggcttctattggctcaagattcatggcgcaaatacagctggagtggataaagtaccgtttccacaacgcatcaaatttgttgaggataaccatacgaatattatggaatgcgcgaaagcaccgctggaaaacacttggtgggcggaacaggactcgccgttctgttttctggcgttctgctttgagtatgctggcgtcatcaatagtggtctgtcgtacaactgtagcttgcctctggcatttgatggtagttgctccggcctgcaacatttctcagcgatgttacgcgacgaaattggcggcaaagctgtgaatctcctcccatctgcggaataccaggatatttatcgtatcgtcagcgacaaagttaacgagatgctgaaacaagatctgattaacggtacctctaccaccgtggaaacggtgactgataagaagacaggcgaaattacccaacgcacgaaatacgggaccaaagttatggcacagtggtggttagaacacggtgtgaatcgtggcgtcacgaaacgctcggttatgactttggtgtatgggagcaaagagtttggattccgcgatcaagtgctgagtgacaccattcaaccggcgatcgataacggcaaaggtgacatgtttctgaatccgaatcaggctgctggttacatggcgaaactgatctggaacgcagtgtccgggaccgtagtcgcagcagttgaggcgatgaactggctgaaaagtgcggcgaaattacttgctgctgaagtgaaggatcctaagacggatacagttctgcgtggccgctgcgcagtacattgggtgactcccgacggcttccctgtgtggcaggaatacaagaagcctattcagacgcgcttgaacctgatgttcctcggtcagttccgcttacagcctaccattaacaccaacaaagatagcgagattgatgcacacaaacaggagtctggtatcgctcctaactttgtacacagccaagacggtaaccaccttcgtatgactgtagtgtgggcacacgagaagtacggaatcgaatcttttgcactgattcacgactccttcggtaccattccggctgacgctgcgaacctgttcaaagcagtgcgcgaaactttcgttgacacatatgagtcttgtgatgtactggctgatttctacgaccagttcgctgaccagttgcacgagtctcaacgcgacaaaatgccagcacttccggctaaaggtaacttgaacctccgtgacatcttaaaatcggacttcgcgttcgcg

SEQ ID NO: 1138 - protein, 890 aa, synthetic construct
  REGION 1..890: note = Variant of RNA polymerase
MHHHHHHMNTINIAKNDFSDIELAAIPFNTLADHYGERLAREQLALEHESYEMGEARFRKMFERQLKAGEVADNAAAKPLITTLLPKMIARINDWFEEVKAKRGKRPTAFQFLQEIKPEAVAYITIKTTLACLTSEDNTTVQAVASAIGRAIEDEARFGRIRDLEAKHFKKNVEEQLNKRVGHVYKKAFMQVVEHDMLSKGLLGGEAWSSWHKEDSIHVGVRCIEMLIESTGMVSLHRQNAGVVGQDSETIELAPEYAEAIATRAGALAGISPMFQPCVVPPKPWTGITGGGYWAAGRKPLQLVRTRSLAALRRYEEVSMPEVIKAVNIAQNTAWRINKKVLDVANTITQWQHCPVADVPAMDRGEMPARPLDIDTNEIALKAWKKEASAFYRKDKARVSRRLSMEFMLSQANKFANYEAIWFPQNMDWRGRVYAVPMFNPQGNDMTKGLLTFAQEKPIGEDGFYWLKIHGANTAGVDKVPFPQRIKFVEDNHTNIMECAKAPLENTWWAEQDSPFCFLAFCFEYAGVINSGLSYNCSLPLAFDGSCSGLQHFSAMLRDEIGGKAVNLLPSAEYQDIYRIVSDKVNEMLKQDLINGTSTTVETVTDKKTGEITQRTKYGTKVMAQWWLEHGVNRGVTKRSVMTLVYGSKEFGFRDQVLSDTIQPAIDNGKGDMFLNPNQAAGYMAKLIWNAVSGTVVAAVEAMNWLKSAAKLLAAEVKDPKTDTVLRGRCAVHWVTPDGFPVWQEYKKPIQTRLNLMFLGQFRLQPTINTNKDSEIDAHKQESGIAPNFVHSQDGNHLRMTVVWAHEKYGIESFALIHDSFGTIPADAANLFKAVRETFVDTYESCDVLADFYDQFADQLHESQRDKMPALPAKGNLNLRDILKSDFAFA

SEQ ID NO: 1139 - DNA, 2670 bp, synthetic construct
  misc_feature 1..2670: note = Variant of RNA polymerase
  source 1..2670: mol_type = other DNA
atgcaccatcaccatcaccatatgaacacgattaacattgctaagaacgacttctctgacatcgaactggctgctatcccgttcaacactctggctgaccattacggtgagcgtttagctcgcgaacagttggcccttgagcatgagtcttacgagatgggtgaagcacgcttccgcaagatgtttgagcgtcaacttaaagctggtgaggttgcggataacgctgccgccaagcctctcatcactaccctactccctaagatgattgcacgcatcaacgactggtttgaggaagtgaaagctaagcgcggcaagcgcccgacagccttccagttcctgcaagaaatcaagccggaagccgtagcgtacatcaccattaagaccactctggcttgcctgaccagtgaggacaatacaaccgttcaggctgtagcaagcgcaatcggtcgggccattgaggacgaggctcgcttcggtcgtatccgtgaccttgaagctaagcacttcaagaagaacgttgaggaacaactcaacaagcgcgtagggcacgtctacaagaaagcatttatgcaagttgtcgagcacgacatgctctctaagggtctactcggtggcgaggcgtggtcttcgtggcataaggaagactctattcatgtaggagtacgctgcatcgagatgctcattgagtcaaccggaatggttagcttacaccgccaaaatgctggcgtagtgggtcaggactctgagactatcgaactcgcacctgaatacgctgaggctatcgcaacccgtgcaggtgcgctggctggcatctctccgatgttccaaccttgcgtagttcctcctaagccgtggactggcattactggtggtggctattgggctgcggggcgcaaacccctgcagttagtacgtactcgcagtctggcggcgcttcgccgctatgaagaagtgtcgatgccggaggtcatcaaagcagtcaacattgcgcagaatacagcatggcgtattaacaagctggttctcgacgtagcgaataccatcacccaatggcagcactgtccagtcgcggatgtgcctgcgatggatcgtggcgaaatgccagctcgtccgttggacatcgataccaacgagattgcacttaaagcgtggaagaaagaagcttccgcgttctaccgcaaagacaaagcacgcatgagccgtcgtctgtcgatggagtttatgttatctcaggcgaacaagtttgcgaattatgaggcaatctggtttccgcaaaacatggattggcgtgggcgcgtgtacgctgtcccgatgttcaatcctcagggcaacgatatgacgaaaggcctgctgacctttgcgcaggagaaacccattggtgaagacggcttctattggctcaagattcatggcgcaaatacagctggagtggataaagtaccgtttccacaacgcatcaaatttgttgaggataaccatacgaatattatggaatgcgcgaaagcaccgctggaaaacacttggtgggcggaacaggactcgccgttctgttttctggcgttctgctttgagtatgctggcgtcatcaatagtggtctgtcgtacaactgtagcttgcctctggcatttgatggtagttgctccggcctgcaacatttctcagcgatgttacgcgacgaaattggcggcaaagctgtgaatctcctcccatctgcggaataccaggatatttatcgtatcgtcagcgacaaagttaacgagatgctgaaacaagatctgattaacggtacctctaccaccgtggaaacggtgactgataagaagacaggcgaaattacccaacgcacgaaatacgggaccaaagttatggcacagtggtggttagaacacggtgtgaatcgtggcgtcacgaaacgctcggttatgactttggtgtatgggagcaaagagtttggattccgcgatcaagtgctgagtgacaccattcaaccggcgatcgataacggcaaaggtgacatgtttctgaatccgaatcaggctgctggttacatggcgaaactgatctggaacgcagtgtccgggaccgtagtcgcagcagttgaggcgatgaactggctgaaaagtgcggcgaaattacttgctgctgaagtgaaggatcctaagacggatacagttctgcgtggccgctgcgcagtacattgggtgactcccgacggcttccctgtgtggcaggaatacaagaagcctattcagacgcgcttgaacctgatgttcctcggtcagttccgcttacagcctaccattaacaccaacaaagatagcgagattgatgcacacaaacaggagtctggtatcgctcctaactttgtacacagccaagacggtaaccaccttcgtatgactgtagtgtgggcacacgagaagtacggaatcgaatcttttgcactgattcacgactccttcggtaccattccggctgacgctgcgaacctgttcaaagcagtgcgcgaaactttcgttgacacatatgagtcttgtgatgtactggctgatttctacgaccagttcgctgaccagttgcacgagtctcaacgcgacaaaatgccagcacttccggctaaaggtaacttgaacctccgtgacatcttaaaatcggacttcgcgttcgcg

SEQ ID NO: 1140 - protein, 890 aa, synthetic construct
  REGION 1..890: note = Variant of RNA polymerase
MHHHHHHMNTINIAKNDFSDIELAAIPFNTLADHYGERLAREQLALEHESYEMGEARFRKMFERQLKAGEVADNAAAKPLITTLLPKMIARINDWFEEVKAKRGKRPTAFQFLQEIKPEAVAYITIKTTLACLTSEDNTTVQAVASAIGRAIEDEARFGRIRDLEAKHFKKNVEEQLNKRVGHVYKKAFMQVVEHDMLSKGLLGGEAWSSWHKEDSIHVGVRCIEMLIESTGMVSLHRQNAGVVGQDSETIELAPEYAEAIATRAGALAGISPMFQPCVVPPKPWTGITGGGYWAAGRKPLQLVRTRSLAALRRYEEVSMPEVIKAVNIAQNTAWRINKLVLDVANTITQWQHCPVADVPAMDRGEMPARPLDIDTNEIALKAWKKEASAFYRKDKARMSRRLSMEFMLSQANKFANYEAIWFPQNMDWRGRVYAVPMFNPQGNDMTKGLLTFAQEKPIGEDGFYWLKIHGANTAGVDKVPFPQRIKFVEDNHTNIMECAKAPLENTWWAEQDSPFCFLAFCFEYAGVINSGLSYNCSLPLAFDGSCSGLQHFSAMLRDEIGGKAVNLLPSAEYQDIYRIVSDKVNEMLKQDLINGTSTTVETVTDKKTGEITQRTKYGTKVMAQWWLEHGVNRGVTKRSVMTLVYGSKEFGFRDQVLSDTIQPAIDNGKGDMFLNPNQAAGYMAKLIWNAVSGTVVAAVEAMNWLKSAAKLLAAEVKDPKTDTVLRGRCAVHWVTPDGFPVWQEYKKPIQTRLNLMFLGQFRLQPTINTNKDSEIDAHKQESGIAPNFVHSQDGNHLRMTVVWAHEKYGIESFALIHDSFGTIPADAANLFKAVRETFVDTYESCDVLADFYDQFADQLHESQRDKMPALPAKGNLNLRDILKSDFAFA

SEQ ID NO: 1141 - DNA, 2670 bp, synthetic construct
  misc_feature 1..2670: note = Variant of RNA polymerase
  source 1..2670: mol_type = other DNA
atgcaccatcaccatcaccatatgaacacgattaacattgctaagaacgacttctctgacatcgaactggctgctatcccgttcaacactctggctgaccattacggtgagcgtttagctcgcgaacagttggcccttgagcatgagtcttacgagatgggtgaagcacgcttccgcaagatgtttgagcgtcaacttaaagctggtgaggttgcggataacgctgccgccaagcctctcatcactaccctactccctaagatgattgcacgcatcaacgactggtttgaggaagtgaaagctaagcgcggcaagcgcccgacagccttccagttcctgcaagaaatcaagccggaagccgtagcgtacatcaccattaagaccactctggcttgcctaaccagtgcggacaatacaaccgttcaggctgtagcaagcgcaatcggtcgggccattgaggacgaggctcgcttcggtcgtatccgtgaccttgaagctaagcacttcaagaagaacgttgaggaacaactcaacaagcgcgtagggcacgtctacaagaaagcatttatgcaagttgtcgagcacgacatgctctctaagggtctactcggtggcgaggcgtggtcttcgtggcataaggaagactctattcatgtaggagtacgctgcatcgagatgctcattgagtcaaccggaatggttagcttacaccgccaaaatgctggcgtagtgggtcaggactctgagactatcgaactcgcacctgaatacgctgaggctatcgcaacccgtgcaggtgcgctggctggcatctctccgatgttccaaccttgcgtagttcctcctaagccgtggactggcattactggtggtggctattgggctgcggggcgcaaacccctgcagttagtacgtactcgcagtctggcggcgcttcgccgctatgaagaagtgtcgatgccggaggtcatcaaagcagtcaacattgcgcagaatacagcatggcgtattaacaagaaagttctcgacgtagcgaataccatcacccaatggcagcactgtccagtcgcggatgtgcctgcgatggatcgtggcgaaatgccagctcgtccgttggacatcgataccaacgagattgcacttaaagcgtggaagaaagaagcttccgcgttctaccgcaaagacaaagcacgcgttagccgtcgtctgtcaatggagtttatgttatctcaggcgaacaagtttgtcaattatgaggcaatctggtttccgcaaaacatggattggcgtgggcgcgtgtacgctgtcccgatgttcaatcctcagggcaacgatatgacgaaaggcctgctgacctttgcgcaggagaaacccattggtgaagacggcttctattggctcaagattcatggcgcaaatacagctggagtggataaagtaccgtttccacaacgcatcaaatttgttgaggataaccatacgaatattatggaatgcgcgaaagcaccgctggaaaacacttggtgggcggaacaggactcgccgttctgttttctggcgttctgctttgagtatgctggcgtcatcaatagtggtctgtcgtacaactgtagcttgcctctggcatttgatggtagttgctccggcctgcaacatttctcagcgatgttacgcgacgaaattggcggcaaagctgtgaatctcctcccatctgcggaataccaggatatttatcgtatcgtcagcgacaaagttaacgagatgctgaaacaagatctgattaacggtacctctaccaccgtggaaacggtgactgataagaagacaggcgaaattacccaacgcacgaaatacgggaccaaagttatggcacagtggtggttagaacacggtgtgaatcgtggcgtcacgaaacgctcggttatgactttggtgtatgggagcaaagagtttggattccgcgatcaagtgctgagtgacaccattcaaccggcgatcgataacggcaaaggtgacatgtttctgaatccgaatcaggctgctggttacatggcgaaactgatctggaacgcagtgtccgggaccgtagtcgcagcagttgaggcgatgaactggctgaaaagtgcggcgaaattacttgctgctgaagtgaaggatcctaagacggatacagttctgcgtggccgctgcgcagtacattgggtgactcccgacggcttccctgtgtggcaggaatacaagaagcctattcagacgcgcttgaacctgatgttcctcggtcagttccgcttacagcctaccattaacaccaacaaagatagcgagattgatgcacacaaacaggagtctggtatcgctcctaactttgtacacagccaagacggtaaccaccttcgtatgactgtagtgtgggcacacgagaagtacggaatcgaatcttttgcactgattcacgactccttcggtaccattccggctgacgctgcgaacctgttcaaagcagtgcgcgaaactttcgttgacacatatgagtcttgtgatgtactggctgatttctacgaccagttcgctgaccagttgcacgagtctcaacgcgacaaaatgccagcacttccggctaaaggtaacttgaacctccgtgacatcttaaaatcggacttcgcgttcgcg

SEQ ID NO: 1142 - protein, 890 aa, synthetic construct
  REGION 1..890: note = Variant of RNA polymerase
MHHHHHHMNTINIAKNDFSDIELAAIPFNTLADHYGERLAREQLALEHESYEMGEARFRKMFERQLKAGEVADNAAAKPLITTLLPKMIARINDWFEEVKAKRGKRPTAFQFLQEIKPEAVAYITIKTTLACLTSADNTTVQAVASAIGRAIEDEARFGRIRDLEAKHFKKNVEEQLNKRVGHVYKKAFMQVVEHDMLSKGLLGGEAWSSWHKEDSIHVGVRCIEMLIESTGMVSLHRQNAGVVGQDSETIELAPEYAEAIATRAGALAGISPMFQPCVVPPKPWTGITGGGYWAAGRKPLQLVRTRSLAALRRYEEVSMPEVIKAVNIAQNTAWRINKKVLDVANTITQWQHCPVADVPAMDRGEMPARPLDIDTNEIALKAWKKEASAFYRKDKARVSRRLSMEFMLSQANKFVNYEAIWFPQNMDWRGRVYAVPMFNPQGNDMTKGLLTFAQEKPIGEDGFYWLKIHGANTAGVDKVPFPQRIKFVEDNHTNIMECAKAPLENTWWAEQDSPFCFLAFCFEYAGVINSGLSYNCSLPLAFDGSCSGLQHFSAMLRDEIGGKAVNLLPSAEYQDIYRIVSDKVNEMLKQDLINGTSTTVETVTDKKTGEITQRTKYGTKVMAQWWLEHGVNRGVTKRSVMTLVYGSKEFGFRDQVLSDTIQPAIDNGKGDMFLNPNQAAGYMAKLIWNAVSGTVVAAVEAMNWLKSAAKLLAAEVKDPKTDTVLRGRCAVHWVTPDGFPVWQEYKKPIQTRLNLMFLGQFRLQPTINTNKDSEIDAHKQESGIAPNFVHSQDGNHLRMTVVWAHEKYGIESFALIHDSFGTIPADAANLFKAVRETFVDTYESCDVLADFYDQFADQLHESQRDKMPALPAKGNLNLRDILKSDFAFA

SEQ ID NO: 1143 - DNA, 2670 bp, synthetic construct
  misc_feature 1..2670: note = Variant of RNA polymerase
  source 1..2670: mol_type = other DNA
atgcaccatcaccatcaccatatgaacacgattaacattgctaagaacgacttctctgacatcgaactggctgctatcccgttcaacactctggctgaccattacggtgagcgtttagctcgcgaacagttggcccttgagcatgagtcttacgagatgggtgaagcacgcttccgcaagatgtttgagcgtcaacttaaagctggtgaggttgcggataacgctgccgccaagcctctcatcactaccctactccctaagatgattgcacgcatcaacgactggtttgaggaagtgaaagctaagcgcggcaagcgcccgacagccttccagttcctgcaagaaatcaagccggaagccgtagcgtacatcaccattaagaccactctggcttgcctgacccgtgcggacaatacaaccgttcaggctgtagcaagcgcaatcggtcgggccattgaggacgaggctcgcttcggtcgtatccgtgaccttgaagctaagcacttcaagaagaacgttgaggaacaactcaacaagcgcgtagggcacgtctacaagaaagcatttatgcaagttgtcgagaacgacatgctctctaagggtctactcggtggcgaggcgtggtcttcgtggcataaggaagactctattcatgtaggagtacgctgcatcgagatgctcattgagtcaaccggaatggttagcttacaccgccaaaatgctggcgtagtgggtgcagactctgagactatcgaactcgcacctgaatacgctgaggctatcgcaacccgtgcaggtgcgctggctggcatctctccgatgttccaaccttgcgtagttcctcctaagccgtggactggcattactggtggtggctattgggctgcggggcgcaaacccctgcagttagtacgtactcgcagtctggcggcgcttcgccgctatgaagaagtgtcgatgccggaggtcatcaaagcagtcaacattgcgcagaatacagcatggcgtattaacaagctggttctcgacgtagcgaataccatcacccaatggcagcactgtccagtcgcggatgtgcctgcgatggatcgcggcgaaatgccagctcgtccgttggacatcgataccaacgagagtgcacttaaagcgtggaagaaagaagcttccgcgttctaccgcaaagacaaagcacgcgtgagccgtcgtctgtcgatggagtttatgttatctcaggcgaacaagtttgcgaattatgaggcaatctggtttccgcaaaacatggattggcgtgggcgcgtgtacgctgtcccgatgttcaatcctcagggcaacgatatgacgaaaggcctgctgacctttgcgcaggagaaacccattggtgaagacggcttctattggctcaagattcatggcgcaaatacagctggagtggataaagtaccgtttccacaacgcatcaaatttgttgaggataaccatacgaatattatggaatgcgcgaaagcaccgctggaaaacacttggtgggcggaacaggactcgccgttctgttttctggcgttctgctttgagtatgctggcgtcatcaatagtggtctgtcgtacaactgtagcttgcctctggcatttgatggtagttgctccggcctgcaacatttctcagcgatgttacgcgacgaaattggcggcaaagctgtgaatctcctcccatctgcggaataccaggatatttatcgtatcgtcagcgacaaagttaacgagatgctgaaacaagatctgattaacggtacctctaccaccgtggaaacggtgactgataagaagacaggcgaaattacccaacgcacgaaatacgggaccaaagttatggcacagtggtggttagaacacggtgtgaatcgtggcgtcacgaaacgctcggttatgactttggtgtatgggagcaaagagtttggattccgcgatcaagtgctgagtgacaccattcaaccggcgatcgataacggcaaaggtgacatgtttctgaatccgaatcaggctgctggttacatggcgaaactgatctggaacgcagtgtccgggaccgtagtcgcagcagttgaggcgatgaactggctgaaaagtgcggcgaaattacttgctgctgaagtgaaggatcctaagacggatacagttctgcgtggccgctgcgcagtacattgggtgactcccgacggcttccctgtgtggcaggaatacaagaagcctattcagacgcgcttgaacctgatgttcctcggtcagttccgcttacagcctaccattaacaccaacaaagatagcgagattgatgcacacaaacaggagtctggtatcgctcctaactttgtacacagccaagacggtaaccaccttcgtatgactgtagtgtgggcacacgagaagtacggaatcgaatcttttgcactgattcacgactccttcggtaccattccggctgacgctgcgaacctgttcaaagcagtgcgcgaaactttcgttgacacatatgagtcttgtgatgtactggctgatttctacgaccagttcgctgaccagttgcacgagtctcaacgcgacaaaatgccagcacttccggctaaaggtaacttgaacctccgtgacatcttaaaatcggacttcgcgttcgcg

SEQ ID NO: 1144 - protein, 890 aa, synthetic construct
  REGION 1..890: note = Variant of RNA polymerase
MHHHHHHMNTINIAKNDFSDIELAAIPFNTLADHYGERLAREQLALEHESYEMGEARFRKMFERQLKAGEVADNAAAKPLITTLLPKMIARINDWFEEVKAKRGKRPTAFQFLQEIKPEAVAYITIKTTLACLTRADNTTVQAVASAIGRAIEDEARFGRIRDLEAKHFKKNVEEQLNKRVGHVYKKAFMQVVENDMLSKGLLGGEAWSSWHKEDSIHVGVRCIEMLIESTGMVSLHRQNAGVVGADSETIELAPEYAEAIATRAGALAGISPMFQPCVVPPKPWTGITGGGYWAAGRKPLQLVRTRSLAALRRYEEVSMPEVIKAVNIAQNTAWRINKLVLDVANTITQWQHCPVADVPAMDRGEMPARPLDIDTNESALKAWKKEASAFYRKDKARVSRRLSMEFMLSQANKFANYEAIWFPQNMDWRGRVYAVPMFNPQGNDMTKGLLTFAQEKPIGEDGFYWLKIHGANTAGVDKVPFPQRIKFVEDNHTNIMECAKAPLENTWWAEQDSPFCFLAFCFEYAGVINSGLSYNCSLPLAFDGSCSGLQHFSAMLRDEIGGKAVNLLPSAEYQDIYRIVSDKVNEMLKQDLINGTSTTVETVTDKKTGEITQRTKYGTKVMAQWWLEHGVNRGVTKRSVMTLVYGSKEFGFRDQVLSDTIQPAIDNGKGDMFLNPNQAAGYMAKLIWNAVSGTVVAAVEAMNWLKSAAKLLAAEVKDPKTDTVLRGRCAVHWVTPDGFPVWQEYKKPIQTRLNLMFLGQFRLQPTINTNKDSEIDAHKQESGIAPNFVHSQDGNHLRMTVVWAHEKYGIESFALIHDSFGTIPADAANLFKAVRETFVDTYESCDVLADFYDQFADQLHESQRDKMPALPAKGNLNLRDILKSDFAFA

SEQ ID NO: 1145 - DNA, 2670 bp, synthetic construct
  misc_feature 1..2670: note = Variant of RNA polymerase
  source 1..2670: mol_type = other DNA
atgcaccatcaccatcaccatatgaacacgattaacattgctaagaacgacttctctgacatcgaactggctgctatcccgttcaacactctggctgaccattacggtgagcgtttagctcgcgaacagttggcccttgagcatgagtcttacgagatgggtgaagcacgcttccgcaagatgtttgagcgtcaacttaaagctggtgaggttgcggataacgctgccgccaagcctctcatcactaccctactccctaagatgattgcacgcatcaacgactggtttgaggaagtgaaagctaagcgcggcaagcgcccgacagccttccagttcctgcaagaaatcaagccggaagccgtagcgtacatcaccattaagaccactctggcttgcctgaccagtgcggacaatacaaccgttcaggctgtagcaagcgcaatcggtcgggccattgaggacgaggctcgcttcggtcgtatccgtgaccttgaagctaagcacttcaagaagaacgttgaggaacaactcaacaagcgcgtagggcacgtctacaagaaagcatttatgcaagttgtcgagcacgacatgctctctaagggtctactcggtggcgaggcgtggtcttcgtggcataaggaagactctattcatgtaggagtacgctgcatcgagatgctcattgagtcaaccggaatggttagcttacaccgccaaaatgctggcgtagtgggtgcagactctgagactatcgaactcgcacctgaatacgctgaggctatcgcaacccgtgcaggtgcgctggctggcatctctccgatgttccaaccttgcgtagttcctcctaagccgtggactggcattactggtggtggctattgggctgcggggcgcaaacccctgcagttagtacgtactcgcagtctggcggcgcttcgccgctatgaagaagtgtcgatgccggaggtcatcaaagcagtcaacattgcgcagaatacagcatggcgtattaacaagctggttctcgacgtagcgaataccatcacccaatggcagcactgtccagtcgcggatgtgcctgcgatggatcacggcgaaatgccagctcgtccgttggacatcgataccaacgagattgcacttaaagcgtggaagaaagaagcttccgcgttctaccgcaaagacaaagcacgcgttagccgtcgtctgtcaatggagtttatgttatctcaggcgaacaagtttgcgaattatgaggcaatctggtttccgcaaaacatggattggcgtgggcgcgtgtacgctgtcccgatgttcaatcctcagggcaacgatatgacgaaaggcctgctgacctttgcgcaggagaaacccattggtgaagacggcttctattggctcaagattcatggcgcaaatacagctggagtggataaagtaccgtttccacaacgcatcaaatttgttgaggataaccatacgaatattatggaatgcgcgaaagcaccgctggaaaacacttggtgggcggaacaggactcgccgttctgttttctggcgttctgctttgagtatgctggcgtcatcaatagtggtctgtcgtacaactgtagcttgcctctggcatttgatggtagttgctccggcctgcaacatttctcagcgatgttacgcgacgaaattggcggcaaagctgtgaatctcctcccatctgcggaataccaggatatttatcgtatcgtcagcgacaaagttaacgagatgctgaaacaagatctgattaacggtacctctaccaccgtggaaacggtgactgataagaagacaggcgaaattacccaacgcacgaaatacgggaccaaagttatggcacagtggtggttagaacacggtgtgaatcgtggcgtcacgaaacgctcggttatgactttggtgtatgggagcaaagagtttggattccgcgatcaagtgctgagtgacaccattcaaccggcgatcgataacggcaaaggtgacatgtttctgaatccgaatcaggctgctggttacatggcgaaactgatctggaacgcagtgtccgggaccgtagtcgcagcagttgaggcgatgaactggctgaaaagtgcggcgaaattacttgctgctgaagtgaaggatcctaagacggatacagttctgcgtggccgctgcgcagtacattgggtgactcccgacggcttccctgtgtggcaggaatacaagaagcctattcagacgcgcttgaacctgatgttcctcggtcagttccgcttacagcctaccattaacaccaacaaagatagcgagattgatgcacacaaacaggagtctggtatcgctcctaactttgtacacagccaagacggtaaccaccttcgtatgactgtagtgtgggcacacgagaagtacggaatcgaatcttttgcactgattcacgactccttcggtaccattccggctgacgctgcgaacctgttcaaagcagtgcgcgaaactttcgttgacacatatgagtcttgtgatgtactggctgatttctacgaccagttcgctgaccagttgcacgagtctcaacgcgacaaaatgccagcacttccggctaaaggtaacttgaacctccgtgacatcttaaaatcggacttcgcgttcgcg

SEQ ID NO: 1146 - protein, 890 aa, synthetic construct
  REGION 1..890: note = Variant of RNA polymerase
MHHHHHHMNTINIAKNDFSDIELAAIPFNTLADHYGERLAREQLALEHESYEMGEARFRKMFERQLKAGEVADNAAAKPLITTLLPKMIARINDWFEEVKAKRGKRPTAFQFLQEIKPEAVAYITIKTTLACLTSADNTTVQAVASAIGRAIEDEARFGRIRDLEAKHFKKNVEEQLNKRVGHVYKKAFMQVVEHDMLSKGLLGGEAWSSWHKEDSIHVGVRCIEMLIESTGMVSLHRQNAGVVGADSETIELAPEYAEAIATRAGALAGISPMFQPCVVPPKPWTGITGGGYWAAGRKPLQLVRTRSLAALRRYEEVSMPEVIKAVNIAQNTAWRINKLVLDVANTITQWQHCPVADVPAMDHGEMPARPLDIDTNEIALKAWKKEASAFYRKDKARVSRRLSMEFMLSQANKFANYEAIWFPQNMDWRGRVYAVPMFNPQGNDMTKGLLTFAQEKPIGEDGFYWLKIHGANTAGVDKVPFPQRIKFVEDNHTNIMECAKAPLENTWWAEQDSPFCFLAFCFEYAGVINSGLSYNCSLPLAFDGSCSGLQHFSAMLRDEIGGKAVNLLPSAEYQDIYRIVSDKVNEMLKQDLINGTSTTVETVTDKKTGEITQRTKYGTKVMAQWWLEHGVNRGVTKRSVMTLVYGSKEFGFRDQVLSDTIQPAIDNGKGDMFLNPNQAAGYMAKLIWNAVSGTVVAAVEAMNWLKSAAKLLAAEVKDPKTDTVLRGRCAVHWVTPDGFPVWQEYKKPIQTRLNLMFLGQFRLQPTINTNKDSEIDAHKQESGIAPNFVHSQDGNHLRMTVVWAHEKYGIESFALIHDSFGTIPADAANLFKAVRETFVDTYESCDVLADFYDQFADQLHESQRDKMPALPAKGNLNLRDILKSDFAFA

SEQ ID NO: 1147 - DNA, 2670 bp, synthetic construct
  misc_feature 1..2670: note = Variant of RNA polymerase
  source 1..2670: mol_type = other DNA
atgcaccatcaccatcaccatatgaacacgattaacattgctaagaacgacttctctgacatcgaactggctgctatcccgttcaacactctggctgaccattacggtgagcgtttagctcgcgaacagttggcccttgagcatgagtcttacgagatgggtgaagcacgcttccgcaagatgtttgagcgtcaacttaaagctggtgaggttgcggataacgctgccgccaagcctctcatcactaccctactccctaagatgattgcacgcatcaacgactggtttgaggaagtgaaagctaagcgcggcaagcgcccgacagccttccagttcctgcaagaaatcaagccggaagccgtagcgtacatcaccattaagaccactctggcttgcctgaccagtgcggacaatacaaccgttcaggctgtagcaagcgcaatcggtcgggccattgaggacgaggctcgcttcggtcgtatccgtgaccttgaagctaagcacttcaagaagaacgttgaggaacaactcaacaagcgcgtagggcacgtctacaagaaagcatttatgcaagttgtcgagcacgacatgctctctaagggtctactcggtggcgaggcgtggtcttcgtggcataaggaagactctattcatgtaggagtacgctgcatcgagatgctcattgagtcaaccggaatggttagcttacaccgccaaaatgctggcgtagtgggtcaggactctgagactatcgaactcgcacctgaatacgctgaggctatcgcaacccgtgcaggtgcgctggctggcatctctccgatgttccaaccttgcgtagttcctcctaagccgtggactggcattactggtggtggctattgggctgcggggcgcaaacccctgcagttagtacgtactcgcagtctggcggcgcttcgccgctatgaagaagtgtcgatgccggaggtcatcaaagcagtcaacattgcgcagaatacagcatggcgtattaacaagctggttctcgacgtagcgaataccatcacccaatggcagcactgtccagtcgcggatgtgcctgcgatggatcgtggcgaaatgccagctcgtccgttggacatcgataccaacgagagtgcacttaaagcgtggaagaaagaagcttccgcgttctaccgcaaagacaaagcacgcatgagccgtcgtctgtcgatggagtttatgttatctcaggcgaacaagtttgcgaattatgaggcaatctggtttccgcaaaacatggattggcgtgggcgcgtgtacgctgtcccgatgttcaatcctcagggcaacgatatgacgaaaggcctgctgacctttgcgcaggagaaacccattggtgaagacggcttctattggctcaagattcatggcgcaaatacagctggagtggataaagtaccgtttccacaacgcatcaaatttgttgaggataaccatacgaatattatggaatgcgcgaaagcaccgctggaaaacacttggtgggcggaacaggactcgccgttctgttttctggcgttctgctttgagtatgctggcgtcatcaatagtggtctgtcgtacaactgtagcttgcctctggcatttgatggtagttgctccggcctgcaacatttctcagcgatgttacgcgacgaaattggcggcaaagctgtgaatctcctcccatctgcggaataccaggatatttatcgtatcgtcagcgacaaagttaacgagatgctgaaacaagatctgattaacggtacctctaccaccgtggaaacggtgactgataagaagacaggcgaaattacccaacgcacgaaatacgggaccaaagttatggcacagtggtggttagaacacggtgtgaatcgtggcgtcacgaaacgctcggttatgactttggtgtatgggagcaaagagtttggattccgcgatcaagtgctgagtgacaccattcaaccggcgatcgataacggcaaaggtgacatgtttctgaatccgaatcaggctgctggttacatggcgaaactgatctggaacgcagtgtccgggaccgtagtcgcagcagttgaggcgatgaactggctgaaaagtgcggcgaaattacttgctgctgaagtgaaggatcctaagacggatacagttctgcgtggccgctgcgcagtacattgggtgactcccgacggcttccctgtgtggcaggaatacaagaagcctattcagacgcgcttgaacctgatgttcctcggtcagttccgcttacagcctaccattaacaccaacaaagatagcgagattgatgcacacaaacaggagtctggtatcgctcctaactttgtacacagccaagacggtaaccaccttcgtatgactgtagtgtgggcacacgagaagtacggaatcgaatcttttgcactgattcacgactccttcggtaccattccggctgacgctgcgaacctgttcaaagcagtgcgcgaaactttcgttgacacatatgagtcttgtgatgtactggctgatttctacgaccagttcgctgaccagttgcacgagtctcaacgcgacaaaatgccagcacttccggctaaaggtaacttgaacctccgtgacatcttaaaatcggacttcgcgttcgcg

SEQ ID NO: 1148 - protein, 890 aa, synthetic construct
  REGION 1..890: note = Variant of RNA polymerase
MHHHHHHMNTINIAKNDFSDIELAAIPFNTLADHYGERLAREQLALEHESYEMGEARFRKMFERQLKAGEVADNAAAKPLITTLLPKMIARINDWFEEVKAKRGKRPTAFQFLQEIKPEAVAYITIKTTLACLTSADNTTVQAVASAIGRAIEDEARFGRIRDLEAKHFKKNVEEQLNKRVGHVYKKAFMQVVEHDMLSKGLLGGEAWSSWHKEDSIHVGVRCIEMLIESTGMVSLHRQNAGVVGQDSETIELAPEYAEAIATRAGALAGISPMFQPCVVPPKPWTGITGGGYWAAGRKPLQLVRTRSLAALRRYEEVSMPEVIKAVNIAQNTAWRINKLVLDVANTITQWQHCPVADVPAMDRGEMPARPLDIDTNESALKAWKKEASAFYRKDKARMSRRLSMEFMLSQANKFANYEAIWFPQNMDWRGRVYAVPMFNPQGNDMTKGLLTFAQEKPIGEDGFYWLKIHGANTAGVDKVPFPQRIKFVEDNHTNIMECAKAPLENTWWAEQDSPFCFLAFCFEYAGVINSGLSYNCSLPLAFDGSCSGLQHFSAMLRDEIGGKAVNLLPSAEYQDIYRIVSDKVNEMLKQDLINGTSTTVETVTDKKTGEITQRTKYGTKVMAQWWLEHGVNRGVTKRSVMTLVYGSKEFGFRDQVLSDTIQPAIDNGKGDMFLNPNQAAGYMAKLIWNAVSGTVVAAVEAMNWLKSAAKLLAAEVKDPKTDTVLRGRCAVHWVTPDGFPVWQEYKKPIQTRLNLMFLGQFRLQPTINTNKDSEIDAHKQESGIAPNFVHSQDGNHLRMTVVWAHEKYGIESFALIHDSFGTIPADAANLFKAVRETFVDTYESCDVLADFYDQFADQLHESQRDKMPALPAKGNLNLRDILKSDFAFA

SEQ ID NO: 1149 - DNA, 2670 bp, synthetic construct
  misc_feature 1..2670: note = Variant of RNA polymerase
  source 1..2670: mol_type = other DNA
atgcaccatcaccatcaccatatgaacacgattaacattgctaagaacgacttctctgacatcgaactggctgctatcccgttcaacactctggctgaccattacggtgagcgtttagctcgcgaacagttggcccttgagcatgagtcttacgagatgggtgaagcacgcttccgcaagatgtttgagcgtcaacttaaagctggtgaggttgcggataacgctgccgccaagcctctcatcactaccctactccctaagatgattgcacgcatcaacgactggtttgaggaagtgaaagctaagcgcggcaagcgcccgacagccttccagttcctgcaagaaatcaagccggaagccgtagcgtacatcaccattaagaccactctggcttgcctaaccagtgcggacaatacaaccgttcaggctgtagcaagcgcaatcggtcgggccattgaggacgaggctcgcttcggtcgtatccgtgaccttgaagctaagcacttcaagaagaacgttgaggaacaactcaacaagcgcgtagggcacgtctacaagaaagcatttatgcaagttgtcgagcacgacatgctctctaagggtctactcggtggcgaggcgtggtcttcgtggcataaggaagactctattcatgtaggagtacgctgcatcgagatgctcattgagtcaaccggaatggttagcttacaccgccaaaatgctggcgtagtaggtcaagactctgagactatcgaactcgcacctgaatacgctgaggctatcgcaacccgtgcaggtgcgctggctggcatctctccgatgttccaaccttgcgtagttcctcctaagccgtggactggcattactggtggtggctattgggctgcggggcgcaaacccctgcagttagtacgtactcgcagtctggcggcgcttcgccgctatgaagaagtgtcgatgccggaggtcatcaaagcagtcaacattgcgcagaatacagcatggcgtattaacaagaaagttctcgacgtagcgaataccatcacccaatggcagcactgtccagtcgcggatgtgcctgcgatggatcgtggcgaaatgccagctcgtccgttggacatcgataccaacgagattgcacttaaagcgtggaagaaagaagcttccgcgttctaccgcaaagacaaagcacgcatgagccgtcgtctgctgatggagtttatgttatctcaggcgaacaagtttgtcaattatgaggcaatctggtttccgcaaaacatggattggcgtgggcgcgtgtacgctgtcccgatgttcaatcctcagggcaacgatatgacgaaaggcctgctgacctttgcgcaggagaaacccattggtgaagacggcttctattggctcaagattcatggcgcaaatacagctggagtggataaagtaccgtttccacaacgcatcaaatttgttgaggataaccatacgaatattatggaatgcgcgaaagcaccgctggaaaacacttggtgggcggaacaggactcgccgttccgctttctggcgttctgctttgagtatgctggcgtcatcaatagtggtctgtcgtacaactgtagcttgcctctggcatttgatggtagttgctccggcctgcaacatttctcagcgatgttacgcgacgaaattggcggcaaagctgtgaatctcctcccatctgcggaataccaggatatttatcgtatcgtcagcgacaaagttaacgagatgctgaaacaagatctgattaacggtacctctaccaccgtggaaacggtgactgattataagacaggcgaaattacccaacgcacgaaatacgggaccaaagttatggcacagtggtggttagaacacggtgtgaatcgtggcgtcacgaaacgctcggttatgactttggtgtatgggagcaaagagtttggattccgcgatcaagtgctgagtgacaccattcaaccggcgatcgataacggcaaaggtgacatgtttctgaatccgaatcaggctgctggttacatggcgaaactgatctggaacgcagtgtccgggaccgtagtcgcagcagttgaggcgatgaactggctgaaaagtgcggcgaaattacttgctgctgaagtgaaggatcctaagacggatacagttctgcgtggccgctgcgcagtacattgggtgactcccgacggcttccctgtgtggcaggaatacaagaagcctattcagacgcgcttgaacctgatgttcctcggtcagttccgcttacagcctaccattaacaccaacaaagatagcgagattgatgcacacaaacaggagtctggtatcgctcctaactttgtacacagccaagacggtaaccaccttcgtatgactgtagtgtgggcacacgagaagtacggaatcgaatcttttgcactgattcacgactccttcggtaccattccggctgacgctgcgaacctgttcaaagcagtgcgcgaaactttcgttgacacatatgagtcttgtgatgtactggctgatttctacgaccagttcgctgaccagttgcacgagtctcaacgcgacaaaatgccagcacttccggctaaaggtaacttgaacctccgtgacatcttaaaatcggacttcgcgttcgcg

SEQ ID NO: 1150 - protein, 890 aa, synthetic construct
  REGION 1..890: note = Variant of RNA polymerase
MHHHHHHMNTINIAKNDFSDIELAAIPFNTLADHYGERLAREQLALEHESYEMGEARFRKMFERQLKAGEVADNAAAKPLITTLLPKMIARINDWFEEVKAKRGKRPTAFQFLQEIKPEAVAYITIKTTLACLTSADNTTVQAVASAIGRAIEDEARFGRIRDLEAKHFKKNVEEQLNKRVGHVYKKAFMQVVEHDMLSKGLLGGEAWSSWHKEDSIHVGVRCIEMLIESTGMVSLHRQNAGVVGQDSETIELAPEYAEAIATRAGALAGISPMFQPCVVPPKPWTGITGGGYWAAGRKPLQLVRTRSLAALRRYEEVSMPEVIKAVNIAQNTAWRINKKVLDVANTITQWQHCPVADVPAMDRGEMPARPLDIDTNEIALKAWKKEASAFYRKDKARMSRRLLMEFMLSQANKFVNYEAIWFPQNMDWRGRVYAVPMFNPQGNDMTKGLLTFAQEKPIGEDGFYWLKIHGANTAGVDKVPFPQRIKFVEDNHTNIMECAKAPLENTWWAEQDSPFRFLAFCFEYAGVINSGLSYNCSLPLAFDGSCSGLQHFSAMLRDEIGGKAVNLLPSAEYQDIYRIVSDKVNEMLKQDLINGTSTTVETVTDYKTGEITQRTKYGTKVMAQWWLEHGVNRGVTKRSVMTLVYGSKEFGFRDQVLSDTIQPAIDNGKGDMFLNPNQAAGYMAKLIWNAVSGTVVAAVEAMNWLKSAAKLLAAEVKDPKTDTVLRGRCAVHWVTPDGFPVWQEYKKPIQTRLNLMFLGQFRLQPTINTNKDSEIDAHKQESGIAPNFVHSQDGNHLRMTVVWAHEKYGIESFALIHDSFGTIPADAANLFKAVRETFVDTYESCDVLADFYDQFADQLHESQRDKMPALPAKGNLNLRDILKSDFAFA

SEQ ID NO: 1151 - DNA, 2670 bp, synthetic construct
  misc_feature 1..2670: note = Variant of RNA polymerase
  source 1..2670: mol_type = other DNA
atgcaccatcaccatcaccatatgaacacgattaacattgctaagaacgacttctctgacatcgaactggctgctatcccgttcaacactctggctgaccattacggtgagcgtttagctcgcgaacagttggcccttgagcatgagtcttacgagatgggtgaagcacgcttccgcaagatgtttgagcgtcaacttaaagctggtgaggttgcggataacgctgccgccaagcctctcatcactaccctactccctaagatgattgcacgcatcaacgactggtttgaggaagtgaaagctaagcgcggcaagcgcccgacagccttccagttcctgcaagaaatcaagccggaagccgtagcgtacatcaccattaagaccactctggcttgcctaaccagtgcggacaatacaaccgttcaggctgtagcaagcgcaatcggtcgggccattgaggacgaggctcgcttcggtcgtatccgtgaccttgaagctaagcacttcaagaagaacgttgaggaacaactcaacaagcgcgtagggcacgtctacaagaaagcatttatgcaagttgtcgagcacgacatgctctctaagggtctactcggtggcgaggcgtggtcttcgtggcataaggaagactctattcatgtaggagtacgctgcatcgagatgctcattgagtcaaccggaatggttagcttacaccgccaaaatgctggcgtagtaggtcaagactctgagactatcgaactcgcacctgaatacgctgaggctatcgcaacccgtgcaggtgcgctggctggcatctctccgatgttccaaccttgcgtagttcctcctaagccgtggactggcattactggtggtggctattgggctgcggggcgcaaacccctgcagttagtacgtactcgcagtctggcggcgcttcgccgctatgaagaagtgtcgatgccggaggtcatcaaagcagtcaacattgcgcagaatacagcatggcgtattaacaagaaagttctcgacgtagcgaataccatcacccaatggcagcactgtccagtcgcggatgtgcctgcgatggatcgtggcgaaatgccagctcgtccgttggacatcgataccaacgagattgcacttaaagcgtggaagaaagaagcttccgcgttctaccgcaaagacaaagcacgcgtgagccgtcgtctgctgatggagtttatgttatctcaggcgaacaagtttgcgaattatgaggcaatctggtttccgcaaaacatggattggcgtgggcgcgtgtacgctgtcccgatgttcaatcctcagggcaacgatatgacgaaaggcctgctgacctttgcgcaggagaaacccattggtgaagacggcttctattggctcaagattcatggcgcaaatacagctggagtggataaagtaccgtttccacaacgcatcaaatttgttgaggataaccatacgaatattatggaatgcgcgaaagcaccgctggaaaacacttggtgggcggaacaggactcgccgttccgctttctggcgttctgctttgagtatgctggcgtcatcaatagtggtctgtcgtacaactgtagcttgcctctggcatttgatggtagttgctccggcctgcaacatttctcagcgatgttacgcgacgaaattggcggcaaagctgtgaatctcctcccatctgcggaataccaggatatttatcgtatcgtcagcgacaaagttaacgagatgctgaaacaagatctgattaacggtacctctaccaccgtggaaacggtgactgataagaagacaggcgaaattacccaacgcacgaaatacgggaccaaagttatggcacagtggtggttagaacacggtgtgaatcgtggcgtcacgaaacgctcggttatgactttggtgtatgggagcaaagagtttggattccgcgatcaagtgctgagtgacaccattcaacgtgcgatcgataacggcaaaggtgacatgtttctgaatccgaatcaggctgctggttacatggcgaaactgatctggaacgcagtgtccgggaccgtagtcgcagcagttgaggcgatgaactggctgaaaagtgcggcgaaattacttgctgctgaagtgaaggatgagaagacggatacagttctgcgtggccgctgcgcagtacattgggtgactcccgacggcttccctgtgtggcaggaatacaagaagcctattcagacgcgcttgaacctgatgttcctcggtcagttccgcttacagcctaccattaacaccaacaaagatagcgagattgatgcacacaaacaggagtctggtatcgctcctaactttgtacacagccaagacggtaaccaccttcgtatgactgtagtgtgggcacacgagaagtacggaatcgaatcttttgcactgattcacgactccttcggtaccattccggctgacgctgcgaacctgttcaaagcagtgcgcgaaactttcgttgacacatatgagtcttgtgatgtactggctgatttctacgaccagttcgctgaccagttgcacgagtctcaacgcgacaaaatgccagcacttccggctaaaggtaacttgaacctccgtgacatcttaaaatcggacttcgcgttcgcg

SEQ ID NO: 1152 - protein, 890 aa, synthetic construct
  REGION 1..890: note = Variant of RNA polymerase
MHHHHHHMNTINIAKNDFSDIELAAIPFNTLADHYGERLAREQLALEHESYEMGEARFRKMFERQLKAGEVADNAAAKPLITTLLPKMIARINDWFEEVKAKRGKRPTAFQFLQEIKPEAVAYITIKTTLACLTSADNTTVQAVASAIGRAIEDEARFGRIRDLEAKHFKKNVEEQLNKRVGHVYKKAFMQVVEHDMLSKGLLGGEAWSSWHKEDSIHVGVRCIEMLIESTGMVSLHRQNAGVVGQDSETIELAPEYAEAIATRAGALAGISPMFQPCVVPPKPWTGITGGGYWAAGRKPLQLVRTRSLAALRRYEEVSMPEVIKAVNIAQNTAWRINKKVLDVANTITQWQHCPVADVPAMDRGEMPARPLDIDTNEIALKAWKKEASAFYRKDKARVSRRLLMEFMLSQANKFANYEAIWFPQNMDWRGRVYAVPMFNPQGNDMTKGLLTFAQEKPIGEDGFYWLKIHGANTAGVDKVPFPQRIKFVEDNHTNIMECAKAPLENTWWAEQDSPFRFLAFCFEYAGVINSGLSYNCSLPLAFDGSCSGLQHFSAMLRDEIGGKAVNLLPSAEYQDIYRIVSDKVNEMLKQDLINGTSTTVETVTDKKTGEITQRTKYGTKVMAQWWLEHGVNRGVTKRSVMTLVYGSKEFGFRDQVLSDTIQRAIDNGKGDMFLNPNQAAGYMAKLIWNAVSGTVVAAVEAMNWLKSAAKLLAAEVKDEKTDTVLRGRCAVHWVTPDGFPVWQEYKKPIQTRLNLMFLGQFRLQPTINTNKDSEIDAHKQESGIAPNFVHSQDGNHLRMTVVWAHEKYGIESFALIHDSFGTIPADAANLFKAVRETFVDTYESCDVLADFYDQFADQLHESQRDKMPALPAKGNLNLRDILKSDFAFA

SEQ ID NO: 1153 - DNA, 2670 bp, synthetic construct
  misc_feature 1..2670: note = Variant of RNA polymerase
  source 1..2670: mol_type = other DNA
atgcaccatcaccatcaccatatgaacacgattaacattgctaagaacgacttctctgacatcgaactggctgctatcccgttcaacactctggctgaccattacggtgagcgtttagctcgcgaacagttggcccttgagcatgagtcttacgagatgggtgaagcacgcttccgcaagatgtttgagcgtcaacttaaagctggtgaggttgcggataacgctgccgccaagcctctcatcactaccctactccctaagatgattgcacgcatcaacgactggtttgaggaagtgaaagctaagcgcggcaagcgcccgacagccttccagttcctgcaagaaatcaagccggaagccgtagcgtacatcaccattaagaccactctggcttgcctaaccagtgcggacaatacaaccgttcaggctgtagcaagcgcaatcggtcgggccattgaggacgaggctcgcttcggtcgtatccgtgaccttgaagctaagcacttcaagaagaacgttgaggaacaactcaacaagcgcgtagggcacgtctacaagaaagcatttatgcaagttgtcgagcacgacatgctctctaagggtctactcggtggcgaggcgtggtcttcgtggcataaggaagactctattcatgtaggagtacgctgcatcgagatgctcattgagtcaaccggaatggttagcttacaccgccaaaatgctggcgtagtaggtcaagactctgagactatcgaactcgcacctgaatacgctgaggctatcgcaacccgtgcaggtgcgctggctggcatctctccgatgttccaaccttgcgtagttcctcctaagccgtggactggcattactggtggtggctattgggctgcggggcgcaaacccctgcagttagtacgtactcgcagtctggcggcgcttcgccgctatgaagaagtgtcgatgccggaggtcatcaaagcagtcaacattgcgcagaatacagcatggcgtattaacaagaaagttctcgacgtagcgaataccatcacccaatggcagcactgtccagtcgcggatgtgcctgcgatggatcgtggcgaaatgccagctcgtccgttggacatcgataccaacgagattgcacttaaagcgtggaagaaagaagcttccgcgttctaccgcaaagacaaagcacgcgttagccgtcgtctgtcaatggagtttatgttatctcaggcgaacaagtttgcgaattatgaggcaatctggtttccgcaaaacatggattggcgtgggcgcgtgtacgctgtcccgatgttcaatcctcagggcaacgatatgacgaaaggcctgctgacctttgcgcaggagaaacccattggtgaagacggcttctattggctcaagattcatggcgcaaatacagctggagtggataaagtaccgtttccacaacgcatcaaatttgttgaggataaccatacgaatattatggaatgcgcgaaagcaccgctggaaaacacttggtgggcggaacaggactcgccgttccgctttctggcgttctgctttgagtatgctggcgtcatcaatagtggtctgtcgtacaactgtagcttgcctctggcatttgatggtagttgctccggcctgcaacatttctcagcgatgttacgcgacgaaattggcggcaaagctgtgaatctcctcccatctgcggaataccaggatatttatcgtatcgtcagcgacaaagttaacgagatgctgaaacaagatctgattaacggtacctctaccaccgtggaaacggtgactgataagaagacaggcgaaattacccaacgcacgaaatacgggaccaaagttatggcacagtggtggttagaacacggtgtgaatcgtggcgtcacgaaacgcccggttatgactttggtgtatgggagcaaagagtttggattccgcgatcaagtgctgagtgacaccattcaacctgcgatcgataacggcaaaggtgacatgtttctgaatccgaatcaggctgctggttacatggcgaaactgatctggaacgcagtgtccgggaccgtagtcgcagcagttgaggcgatgaactggctgaaaagtgcggcgaaattacttgctgctgaagtgaaggatcctaagacggatacagttctgcgtggccgctgcgcagtacattgggtgactcccgacggcttccctgtgtggcaggaatacaagaagcctattcgtacgcgcttgaaccagatgttcctcggtcagttccgcttacagcctaccattaacaccaacaaagatagcgagattgatgcacacaaacaggagtctggtatcgctcctaactttgtacacagccaggacggtaaccaccttcgtatgactgtagtgtgggcacacgagaagtacggaatcgaatcttttgcactgattcacgactccttcggtaccattccggctgacgctgcgaacctgttcaaagcagtgcgcgaaactttcgttgacacatatgagtcttgtgatgtactggctgatttctacgaccagttcgctgaccagttgcacgagtctcaacgcgacaaaatgccagcacttccggctaaaggtaacttgaacctccgtgacatcttaaaatcggacttcgcgttcgcg

SEQ ID NO: 1154 - protein, 890 aa, synthetic construct
  REGION 1..890: note = Variant of RNA polymerase
MHHHHHHMNTINIAKNDFSDIELAAIPFNTLADHYGERLAREQLALEHESYEMGEARFRKMFERQLKAGEVADNAAAKPLITTLLPKMIARINDWFEEVKAKRGKRPTAFQFLQEIKPEAVAYITIKTTLACLTSADNTTVQAVASAIGRAIEDEARFGRIRDLEAKHFKKNVEEQLNKRVGHVYKKAFMQVVEHDMLSKGLLGGEAWSSWHKEDSIHVGVRCIEMLIESTGMVSLHRQNAGVVGQDSETIELAPEYAEAIATRAGALAGISPMFQPCVVPPKPWTGITGGGYWAAGRKPLQLVRTRSLAALRRYEEVSMPEVIKAVNIAQNTAWRINKKVLDVANTITQWQHCPVADVPAMDRGEMPARPLDIDTNEIALKAWKKEASAFYRKDKARVSRRLSMEFMLSQANKFANYEAIWFPQNMDWRGRVYAVPMFNPQGNDMTKGLLTFAQEKPIGEDGFYWLKIHGANTAGVDKVPFPQRIKFVEDNHTNIMECAKAPLENTWWAEQDSPFRFLAFCFEYAGVINSGLSYNCSLPLAFDGSCSGLQHFSAMLRDEIGGKAVNLLPSAEYQDIYRIVSDKVNEMLKQDLINGTSTTVETVTDKKTGEITQRTKYGTKVMAQWWLEHGVNRGVTKRPVMTLVYGSKEFGFRDQVLSDTIQPAIDNGKGDMFLNPNQAAGYMAKLIWNAVSGTVVAAVEAMNWLKSAAKLLAAEVKDPKTDTVLRGRCAVHWVTPDGFPVWQEYKKPIRTRLNQMFLGQFRLQPTINTNKDSEIDAHKQESGIAPNFVHSQDGNHLRMTVVWAHEKYGIESFALIHDSFGTIPADAANLFKAVRETFVDTYESCDVLADFYDQFADQLHESQRDKMPALPAKGNLNLRDILKSDFAFA

SEQ ID NO: 1155 - DNA, 2670 bp, synthetic construct
  misc_feature 1..2670: note = Variant of RNA polymerase
  source 1..2670: mol_type = other DNA
atgcaccatcaccatcaccatatgaacacgattaacattgctaagaacgacttctctgacatcgaactggctgctatcccgttcaacactctggctgaccattacggtgagcgtttagctcgcgaacagttggcccttgagcatgagtcttacgagatgggtgaagcacgcttccgcaagatgtttgagcgtcaacttaaagctggtgaggttgcggataacgctgccgccaagcctctcatcactaccctactccctaagatgattgcacgcatcaacgactggtttgaggaagtgaaagctaagcgcggcaagcgcccgacagccttccagttcctgcaagaaatcaagccggaagccgtagcgtacatcaccattaagaccactctggcttgcctaaccagtgcggacaatacaaccgttcaggctgtagcaagcgcaatcggtcgggccattgaggacgaggctcgcttcggtcgtatccgtgaccttgaagctaagcacttcaagaagaacgttgaggaacaactcaacaagcgcgtagggcacgtctacaagaaagcatttatgcaagttgtcgagcacgacatgctctctaagggtctactcggtggcgaggcgtggtcttcgtggcataaggaagactctattcatgtaggagtacgctgcatcgagatgctcattgagtcaaccggaatggttagcttacaccgccaaaatgctggcgtagtaggtcaagactctgagactatcgaactcgcacctgaatacgctgaggctatcgcaacccgtgcaggtgcgctggctggcatctctccgatgttccaaccttgcgtagttcctcctaagccgtggactggcattactggtggtggctattgggctgcggggcgcaaacccctgcagttagtacgtactcgcagtctggcggcgcttcgccgctatgaagaagtgtcgatgccggaggtcatcaaagcagtcaacattgcgcagaatacagcatggcgtattaacaagaaagttctcgacgtagcgaataccatcacccaatggcagcactgtccagtcgcggatgtgcctgcgatggatcgtggcgaaatgccagctcgtccgttggacatcgataccaacgagattgcacttaaagcgtggaagaaagaagcttccgcgttctaccgcaaagacaaagcacgcgttagccgtcgtctgtcaatggagtttatgttatctcaggcgaacaagtttgcgaattatgaggcaatctggtttccgcaaaacatggattggcgtgggcgcgtgtacgctgtcccgatgttcaatcctcagggcaacgatatgacgaaaggcctgctgacctttgcgcaggagaaacccattggtgaagacggcttctattggctcaagattcatggcgcaaatacagctggagtggataaagtaccgtttccacaacgcatcaaatttgttgaggataaccatacgaatattatggaatgcgcgaaagcaccgctggaaaacacttggtgggcggaacaggactcgccgttccgctttctggcgttctgctttgagtatgctggcgtcatcaatagtggtctgtcgtacaactgtagcttgcctctggcatttgatggtagttgctccggcctgcaacatttctcagcgatgttacgcgacgaaattggcggcaaagctgtgaatctcctcccatctgcggaataccaggatatttatcgtatcgtcagcgacaaagttaacgagatgctgaaacaagatctgattaacggtacctctaccaccgtggaaacggtgactgattataagacaggcgaaattacccaacgcacgaaatacgggaccaaagttatggcacagtggtggttagaacacggtgtgaatcgtggcgtcacgaaacgcccggttatgactttgccgtatgggagcaaagagtttggattccgcgatcaagtgctgagtgacaccattcaacgtgcgatcgataacggcaaaggtgacatgtttctgaatccgaatcaggctgctggttacatggcgaaactgatctggaacgcagtgtccgggaccgtagtcgcagcagttgaggcgatgaactggctgaaaagtgcggcgaaattacttgctgctgaagtgaaggatcagaagacggatacagttctgcgtggccgctgcgcagtacattgggtgactcccgacggcttccctgtgtggcaggaatacaagaagcctattcgtacgcgcttgaacctgatgttcctcggtcagttccgcttacagcctaccattaacaccaacaaagatagcgagattgatgcacgcaaacaggagtctggtatcgctcctaactttgtacacagccaagacggtaaccaccttcgtatgactgtagtgtgggcacacgagaagtacggaatcgaatcttttgcactgattcacgactccttcggtaccattccggctgacgctgcgaacctgttcaaagcagtgcgcgaaactttcgttgacacatatgagtcttgtgatgtactggctgatttctacgaccagtttgctgaccagttgcacgagtctcaacgcgacaaaatgccagcacttccggctaaaggtaatttgaacctccgtgacatcttaaaatcggacttcgcgttcgcg

SEQ ID NO: 1156 - protein, 890 aa, synthetic construct
  REGION 1..890: note = Variant of RNA polymerase
MHHHHHHMNTINIAKNDFSDIELAAIPFNTLADHYGERLAREQLALEHESYEMGEARFRKMFERQLKAGEVADNAAAKPLITTLLPKMIARINDWFEEVKAKRGKRPTAFQFLQEIKPEAVAYITIKTTLACLTSADNTTVQAVASAIGRAIEDEARFGRIRDLEAKHFKKNVEEQLNKRVGHVYKKAFMQVVEHDMLSKGLLGGEAWSSWHKEDSIHVGVRCIEMLIESTGMVSLHRQNAGVVGQDSETIELAPEYAEAIATRAGALAGISPMFQPCVVPPKPWTGITGGGYWAAGRKPLQLVRTRSLAALRRYEEVSMPEVIKAVNIAQNTAWRINKKVLDVANTITQWQHCPVADVPAMDRGEMPARPLDIDTNEIALKAWKKEASAFYRKDKARVSRRLSMEFMLSQANKFANYEAIWFPQNMDWRGRVYAVPMFNPQGNDMTKGLLTFAQEKPIGEDGFYWLKIHGANTAGVDKVPFPQRIKFVEDNHTNIMECAKAPLENTWWAEQDSPFRFLAFCFEYAGVINSGLSYNCSLPLAFDGSCSGLQHFSAMLRDEIGGKAVNLLPSAEYQDIYRIVSDKVNEMLKQDLINGTSTTVETVTDYKTGEITQRTKYGTKVMAQWWLEHGVNRGVTKRPVMTLPYGSKEFGFRDQVLSDTIQRAIDNGKGDMFLNPNQAAGYMAKLIWNAVSGTVVAAVEAMNWLKSAAKLLAAEVKDQKTDTVLRGRCAVHWVTPDGFPVWQEYKKPIRTRLNLMFLGQFRLQPTINTNKDSEIDARKQESGIAPNFVHSQDGNHLRMTVVWAHEKYGIESFALIHDSFGTIPADAANLFKAVRETFVDTYESCDVLADFYDQFADQLHESQRDKMPALPAKGNLNLRDILKSDFAFA

SEQ ID NO: 1157 - DNA, 2670 bp, synthetic construct
  misc_feature 1..2670: note = Variant of RNA polymerase
  source 1..2670: mol_type = other DNA
atgcaccatcaccatcaccatatgaacacgattaacattgctaagaacgacttctctgacatcgaactggctgctatcccgttcaacactctggctgaccattacggtgagcgtttagctcgtgaacagttggcccttgagcatgagtcttacgagatgggtgaagcacgcttccgcgagatgtttgagcgtcaacttaaagctggtgaggttgcggataacgctgccgccaagcctctcatcactaccctactccctaagatgattgcacgcatcaacgactggtttgaggaagtgaaagctaagcgcggcaagcgcccgacagccttccagttcctgcaagaaatcaagccggaagccgtagcgtacatcaccattaagaccactctggcttgcctaacccgcgcagacaatacaaccgttcaggctgtagcaagcgcaatcggtcgggccattgaggacgaggctcgcttcggtcgtatccgtgaccttgaagctaagcacttcaagaagaacgttgaggaacaactcaacaagcgtgtagggcacgtcgcgaagaaagcatttatgcaagttgtcgagcacgacatgctctctaagggtctactcggtggcgaggcgtggtcttcgtggcataaggaagactctattcatgtaggagtacgctgcatcgagatgctcattgagtcaaccggaatggttagcttacaccgccaaaatgctggcgtagtgggtgcagactctgagactatcgaactcgcacctgaatacgctgaggctatcgcaacccgtgcaggtgcgctggctggcatctctccgatgttccaaccttgcgtagttcctcctaagccgtggactggcattactggtggtggctattgggctgcggggcgcaaacccctgcagttagtacgtactcgcagtctggcggcgcttcgccgctatgaagaagtgtcgatgccggaggtcatcaaagcagtcaacattgcgcagaatacagcatggcgtattaacaagaaagttctcgacgtagcgaataccatcacccaatggcagcactgtccagtcgcggatgtgcctgcgatggatcgtggcgaaatgccagctcgtccgttggacatcgataccaacgagattgcacttaaagcgtggaagaaagaagcttccgcgttctaccgcaaagacaaagcacgcatgagccgtcgtctgtcgatggagtttatgttatctcaggcgaacaagtttgccaattatgaggttatctggtttccgcaaaacatggattggcgtgggcgcgtgtacgctgtcccgatgttcaatcctcagggcaacgatatgacgaaaggcctgctgacctttgcgcaggagaaacccattggtgaagacggcttctattggctcaagattcatggcgcaaatacagctggagtggataaagtaccgtttcagcaacgcatcaaatttgttgaggataaccatacgaatattatggaaagtgcgaaagcaccgctggaaaacacttggtgggcggaacaggactcgccgttctgctttctggcgttctgctttgagtatgctggcgtcatcaatagtggtctgtcgtacaactgtagcttgcctctggcatttgatggtagttgctccggcctgcaacatttctcagcgatgttacgcgacgaaattggcggcaaagctgtgaatctcctcccatctgcggaataccaggatatttatcgtatcgtcagcgacaaagttaacgagatgctgaaacaagatctgattaacggtacctctaccaccgtggaaacggtgactgataaaaagacaggcgaaattacccaacgcacgaaatacgggaccaaagttatggcacagtggtggttagaacacggtgtgaatcgtggcgtcacgaaacgcccggttatgactttggtgtatgggagcaaagagtttggattccgcgatcaagtgctgagtgacaccattcaaccggcgatcgataacggcaagggtgacatgtttctgaatccgaatcaggctgctggttacatggcgaaactgatctggaacgcagtgtccgggaccgtagtcgcagcagttgaggcgatgaactggctgaaaagtgcggcgaaattacttgctgctgaagtgaaggatgagaagacggatacagttctgcgtggccgctgcgcagtacattgggtgactcccgacggcttccctgtgtggcaggaatacaagaagcctattcaaacgcgcttgaacctgatgttcctcggtcagttccgcttacagcctaccattaacaccaacaaagatagcgagattgatgcacgcaaacaggtgtctggtatcgctcctaactttgtacacagcctggacggtaaccaccttcgtatgactgtagtgtgggcacacgagaagtacggaatcgaatcttttgcactgattcacgactccttcggtaccattccggctgacgctgcgaacctgcgcaaagcagtgcgcgaaactttcgttgacacatatgagtcttgtgatgtactggctgatttctacgaccagattgttgaccagttgcacgagtctcaacgcgacaaaatgccagcacttccggctaaaggtaagttgaacctccgtgacatcttaaaatcggacttcgcgttcgcg

SEQ ID NO: 1158 - protein, 890 aa, synthetic construct
  REGION 1..890: note = Variant of RNA polymerase
MHHHHHHMNTINIAKNDFSDIELAAIPFNTLADHYGERLAREQLALEHESYEMGEARFREMFERQLKAGEVADNAAAKPLITTLLPKMIARINDWFEEVKAKRGKRPTAFQFLQEIKPEAVAYITIKTTLACLTRADNTTVQAVASAIGRAIEDEARFGRIRDLEAKHFKKNVEEQLNKRVGHVAKKAFMQVVEHDMLSKGLLGGEAWSSWHKEDSIHVGVRCIEMLIESTGMVSLHRQNAGVVGADSETIELAPEYAEAIATRAGALAGISPMFQPCVVPPKPWTGITGGGYWAAGRKPLQLVRTRSLAALRRYEEVSMPEVIKAVNIAQNTAWRINKKVLDVANTITQWQHCPVADVPAMDRGEMPARPLDIDTNEIALKAWKKEASAFYRKDKARMSRRLSMEFMLSQANKFANYEVIWFPQNMDWRGRVYAVPMFNPQGNDMTKGLLTFAQEKPIGEDGFYWLKIHGANTAGVDKVPFQQRIKFVEDNHTNIMESAKAPLENTWWAEQDSPFCFLAFCFEYAGVINSGLSYNCSLPLAFDGSCSGLQHFSAMLRDEIGGKAVNLLPSAEYQDIYRIVSDKVNEMLKQDLINGTSTTVETVTDKKTGEITQRTKYGTKVMAQWWLEHGVNRGVTKRPVMTLVYGSKEFGFRDQVLSDTIQPAIDNGKGDMFLNPNQAAGYMAKLIWNAVSGTVVAAVEAMNWLKSAAKLLAAEVKDEKTDTVLRGRCAVHWVTPDGFPVWQEYKKPIQTRLNLMFLGQFRLQPTINTNKDSEIDARKQVSGIAPNFVHSLDGNHLRMTVVWAHEKYGIESFALIHDSFGTIPADAANLRKAVRETFVDTYESCDVLADFYDQIVDQLHESQRDKMPALPAKGKLNLRDILKSDFAFA

SEQ ID NO: 1159 - DNA, 2670 bp, synthetic construct
  misc_feature 1..2670: note = Variant of RNA polymerase
  source 1..2670: mol_type = other DNA
atgcaccatcaccatcaccatatgaacacgattaacattgctaagaacgacttctctgacatcgaactggctgctatcccgttcaacactctggctgaccattacggtgagcgtttagctagtgaacagttggcccttgagcatgagtcttacgagatgggtgaagcacgcttccgcgagatgtttgagcgtcaacttaaagctggtgaggttgcggataacgctgccgccaagcctctcatcactaccctactccctaagatgattgcacgcatcaacgactggtttgaggaagtgaaagctaagcgcggcaagcgcccgacagccttccagttcctgcaagaaatcaagccggaagccgtagcgtacatcaccattaagaccactctggcttgcctaacccgcgcagacaatacaaccgttcaggctgtagcaagcgcaatcggtcgggccattgaggacgaggctcgcttcggtcgtatccgtgaccttgaagctaagcacttcaagaagaacgttgaggaacaactcaacaagaaggtagggcacgtcgcgaagaaagcatttatgcaagttgtcgagcacgacatgctctctaagggtctactcggtggcgaggcgtggtcttcgtggcataaggaagactctattcatgtaggagtacgctgcatcgagatgctcattgagtcaaccggaatggttagcttacaccgccaaaatgctggcgtagtgggtgcagactctgagactatcgaactcgcacctgaatacgctgaggctatcgcaacccgtgcaggtgcgctggctggcatctctccgatgttccaaccttgcgtagttcctcctaagccgtggactggcattactggtggtggctattgggctgcggggcgcaaacccctgcagttagtacgtactcgcagtctggcggcgcttcgccgctatgaagaagtgtcgatgccggaggtcatcaaagcagtcaacattgcgcagaatacagcatggcgtattaacaagaaagttctcgacgtagcgaataccatcacccaatggcagcactgtccagtcgcggatgtgcctgcgatggatcgtggcgaaatgccagctcgtccgttggacatcgataccaacgagattgcacttaaagcgtggaagaaagaagcttccgcgttctaccgcaaagacaaagcacgcatgagccgtcgtctgtcgatggagtttatgttatctcaggcgaacaagtttgccaattatgaggttatctggtttccgcaaaacatggattggcgtgggcgcgtgtacgctgtcccgatgttcaatcctcagggcaacgatatgacgaaaggcctgctgacctttgcgcaggagaaacccattggtgaagacggcttctattggctcaagattcatggcgcaaatacagctggagtggataaagtaccgtttccgcaacgcatcaaatttgttgaggataaccatacgaacattatggaaagtgcgaaagcaccgctggaaaacacttggtgggcggaacaggactcgccgttctgctttctggcgttctgctttgagtatgctggcgtcatcaatagtggtctgtcgtacaactgtagcttgcctctggcatttgatggtagttgctccggcctgcaacatttctcagcgatgttacgcgacgaaattggcggcaaagctgtgaatctcctcccatctgcggaataccaggatatttatcgtatcgtcagcgacaaagttaacgagatgctgaaacaagatctgattaacggtacctctaccaccgtggaaacggtgactgataaaaagacaggcgaaattacccaacgcacgaaatacgggaccaaagttatggcacagtggtggttagaacacggtgtgaatcgtggcgtcacgaaacgcccggttatgactttggtgtatgggagcaaagagtttggattccgcgatcaagtgctgagtgacaccattcaaccggcgatcgataacggcaagggtgacatgtttctgaatccgaatcaggctgctggttacatggcgaaactgatctggaacgcagtgtccgggaccgtagtcgcagcagttgaggcgatgaactggctgaaaagtgcggcgaaattacttgctgctgaagtgaaggatgagaagacggatacagttctgcgtggccgctgcgcagtacattgggtgactcccgacggcttccctgtgtggcaggaatacaagaagcctattcaaacgcgcttgaacctgatgttcctcggtcagttccgcttacagcctaccattaacaccaacaaagatagcgagattgatgcacgcaaacaggtgtctggtatcgctcctaactttgtacacagcctggacggtaaccaccttcgtatgactgtagtgtgggcacacgagaagtacggaatcgaatcttttgcactgattcacgactccttcggtaccattccggctgacgctgcgaacctgcgcaaagcagtgcgcgaaactttcgttgacacatatgagtcttgtgatgtactggctgatttctacgaccagattgctgaccagttgcacgagtctcaacgcgacaaaatgccagcacttccggctaaaggtaagttgaacctccgtgacatcttaaaatcggacttcgcgttcgcg

SEQ ID NO: 1160 - protein, 890 aa, synthetic construct
  REGION 1..890: note = Variant of RNA polymerase
MHHHHHHMNTINIAKNDFSDIELAAIPFNTLADHYGERLASEQLALEHESYEMGEARFREMFERQLKAGEVADNAAAKPLITTLLPKMIARINDWFEEVKAKRGKRPTAFQFLQEIKPEAVAYITIKTTLACLTRADNTTVQAVASAIGRAIEDEARFGRIRDLEAKHFKKNVEEQLNKKVGHVAKKAFMQVVEHDMLSKGLLGGEAWSSWHKEDSIHVGVRCIEMLIESTGMVSLHRQNAGVVGADSETIELAPEYAEAIATRAGALAGISPMFQPCVVPPKPWTGITGGGYWAAGRKPLQLVRTRSLAALRRYEEVSMPEVIKAVNIAQNTAWRINKKVLDVANTITQWQHCPVADVPAMDRGEMPARPLDIDTNEIALKAWKKEASAFYRKDKARMSRRLSMEFMLSQANKFANYEVIWFPQNMDWRGRVYAVPMFNPQGNDMTKGLLTFAQEKPIGEDGFYWLKIHGANTAGVDKVPFPQRIKFVEDNHTNIMESAKAPLENTWWAEQDSPFCFLAFCFEYAGVINSGLSYNCSLPLAFDGSCSGLQHFSAMLRDEIGGKAVNLLPSAEYQDIYRIVSDKVNEMLKQDLINGTSTTVETVTDKKTGEITQRTKYGTKVMAQWWLEHGVNRGVTKRPVMTLVYGSKEFGFRDQVLSDTIQPAIDNGKGDMFLNPNQAAGYMAKLIWNAVSGTVVAAVEAMNWLKSAAKLLAAEVKDEKTDTVLRGRCAVHWVTPDGFPVWQEYKKPIQTRLNLMFLGQFRLQPTINTNKDSEIDARKQVSGIAPNFVHSLDGNHLRMTVVWAHEKYGIESFALIHDSFGTIPADAANLRKAVRETFVDTYESCDVLADFYDQIADQLHESQRDKMPALPAKGKLNLRDILKSDFAFA

SEQ ID NO: 1161 - DNA, 2670 bp, synthetic construct
  misc_feature 1..2670: note = Variant of RNA polymerase
  source 1..2670: mol_type = other DNA
atgcaccatcaccatcaccatatgaacacgattaacattgctaagaacgacttctctgacatcgaactggctgctatcccgttcaacactctggctgaccattacggtgagcgtttagctcgtgaacagttggcccttgagcatgagtcttacgagatgggtgaagcacgcttccgcaagatgtttgagcgtcaacttaaagctggtgaggttgcggataacgctgccgccaagcctctcatcactaccctactccctaagatgattgcacgcatcaacgactggtttgaggaagtgaaagctaagcgcggcaagcgcccgacagccttccagttcctgcaagaaatcaagccggaagccgtagcgtacatcaccattaagaccactctggcttgcctaacccgcgaagacaatacaaccgttcaggctgtagcaagcgcaatcggtcgggccattgaggacgaggctcgcttcggtcgtatccgtgaccttgaagctaagcacttcaagaagaacgttgaggaacaactcaacaagcgtgtagggcacgtcaacaagaaagcatttatgcaagttgtcgagcacgacatgctctctaagggtctactcggtggcgaggcgtggtcttcgtggcataaggaagactctattcatgtaggagtacgctgcatcgagatgctcattgagtcaaccggaatggttagcttacaccgccaaaatgctggcgtagtgggtgcagactctgagactatcgaactcgcacctgaatacgctgaggctatcgcaacccgtgcaggtgcgctggctggcatctctccgatgttccaaccttgcgtagttcctcctaagccgtggactggcattactggtggtggctattgggctgcggggcgcaaacccctgcagttagtacgtactcgcagtctggcggcgcttcgccgctatgaagaagtgtcgatgccggaggtcatcaaagcagtcaacattgcgcagaatacagcatggcgtattaacaagaaagttctcgacgtagcgaataccatcacccaatggcagcactgtccagtcgcggatgtgcctgcgatggatcgtggcgaaatgccagctcgtccgttggacatcgataccaacgagattgcacttaaagcgtggaagaaagaagcttccgcgttctaccgcaaagacaaagcacgcatgagccgtcgtctgtcgatggagtttatgttatctcaggcgaacaagtttggcaattatgaggttatctggtttccgcaaaacatggattggcgtgggcgcgtgtacgctgtcccgatgttcaatcctcagggcaacgatatgacgaaaggcctgctgacctttgcgcaggagaaacccattggtgaagacggcttctattggctcaagattcatggcgcaaatacagctggagtggataaagtaccgtttccacaacgcatcaaatttgttgaggataaccatacgaatattatggaatgcgcgaaagcaccgctggaaaacacttggtgggcggaacaggactcgccgttctgctttctggcgttctgctttgagtatgctggcgtcatcaatagtggtctgtcgtacaactgtagcttgcctctggcatttgatggtagttgctccggcctgcaacatttctcagcgatgttacgcgacgaaattggcggcaaagctgtgaatctcctcccatctgcggaataccaggatatttatcgtatcgtcagcgacaaagttaacgagatgctgaaacaagatctgattaacggtacctctaccaccgtggaaacggtgactgataaaaagacaggcgaaattacccaacgcacgaaatacgggaccaaagttatggcacagtggtggttagaacacggtgtgaatcgtggcgtcacgaaacgcccggttatgactttggtgtatgggagcaaagagtttggattccgcgatcaagtgctgagtgacaccattcaaccggcgatcgataacggcaagggtgacatgtttctgaatccgaatcaggctgctggttacatggcgaaactgatctggaacgcagtgtccgggaccgtagtcgcagcagttgaggcgatgaactggctgaaaagtgcggcgaaattacttgctgctgaagtgaaggatgagaagacggatacagttctgcgtggccgctgcgcagtacattgggtgactcccgacggcttccctgtgtggcaggaatacaagaagcctattcaaacgcgcttgaacctgatgttcctcggtcagttccgcttacagcctaccattaacaccaacaaagatagcgagattgatgcacgcaaacaggtgtctggtatcgctcctaactttgtacacagcctggacggtaaccaccttcgtatgactgtagtgtgggcacacgagaagtacggaatcgaatcttttgcactgattcacgactccttcggtaccattccggctgacgctgcgaacctgtttaaagcagtgcgcgaaactttcgttgacacatatgagtcttgtgatgtactggctgatttctacgaccagattgctgaccagttgcacgagtctcaacgcgacaaaatgccagcacttccggctaaaggtaagttgaacctccgtgacatcttaaaatcggacttcgcgttcgcg

SEQ ID NO: 1162 - protein, 890 aa, synthetic construct
  REGION 1..890: note = Variant of RNA polymerase
MHHHHHHMNTINIAKNDFSDIELAAIPFNTLADHYGERLAREQLALEHESYEMGEARFRKMFERQLKAGEVADNAAAKPLITTLLPKMIARINDWFEEVKAKRGKRPTAFQFLQEIKPEAVAYITIKTTLACLTREDNTTVQAVASAIGRAIEDEARFGRIRDLEAKHFKKNVEEQLNKRVGHVNKKAFMQVVEHDMLSKGLLGGEAWSSWHKEDSIHVGVRCIEMLIESTGMVSLHRQNAGVVGADSETIELAPEYAEAIATRAGALAGISPMFQPCVVPPKPWTGITGGGYWAAGRKPLQLVRTRSLAALRRYEEVSMPEVIKAVNIAQNTAWRINKKVLDVANTITQWQHCPVADVPAMDRGEMPARPLDIDTNEIALKAWKKEASAFYRKDKARMSRRLSMEFMLSQANKFGNYEVIWFPQNMDWRGRVYAVPMFNPQGNDMTKGLLTFAQEKPIGEDGFYWLKIHGANTAGVDKVPFPQRIKFVEDNHTNIMECAKAPLENTWWAEQDSPFCFLAFCFEYAGVINSGLSYNCSLPLAFDGSCSGLQHFSAMLRDEIGGKAVNLLPSAEYQDIYRIVSDKVNEMLKQDLINGTSTTVETVTDKKTGEITQRTKYGTKVMAQWWLEHGVNRGVTKRPVMTLVYGSKEFGFRDQVLSDTIQPAIDNGKGDMFLNPNQAAGYMAKLIWNAVSGTVVAAVEAMNWLKSAAKLLAAEVKDEKTDTVLRGRCAVHWVTPDGFPVWQEYKKPIQTRLNLMFLGQFRLQPTINTNKDSEIDARKQVSGIAPNFVHSLDGNHLRMTVVWAHEKYGIESFALIHDSFGTIPADAANLFKAVRETFVDTYESCDVLADFYDQIADQLHESQRDKMPALPAKGKLNLRDILKSDFAFA

SEQ ID NO: 1163 - DNA, 2670 bp, synthetic construct
  misc_feature 1..2670: note = Variant of RNA polymerase
  source 1..2670: mol_type = other DNA
atgcaccatcaccatcaccatatgaacacgattaacattgctaagaacgacttctctgacatcgaactggctgctatcccgttcaacactctggctgaccattacggtgagcgtttagctcgtgaacagttggcccttgagcatgagtcttacgagatgggtgaagcacgcttccgcaagatgtttgagcgtcaacttaaagctggtgaggttgcggataacgctgccgccaagcctctcatcactaccctactccctaagatgattgcacgcatcaacgactggtttgaggaagtgaaagctaagcgcggcaagcgcccgacagccttccagttcctgcaagaaatcaagccggaagccgtagcgtacatcaccattaagaccactctggcttgcctaacccgcgaagacaatacaaccgttcaggctgtagcaagcgcaatcggtcgggccattgaggacgaggctcgcttcggtcgtatccgtgaccttgaagctaagcacttcaagaagaacgttgaggaacaactcaacaagcgtgtagggcacgtcgcgaagaaagcatttatgcaagttgtcgagcacgacatgctctctaagggtctactcggtggcgaggcgtggtcttcgtggcataaggaagactctattcatgtaggagtacgctgcatcgagatgctcattgagtcaaccggaatggttagcttacaccgccaaaatgctggcgtagtgggtgcagactctgagactatcgaactcgcacctgaatacgctgaggctatcgcaacccgtgcaggtgcgctggctggcatctctccgatgttccaaccttgcgtagttcctcctaagccgtggactggcattactggtggtggctattgggctgcggggcgcaaacccctgcagttagtacgtactcacagtctggcggcgcttcgccgctatgaagaagtgtcgatgccggaggtcatcaaagcagtcaacattgcgcagaatacagcatggcgtattaacaagaaagttctcgacgtagcgaataccatcacccaatggcagcactgtccagtcgcggatgtgcctgcgatggatcgtggcgaaatgccagctcgtccgttggacatcgataccaacgagattgcacttaaagcgtggaagaaagaagcttccgcgttctaccgcaaagacaaagcacgcatgagccgtcgtctgtcgatggagtttatgttatctcaggcgaacaagtttgccaattatgaggttatctggtttccgcaaaacatggattggcgtgggcgcgtgtacgctgtcccgatgttcaatcctcagggcaacgatatgacgaaaggcctgctgacctttgcgcaggagaaacccattggtgaagacggcttctattggctcaagattcatggcgcaaatacagctggagtggataaagtaccgtttccgcaacgcatcaaatttgttgaggataaccatacgaatattatggaatgcgcgaaagcaccgctggaaaacacttggtgggcggaacaggactcgccgttctgctttctggcgttctgctttgagtatgctggcgtcatcaatagtggtctgtcgtacaactgtagcttgcctctggcatttgatggtagttgctccggcctgcaacatttctcagcgatgttacgcgacgaaattggcggcaaagctgtgaatctcctcccatctgcggaataccaggatatttatcgtatcgtcagcgacaaagttaacgagatgctgaaacaagatctgattaacggtacctctaccaccgtggaaacggtgactgataaaaagacaggcgaaattacccaacgcacgaaatacgggaccaaagttatggcacagtggtggttagaacacggtgtgaatcgtggcgtcacgaaacgcccggttatgactttggtgtatgggagcaaagagtttggattccgcgatcaagtgctgagtgacaccattcaaccggcgatcgataacggcaagggtgacatgtttctgaatccgaatcaggctgctggttacatggcgaaactgatctggaacgcagtgtccgggaccgtagtcgcagcagttgaggcgatgaactggctgaaaagtgcggcgaaattacttgctgctgaagtgaaggatgagaagacggatacagttctgcgtggccgctgcgcagtacattgggtgactcccgacggcttccctgtgtggcaggaatacaagaagcctattcaaacgcgcttgaacctgatgttcctcggtcagttccgcttacagcctaccattaacaccaacaaagatagcgagattgatgcacgcaaacaggtgtctggtatcgctcctaactttgtacacagcctggacggtaaccaccttcgtatgactgtagtgtgggcacacgagaagtacggaatcgaatcttttgcactgattcacgactccttcggtaccattccggctgacgctgcgaacctgcgcaaagcagtgcgcgaaactttcgttgacacatatgagtcttgtgatgtactggctgatttctacgaccagattgttgaccagttgcacgagtctcaacgcgacaaaatgccagcacttccggctaaaggtaagttgaacctccgtgacatcttaaaatcggacttcgcgttcgcg

SEQ ID NO: 1164 - protein, 890 aa, synthetic construct
  REGION 1..890: note = Variant of RNA polymerase
MHHHHHHMNTINIAKNDFSDIELAAIPFNTLADHYGERLAREQLALEHESYEMGEARFRKMFERQLKAGEVADNAAAKPLITTLLPKMIARINDWFEEVKAKRGKRPTAFQFLQEIKPEAVAYITIKTTLACLTREDNTTVQAVASAIGRAIEDEARFGRIRDLEAKHFKKNVEEQLNKRVGHVAKKAFMQVVEHDMLSKGLLGGEAWSSWHKEDSIHVGVRCIEMLIESTGMVSLHRQNAGVVGADSETIELAPEYAEAIATRAGALAGISPMFQPCVVPPKPWTGITGGGYWAAGRKPLQLVRTHSLAALRRYEEVSMPEVIKAVNIAQNTAWRINKKVLDVANTITQWQHCPVADVPAMDRGEMPARPLDIDTNEIALKAWKKEASAFYRKDKARMSRRLSMEFMLSQANKFANYEVIWFPQNMDWRGRVYAVPMFNPQGNDMTKGLLTFAQEKPIGEDGFYWLKIHGANTAGVDKVPFPQRIKFVEDNHTNIMECAKAPLENTWWAEQDSPFCFLAFCFEYAGVINSGLSYNCSLPLAFDGSCSGLQHFSAMLRDEIGGKAVNLLPSAEYQDIYRIVSDKVNEMLKQDLINGTSTTVETVTDKKTGEITQRTKYGTKVMAQWWLEHGVNRGVTKRPVMTLVYGSKEFGFRDQVLSDTIQPAIDNGKGDMFLNPNQAAGYMAKLIWNAVSGTVVAAVEAMNWLKSAAKLLAAEVKDEKTDTVLRGRCAVHWVTPDGFPVWQEYKKPIQTRLNLMFLGQFRLQPTINTNKDSEIDARKQVSGIAPNFVHSLDGNHLRMTVVWAHEKYGIESFALIHDSFGTIPADAANLRKAVRETFVDTYESCDVLADFYDQIVDQLHESQRDKMPALPAKGKLNLRDILKSDFAFA

SEQ ID NO: 1165 - DNA, 2670 bp, synthetic construct
  misc_feature 1..2670: note = Variant of RNA polymerase
  source 1..2670: mol_type = other DNA
atgcaccatcaccatcaccatatgaacacgattaacattgctaagaacgacttctctgacatcgaactggctgctatcccgttcaacactctggctgaccattacggtgagcgtttagctcgtgaacagttggcccttgagcatgagtcttacgagatgggtgaagcacgcttccgcaagatgtttgagcgtcaacttaaagctggtgaggttgcggataacgctgccgccaagcctctcatcactaccctactccctaagatgattgcacgcatcaacgactggtttgaggaagtgaaagctaagcgcggcaagcgcccgacagccttccagttcctgcaagaaatcaagccggaagccgtagcgtacatcaccattaagaccactctggcttgcctaacccgcgaagacaatacaaccgttcaggctgtagcaagcgcaatcggtcgggccattgaggacgaggctcgcttcggtcgtatccgtgaccttgaagctaagcacttcaagaagaacgttgaggaacaactcaacaaggaggtagggcacgtcgcgaagaaagcatttatgcaagttgtcgagcacgacatgctctctaagggtctactcggtggcgaggcgtggtcttcgtggcataaggaagactctattcatgtaggagtacgctgcatcgagatgctcattgagtcaaccggaatggttagcttacaccgccaaaatgctggcgtagtgggtgcagactctgagactatcgaactcgcacctgaatacgctgaggctatcgcaacccgtgcaggtgcgctggctggcatctctccgatgttccaaccttgcgtagttcctcctaagccgtggactggcattactggtggtggctattgggctgcggggcgcaaacccctgcagttagtacgtactcacagtctggcggcgcttcgccgctatgaagaagtgtcgatgccggaggtcatcaaagcagtcaacattgcgcagaatacagcatggcgtattaacaagaaagttctcgacgtagcgaataccatcacccaatggcagcactgtccagtcgcggatgtgcctgcgatggatcgtggcgaaatgccagctcgtccgttggacatcgataccaacgagattgcacttaaagcgtggaagaaagaagcttccgcgttctaccgcaaagacaaagcacgcatgagccgtcgtctgtcgatggagtttatgttatctcaggcgaacaagtttgcgaattatgaggcaatctggtttccgcaaaacatggattggcgtgggcgcgtgtacgctgtcccgatgttcaatcctcagggcaacgatatgacgaaaggcctgctgacctttgcgcaggagaaacccattggtgaagacggcttctattggctcaagattcatggcgcaaatacagctggaggggataaagtaccgtttccacaacgcatcaaatttgttgaggataaccatacgaatattatggaatgcgcgaaagcaccgctggaaaacacttggtgggcggaacaggactcgccgttctgctttctggcgttctgctttgagtatgctggcgtcatcaatagtggtctgtcgtacaactgtagcttgcctctggcatttgatggtagttgctccggcctgcaacatttctcagcgatgttacgcgacgaaattggcggcaaagctgtgaatctcctcccatctgcggaataccaggatatttatcgtatcgtcagcgacaaagttaacgagatgctgaaacaagatctgattaacggtacctctaccaccgtggaaacggtgactgataaaaagacaggcgaaattacccaacgcacgaaatacgggaccaaagttatggcacagtggtggttagaacacggtgtgaatcgtggcgtcacgaaacgcccggttatgactttggtgtatgggagcaaagagtttggattccgcgatcaagtgctgagtgacaccattcaaccggcgatcgataacggcaagggtgacatgtttctgaatccgaatcaggctgctggttacatggcgaaactgatctggaacgcagtgtccgggaccgtagtcgcagcagttgaggcgatgaactggctgaaaagtgcggcgaaattacttgctgctgaagtgaaggatgagaagacggatacagttctgcgtggccgctgcgcagtacattgggtgactcccgacggcttccctgtgtggcaggaatacaagaagcctattcaaacgcgcttgaacctgatgttcctcggtcagttccgcttacagcctaccattaacaccaacaaagatagcgagattgatgcacgcaaacaggtgtctggtatcgctcctaactttgtacacagcctggacggtaaccaccttcgtatgactgtagtgtgggcacacgagaagtacggaatcgaatcttttgcactgattcacgactccttcggtaccattccggctgacgctgcgaacctgcgcaaagcagtgcgcgaaactttcgttgacacatatgagtcttgtgatgtactggctgatttctacgaccagattgctgaccagttgcacgagtctcaacgcgacaaaatgccagcacttccggctaaaggtaagttgaacctccgtgacatcttaaaatcggacttcgcgttcgcg

SEQ ID NO: 1166 - protein, 890 aa, synthetic construct
  REGION 1..890: note = Variant of RNA polymerase
MHHHHHHMNTINIAKNDFSDIELAAIPFNTLADHYGERLAREQLALEHESYEMGEARFRKMFERQLKAGEVADNAAAKPLITTLLPKMIARINDWFEEVKAKRGKRPTAFQFLQEIKPEAVAYITIKTTLACLTREDNTTVQAVASAIGRAIEDEARFGRIRDLEAKHFKKNVEEQLNKEVGHVAKKAFMQVVEHDMLSKGLLGGEAWSSWHKEDSIHVGVRCIEMLIESTGMVSLHRQNAGVVGADSETIELAPEYAEAIATRAGALAGISPMFQPCVVPPKPWTGITGGGYWAAGRKPLQLVRTHSLAALRRYEEVSMPEVIKAVNIAQNTAWRINKKVLDVANTITQWQHCPVADVPAMDRGEMPARPLDIDTNEIALKAWKKEASAFYRKDKARMSRRLSMEFMLSQANKFANYEAIWFPQNMDWRGRVYAVPMFNPQGNDMTKGLLTFAQEKPIGEDGFYWLKIHGANTAGGDKVPFPQRIKFVEDNHTNIMECAKAPLENTWWAEQDSPFCFLAFCFEYAGVINSGLSYNCSLPLAFDGSCSGLQHFSAMLRDEIGGKAVNLLPSAEYQDIYRIVSDKVNEMLKQDLINGTSTTVETVTDKKTGEITQRTKYGTKVMAQWWLEHGVNRGVTKRPVMTLVYGSKEFGFRDQVLSDTIQPAIDNGKGDMFLNPNQAAGYMAKLIWNAVSGTVVAAVEAMNWLKSAAKLLAAEVKDEKTDTVLRGRCAVHWVTPDGFPVWQEYKKPIQTRLNLMFLGQFRLQPTINTNKDSEIDARKQVSGIAPNFVHSLDGNHLRMTVVWAHEKYGIESFALIHDSFGTIPADAANLRKAVRETFVDTYESCDVLADFYDQIADQLHESQRDKMPALPAKGKLNLRDILKSDFAFA

SEQ ID NO: 1167 - DNA, 2670 bp, synthetic construct
  misc_feature 1..2670: note = Variant of RNA polymerase
  source 1..2670: mol_type = other DNA
atgcaccatcaccatcaccatatgaacacgattaacattgctaagaacgacttctctgacatcgaactggctgctatcccgttcaacactctggctgaccattacggtgagcgtttagctcgtgaacagttggcccttgagcatgagtcttacgagatgggtgaagcacgcttccgcgagatgtttgagcgtcaacttaaagctggtgaggttgcggataacgctgccgccaagcctctcatcactaccctactccctaagatgattgcacgcatcaacgactggtttgaggaagtgaaagctaagcgcggcaagcgcccgacagccttccagttcctgcaagaaatcaagccggaagccgtagcgtacatcaccattaagaccactctggcttgcctaacccgcgcagacaatacaaccgttcaggctgtagcaagcgcaatcggtcgggccattgaggacgaggctcgcttcggtcgtatccgtgaccttgaagctaagcacttcaagaagaacgttgaggaacaactcaacaagaaggtagggcacgtcgcgaagaaagcatttatgcaagttgtcgagcacgacatgctctctaagggtctactcggtggcgaggcgtggtcttcgtggcataaggaagactctattcatgtaggagtacgctgcatcgagatgctcattgagtcaaccggaatggttagcttacaccgccaaaatgctggcgtagtgggtgcagactctgagactatcgaactcgcacctgaatacgctgaggctatcgcaacccgtgcaggtgcgctggctggcatctctccgatgttccaaccttgcgtagttcctcctaagccgtggactggcattactggtggtggctattgggctgcggggcgcaaacccctgcagttagtacgtactcgcagtctggcggcgcttcgccgctatgaagaagtgtcgatgccggaggtcatcaaagcagtcaacattgcgcagaatacagcatggcgtattaacaagaaagttctcgacgtagcgaataccatcacccaatggcagcactgtccagtcgcggatgtgcctgcgatggatcgtggcgaaatgccagctcgtccgttggacatcgataccaacgagattgcacttaaagcgtggaagaaagaagcttccgcgttctaccgcaaagacaaagcacgcatgagccgtcgtctgtcgatggagtttatgttatctcaggcgaacaagtttgccaattatgaggttatctggtttccgcaaaacatggattggcgtgggcgcgtgtacgctgtcccgatgttcaatcctcagggcaacgatatgacgaaaggcctgctgacctttgcgcaggagaaacccattggtgaagacggcttctattggctcaagattcatggcgcaaatacagctggagtggataaagtaccgtttccacaacgcatcaaatttgttgaggataaccatacgaatattatggaatgcgcgaaagcaccgctggaaaacacttggtgggcggaacaggactcgccgttctgctttctggcgttctgctttgagtatgctggcgtcatcaatagtggtctgtcgtacaactgtagcttgcctctggcatttgatggtagttgctccggcctgcaacatttctcagcgatgttacgcgacgaaattggcggcaaagctgtgaatctcctcccatctgcggaataccaggatatttatcgtatcgtcagcgacaaagttaacgagatgctgaaacaagatctgattaacggtacctctaccaccgtggaaacggtgactgataaaaagacaggcgaaattacccaacgcacgaaatacgggaccaaagttatggcacagtggtggttagaacacggtgtgaatcgtggcgtcacgaaacgcccggttatgactttggtgtatgggagcaaagagtttggattccgcgatcaagtgctgagtgacaccattcaaccggcgatcgataacggcaagggtgacatgtttctgaatccgaatcaggctgctggttacatggcgaaactgatctggaacgcagtgtccgggaccgtagtcgcagcagttgaggcgatgaactggctgaaaagtgcggcgaaattacttgctgctgaagtgaaggatgagaagacggatacagttctgcgtggccgctgcgcagtacattgggtgactcccgacggcttccctgtgtggcaggaatacaagaagcctattcaaacgcgcttgaacctgatgttcctcggtcagttccgcttacagcctaccattaacaccaacaaagatagcgagattgatgcacgcaaacaggtgtctggtatcgctcctaactttgtacacagcctggacggtaaccaccttcgtatgactgtagtgtgggcacacgagaagtacggaatcgaatcttttgcactgattcacgactccttcggtaccattccggctgacgctgcgaacctgcgcaaagcagtgcgcgaaactttcgttgacacatatgagtcttgtgatgtactggctgatttctacgaccagattgctgaccagttgcacgagtctcaacgcgacaaaatgccagcacttccggctaaaggtaagttgaacctccgtgacatcttaaaatcggacttcgcgttcgcg

SEQ ID NO: 1168 - protein, 890 aa, synthetic construct
  REGION 1..890: note = Variant of RNA polymerase
MHHHHHHMNTINIAKNDFSDIELAAIPFNTLADHYGERLAREQLALEHESYEMGEARFREMFERQLKAGEVADNAAAKPLITTLLPKMIARINDWFEEVKAKRGKRPTAFQFLQEIKPEAVAYITIKTTLACLTRADNTTVQAVASAIGRAIEDEARFGRIRDLEAKHFKKNVEEQLNKKVGHVAKKAFMQVVEHDMLSKGLLGGEAWSSWHKEDSIHVGVRCIEMLIESTGMVSLHRQNAGVVGADSETIELAPEYAEAIATRAGALAGISPMFQPCVVPPKPWTGITGGGYWAAGRKPLQLVRTRSLAALRRYEEVSMPEVIKAVNIAQNTAWRINKKVLDVANTITQWQHCPVADVPAMDRGEMPARPLDIDTNEIALKAWKKEASAFYRKDKARMSRRLSMEFMLSQANKFANYEVIWFPQNMDWRGRVYAVPMFNPQGNDMTKGLLTFAQEKPIGEDGFYWLKIHGANTAGVDKVPFPQRIKFVEDNHTNIMECAKAPLENTWWAEQDSPFCFLAFCFEYAGVINSGLSYNCSLPLAFDGSCSGLQHFSAMLRDEIGGKAVNLLPSAEYQDIYRIVSDKVNEMLKQDLINGTSTTVETVTDKKTGEITQRTKYGTKVMAQWWLEHGVNRGVTKRPVMTLVYGSKEFGFRDQVLSDTIQPAIDNGKGDMFLNPNQAAGYMAKLIWNAVSGTVVAAVEAMNWLKSAAKLLAAEVKDEKTDTVLRGRCAVHWVTPDGFPVWQEYKKPIQTRLNLMFLGQFRLQPTINTNKDSEIDARKQVSGIAPNFVHSLDGNHLRMTVVWAHEKYGIESFALIHDSFGTIPADAANLRKAVRETFVDTYESCDVLADFYDQIADQLHESQRDKMPALPAKGKLNLRDILKSDFAFA

SEQ ID NO: 1169 - DNA, 2670 bp, synthetic construct
  misc_feature 1..2670: note = Variant of RNA polymerase
  source 1..2670: mol_type = other DNA
atgcaccatcaccatcaccatatgaacacgattaacattgctaagaacgacttctctgacatcgaactggctgctatcccgttcaacactctggctgaccattacggtgagcgtttagctcgtgaacagttggcccttgagcatgagtcttacgagatgggtgaagcacgcttccgcgagatgtttgagcgtcaacttaaagctggtgaggttgcggataacgctgccgccaagcctctcatcactaccctactccctaagatgattgcacgcatcaacgactggtttgaggaagtgaaagctaagcgcggcaagcgcccgacagccttccagttcctgcaagaaatcaagccggaagccgtagcgtacatcaccattaagaccactctggcttgcctaacccgcgaagacaatacaaccgttcaggctgtagcaagcgcaatcggtcgggccattgaggacgaggctcgcttcggtcgtatccgtgaccttgaagctaagcacttcaagaagaacgttgaggaacaactcaacaagaaggtagggcacgtcgcgaagaaagcatttatgcaagttgtcgagcacgacatgctctctaagggtctactcggtggcgaggcgtggtcttcgtggcataaggaagactctattcatgtaggagtacgctgcatcgagatgctcattgagtcaaccggaatggttagcttacaccgccaaaatgctggcgtagtgggtgcagactctgagactatcgaactcgcacctgaatacgctgaggctatcgcaacccgtgcaggtgcactggctggcatctctccgatgttccaaccttgcgtagttcctcctaagccgtggactggcattactggtggtggctattgggctgcggggcgcaaacccctgcagttagtacgtactcgcagtctggcggcgcttcgccgctatgaagaagtgtcgatgccggaggtcatcaaagcagtcaacattgcgcagaatacagcatggcgtattaacaagaaagttctcgacgtagcgaataccatcacccaatggcagcactgtccagtcgcggatgtgcctgcgatggatcgtggcgaaatgccagctcgtccgttggacatcgataccaacgagattgcacttaaagcgtggaagaaagaagcttccgcgttctaccgcaaagacaaagcacgcatgagccgtcgtctgtcgatggagtttatgttatctcaggcgaacaagtttgccaattatgaggctatctggtttccgcaaaacatggattggcgtgggcgcgtgtacgctgtcccgatgttcaatcctcagggcaacgatatgacgaaaggcctgctgacctttgcgcaggagaaacccattggtgaagacggcttctattggctcaagattcatggcgcaaatacagctggagtggataaagtaccgtttccacaacgcatcaaatttgttgaggataaccatacgaatattatggaatgcgcgaaagcaccgctggaaaacacttggtgggcggaacaggactcgccgttctgctttctggcgttctgctttgagtatgctggcgtcatcaatagtggtctgtcgtacaactgtagcttgcctctggcatttgatggtagttgctccggcctgcaacatttctcagcgatgttacgcgacgaaattggcggcaaagctgtgaatctcctcccatctgcggaataccaggatatttatcgtatcgtcagcgacaaagttaacgagatgctgaaacaagatctgattaacggtacctctaccaccgtggaaacggtgactgataaaaagacaggcgaaattacccaacgcacgaaatacgggaccaaagttatggcacagtggtggttagaacacggtgtgaatcgtggcgtcacgaaacgcccggttatgactttggtgtatgggagcaaagagtttggattccgcgatcaagtgctgagtgacaccattcaaccggcgatcgataacggcaagggtgacatgtttctgaatccgaatcaggctgctggttacatggcgaaactgatctggaacgcagtgtccgggaccgtagtcgcagcagttgaggcgatgaactggctgaaaagtgcggcgaaattacttgctgctgaagtgaaggatgagaagacggatacagttctgcgtggccgctgcgcagtacattgggtgactcccgacggcttccctgtgtggcaggaatacaagaagcctattcaaacgcgcttgaacctgatgttcctcggtcagttccgcttacagcctaccattaacaccaacaaagatagcgagattgatgcacgcaaacaggtgtctggtatcgctcctaactttgtacacagcctggacggtaaccaccttcgtatgactgtagtgtgggcacacgagaagtacggaatcgaatcttttgcactgattcacgactccttcggtaccattccggctgacgctgcgaacctgcgcaaagcagtgcgcgaaactttcgttgacacatatgagtcttgtgatgtactggctgatttctacgaccagattgctgaccagttgcacgagtctcaacgcgacaaaatgccagcacttccggctaaaggtaagttgaacctccgtgacatcttaaaatcggacttcgcgttcgcg

SEQ ID NO: 1170 - protein, 890 aa, synthetic construct
  REGION 1..890: note = Variant of RNA polymerase
MHHHHHHMNTINIAKNDFSDIELAAIPFNTLADHYGERLAREQLALEHESYEMGEARFREMFERQLKAGEVADNAAAKPLITTLLPKMIARINDWFEEVKAKRGKRPTAFQFLQEIKPEAVAYITIKTTLACLTREDNTTVQAVASAIGRAIEDEARFGRIRDLEAKHFKKNVEEQLNKKVGHVAKKAFMQVVEHDMLSKGLLGGEAWSSWHKEDSIHVGVRCIEMLIESTGMVSLHRQNAGVVGADSETIELAPEYAEAIATRAGALAGISPMFQPCVVPPKPWTGITGGGYWAAGRKPLQLVRTRSLAALRRYEEVSMPEVIKAVNIAQNTAWRINKKVLDVANTITQWQHCPVADVPAMDRGEMPARPLDIDTNEIALKAWKKEASAFYRKDKARMSRRLSMEFMLSQANKFANYEAIWFPQNMDWRGRVYAVPMFNPQGNDMTKGLLTFAQEKPIGEDGFYWLKIHGANTAGVDKVPFPQRIKFVEDNHTNIMECAKAPLENTWWAEQDSPFCFLAFCFEYAGVINSGLSYNCSLPLAFDGSCSGLQHFSAMLRDEIGGKAVNLLPSAEYQDIYRIVSDKVNEMLKQDLINGTSTTVETVTDKKTGEITQRTKYGTKVMAQWWLEHGVNRGVTKRPVMTLVYGSKEFGFRDQVLSDTIQPAIDNGKGDMFLNPNQAAGYMAKLIWNAVSGTVVAAVEAMNWLKSAAKLLAAEVKDEKTDTVLRGRCAVHWVTPDGFPVWQEYKKPIQTRLNLMFLGQFRLQPTINTNKDSEIDARKQVSGIAPNFVHSLDGNHLRMTVVWAHEKYGIESFALIHDSFGTIPADAANLRKAVRETFVDTYESCDVLADFYDQIADQLHESQRDKMPALPAKGKLNLRDILKSDFAFA

SEQ ID NO: 1171 - DNA, 2670 bp, synthetic construct
  misc_feature 1..2670: note = Variant of RNA polymerase
  source 1..2670: mol_type = other DNA
atgcaccatcaccatcaccatatgaacacgattaacattgctaagaacgacttctctgacatcgaactggctgctatcccgttcaacactctggctgaccattacggtgagcgtttagctagtgaacagttggcccttgagcatgagtcttacgagatgggtgaagcacgcttccgcaagatgtttgagcgtcaacttaaagctggtgaggttgcggataacgctgccgccaagcctctcatcactaccctactccctaagatgattgcacgcatcaacgactggtttgaggaagtgaaagctaagcgcggcaagcgcccgacagccttccagttcctgcaagaaatcaagccggaagccgtagcgtacatcaccattaagaccactctggcttgcctaaccagcgcagacaatacaaccgttcaggctgtagcaagcgcaatcggtcgggccattgaggacgaggctcgcttcggtcgtatccgtgaccttgaagctaagcacttcaagaagaacgttgaggaacaactcaacaaggaggtagggcacgtcgcgaagaaagcatttatgcaagttgtcgagcacgacatgctctctaagggtctactcggtggcgaggcgtggtcttcgtggcataaggaagactctattcatgtaggagtacgctgcatcgagatgctcattgagtcaaccggaatggttagcttacaccgccaaaatgctggcgtagtgggtgcagactctgagactatcgaactcgcacctgaatacgctgaggctatcgcaacccgtgcaggtgcgctggctggcatctctccgatgttccaaccttgcgtagttcctcctaagccgtggactggcattactggtggtggctattgggctgcggggcgcaaacccctgcagttagtacgtactcgcagtctggcggcgcttcgccgctatgaagaagtgtcgatgccggaggtcatcaaagcagtcaacattgcgcagaatacagcatggcgtattaacaagaaagttctcgacgtagcgaataccatcacccaatggcagcactgtccagtcgcggatgtgcctgcgatggatcgtggcgaaatgccagctcgtccgttggacatcgataccaacgagattgcacttaaagcgtggaagaaagaagcttccgcgttctaccgcaaagacaaagcacgcatgagccgtcgtctgtcgatggagtttatgttatctcaggcgaacaagtttgcgaattatgaggcaatctggtttccgcaaaacatggattggcgtgggcgcgtgtacgctgtcccgatgttcaatcctcagggcaacgatatgacgaaaggcctgctgacctttgcgcaggagaaacccattggtgaagacggcttctattggctcaagattcatggcgcaaatacagctggagtggataaagtaccgtttccacaacgcatcaaatttgttgaggataaccatacgaatattatggaatgcgcgaaagcaccgctggaaaacacttggtgggcggaacaggactcgccgttctgctttctggcgttctgctttgagtatgctggcgtcatcaatagtggtctgtcgtacaactgtagcttgcctctggcatttgatggtagttgctccggcctgcaacatttctcagcgatgttacgcgacgaaattggcggcaaagctgtgaatctcctcccatctgcggaataccaggatatttatcgtatcgtcagcgacaaagttaacgagatgctgaaacaagatctgattaacggtacctctaccaccgtggaaacggtgactgataaaaagacaggcgaaattacccaacgcacgaaatacgggaccaaagttatggcacagtggtggttagaacacggtgtgaatcgtggcgtcacgaaacgcccggttatgactttggtgtatgggagcaaagagtttggattccgcgatcaagtgctgagtgacaccattcaaccggcgatcgataacggcaagggtgacatgtttctgaatccgaatcaggctgctggttacatggcgaaactgatctggaacgcagtgtccgggaccgtagtcgcagcagttgaggcgatgaactggctgaaaagtgcggcgaaattacttgctgctgaagtgaaggatgagaagacggatacagttctgcgtggccgctgcgcagtacattgggtgactcccgacggcttccctgtgtggcaggaatacaagaagcctattcaaacgcgcttgaacctgatgttcctcggtcagttccgcttacagcctaccattaacaccaacaaagatagcgagattgatgcacgcaaacaggtgtctggtatcgctcctaactttgtacacagcctggacggtaaccaccttcgtatgactgtagtgtgggcacacgagaagtacggaatcgaatcttttgcactgattcacgactccttcggtaccattccggctgacgctgcgaacctgcgcaaagcagtgcgcgaaactttcgttgacacatatgagtcttgtgatgtactggctgatttctacgaccagattgttgaccagttgcacgagtctcaacgcgacaaaatgccagcacttccggctaaaggtaagttgaacctccgtgacatcttaaaatcggacttcgcgttcgcg

SEQ ID NO: 1172 - protein, 890 aa, synthetic construct
  REGION 1..890: note = Variant of RNA polymerase
MHHHHHHMNTINIAKNDFSDIELAAIPFNTLADHYGERLASEQLALEHESYEMGEARFRKMFERQLKAGEVADNAAAKPLITTLLPKMIARINDWFEEVKAKRGKRPTAFQFLQEIKPEAVAYITIKTTLACLTSADNTTVQAVASAIGRAIEDEARFGRIRDLEAKHFKKNVEEQLNKEVGHVAKKAFMQVVEHDMLSKGLLGGEAWSSWHKEDSIHVGVRCIEMLIESTGMVSLHRQNAGVVGADSETIELAPEYAEAIATRAGALAGISPMFQPCVVPPKPWTGITGGGYWAAGRKPLQLVRTRSLAALRRYEEVSMPEVIKAVNIAQNTAWRINKKVLDVANTITQWQHCPVADVPAMDRGEMPARPLDIDTNEIALKAWKKEASAFYRKDKARMSRRLSMEFMLSQANKFANYEAIWFPQNMDWRGRVYAVPMFNPQGNDMTKGLLTFAQEKPIGEDGFYWLKIHGANTAGVDKVPFPQRIKFVEDNHTNIMECAKAPLENTWWAEQDSPFCFLAFCFEYAGVINSGLSYNCSLPLAFDGSCSGLQHFSAMLRDEIGGKAVNLLPSAEYQDIYRIVSDKVNEMLKQDLINGTSTTVETVTDKKTGEITQRTKYGTKVMAQWWLEHGVNRGVTKRPVMTLVYGSKEFGFRDQVLSDTIQPAIDNGKGDMFLNPNQAAGYMAKLIWNAVSGTVVAAVEAMNWLKSAAKLLAAEVKDEKTDTVLRGRCAVHWVTPDGFPVWQEYKKPIQTRLNLMFLGQFRLQPTINTNKDSEIDARKQVSGIAPNFVHSLDGNHLRMTVVWAHEKYGIESFALIHDSFGTIPADAANLRKAVRETFVDTYESCDVLADFYDQIVDQLHESQRDKMPALPAKGKLNLRDILKSDFAFA

SEQ ID NO: 1173 - DNA, 2670 bp, synthetic construct
  misc_feature 1..2670: note = Variant of RNA polymerase
  source 1..2670: mol_type = other DNA
atgcaccatcaccatcaccatatgaacacgattaacattgctaagaacgacttctctgacatcgaactggctgctatcccgttcaacactctggctgaccattacggtgagcgtttagctcgtgaacagttggcccttgagcatgagtcttacgagatgggtgaagcacgcttccgcaagatgtttgagcgtcaacttaaagctggtgaggttgcggataacgctgccgccaagcctctcatcactaccctactccctaagatgattgcacgcatcaacgactggtttgaggaagtgaaagctaagcgcggcaagcgcccgacagccttccagttcctgcaagaaatcaagccggaagccgtagcgtacatcaccattaagaccactctggcttgcctaaccagcgcagacaatacaaccgttcaggctgtagcaagcgcaatcggtcgggccattgaggacgaggctcgcttcggtcgtatccgtgaccttgaagctaagcacttcaagaagaacgttgaggaacaactcaacaagcgtgtagggcacgtcgacaagaaagcatttatgcaagttgtcgagcacgacatgctctctaagggtctactcggtggcgaggcgtggtcttcgtggcataaggaagactctattcatgtaggagtacgctgcatcgagatgctcattgagtcaaccggaatggttagcttacaccgccaaaatgctggcgtagtgggtgcagactctgagactatcgaactcgcacctgaatacgctgaggctatcgcaacccgtgcaggtgcgctggctggcatctctccgatgttccaaccttgcgtagttcctcctaagccgtggactggcattactggtggtggctattgggctgcggggcgcaaacccctgcagttagtacgtactcacagtctggcggcgcttcgccgctatgaagaagtgtcgatgccggaggtcatcaaagcagtcaacattgcgcagaatacagcatggcgtattaacaagaaagttctcgacgtagcgaataccatcacccaatggcagcactgtccagtcgcggatgtgcctgcgatggatcgtggcgaaatgccagctcgtccgttggacatcgataccaacgagattgcacttaaagcgtggaagaaagaagcttccgcgttctaccgcaaagacaaagcacgcatgagccgtcgtctgtcgatggagtttatgttatctcaggcgaacaagtttggcaattatgaggctatctggtttccgcaaaacatggattggcgtgggcgcgtgtacgctgtcccgatgttcaatcctcagggcaacgatatgacgaaaggcctgctgacctttgcgcaggagaaacccattggtgaagacggcttctattggctcaagattcatggcgcaaatacagctggagtggataaagtaccgtttccacaacgcatcaaatttgttgaggataaccatacgaacattatggaatgtgcgaaagcaccgctggaaaacacttggtgggcggaacaggactcgccgttctgctttctggcgttctgctttgagtatgctggcgtcatcaatagtggtctgtcgtacaactgtagcttgcctctggcatttgatggtagttgctccggcctgcaacatttctcagcgatgttacgcgacgaaattggcggcaaagctgtgaatctcctcccatctgcggaataccaggatatttatcgtatcgtcagcgacaaagttaacgagatgctgaaacaagatctgattaacggtacctctaccaccgtggaaacggtgactgataaaaagacaggcgaaattacccaacgcacgaaatacgggaccaaagttatggcacagtggtggttagaacacggtgtgaatcgtggcgtcacgaaacgcccggttatgactttggtgtatgggagcaaagagtttggattccgcgatcaagtgctgagtgacaccattcaaccggcgatcgataacggcaagggtgacatgtttctgaatccgaatcaggctgctggttacatggcgaaactgatctggaacgcagtgtccgggaccgtagtcgcagcagttgaggcgatgaactggctgaaaagtgcggcgaaattacttgctgctgaagtgaaggatgagaagacggatacagttctgcgtggccgctgcgcagtacattgggtgactcccgacggcttccctgtgtggcaggaatacaagaagcctattcaaacgcgcttgaacctgatgttcctcggtcagttccgcttacagcctaccattaacaccaacaaagatagcgagattgatgcacgcaaacaggtgtctggtatcgctcctaactttgtacacagcctggacggtaaccaccttcgtatgactgtagtgtgggcacacgagaagtacggaatcgaatcttttgcactgattcacgactccttcggtaccattccggctgacgctgcgaacctgcgcaaagcagtgcgcgaaactttcgttgacacatatgagtcttgtgatgtactggctgatttctacgaccagattgttgaccagttgcacgagtctcaacgcgacaaaatgccagcacttccggctaaaggtaagttgaacctccgtgacatcttaaaatcggacttcgcgttcgcg

SEQ ID NO: 1174 - protein, 890 aa, synthetic construct
  REGION 1..890: note = Variant of RNA polymerase
MHHHHHHMNTINIAKNDFSDIELAAIPFNTLADHYGERLAREQLALEHESYEMGEARFRKMFERQLKAGEVADNAAAKPLITTLLPKMIARINDWFEEVKAKRGKRPTAFQFLQEIKPEAVAYITIKTTLACLTSADNTTVQAVASAIGRAIEDEARFGRIRDLEAKHFKKNVEEQLNKRVGHVDKKAFMQVVEHDMLSKGLLGGEAWSSWHKEDSIHVGVRCIEMLIESTGMVSLHRQNAGVVGADSETIELAPEYAEAIATRAGALAGISPMFQPCVVPPKPWTGITGGGYWAAGRKPLQLVRTHSLAALRRYEEVSMPEVIKAVNIAQNTAWRINKKVLDVANTITQWQHCPVADVPAMDRGEMPARPLDIDTNEIALKAWKKEASAFYRKDKARMSRRLSMEFMLSQANKFGNYEAIWFPQNMDWRGRVYAVPMFNPQGNDMTKGLLTFAQEKPIGEDGFYWLKIHGANTAGVDKVPFPQRIKFVEDNHTNIMECAKAPLENTWWAEQDSPFCFLAFCFEYAGVINSGLSYNCSLPLAFDGSCSGLQHFSAMLRDEIGGKAVNLLPSAEYQDIYRIVSDKVNEMLKQDLINGTSTTVETVTDKKTGEITQRTKYGTKVMAQWWLEHGVNRGVTKRPVMTLVYGSKEFGFRDQVLSDTIQPAIDNGKGDMFLNPNQAAGYMAKLIWNAVSGTVVAAVEAMNWLKSAAKLLAAEVKDEKTDTVLRGRCAVHWVTPDGFPVWQEYKKPIQTRLNLMFLGQFRLQPTINTNKDSEIDARKQVSGIAPNFVHSLDGNHLRMTVVWAHEKYGIESFALIHDSFGTIPADAANLRKAVRETFVDTYESCDVLADFYDQIVDQLHESQRDKMPALPAKGKLNLRDILKSDFAFA

SEQ ID NO: 1175 - DNA, 2670 bp, synthetic construct
  misc_feature 1..2670: note = Variant of RNA polymerase
  source 1..2670: mol_type = other DNA
atgcaccatcaccatcaccatatgaacacgattaacattgctaagaacgacttctctgacatcgaactggctgctatcccgttcaacactctggctgaccattacggtgagcgtttagctagtgaacagttggcccttgagcatgagtcttacgagatgggtgaagcacgcttccgcaagatgtttgagcgtcaacttaaagctggtgaggttgcggataacgctgccgccaagcctctcatcactaccctactccctaagatgattgcacgcatcaacgactggtttgaggaagtgaaagctaagcgcagcaagcgcccgacagccttccagttcctgcaagaaatcaagccggaagccgtagcgtacatcaccattaagaccactctggcttgcctaaccagtgcggacaatacaaccgttcaggctgtagcaagcgcaatcggtcgggccattgaggacgaggctcgcttcggtcgtatccgtgaccttgaagctaagcacttcaagaagaacgttgaggaacaactcaacaagaaggtagggcacgtcgcgaagaaagcatttatgcaagttgtcgagcacgacatgctctctaagggtctactcggtggcgaggcgtggtcttcgtggcataaggaagactctattcatgtaggagtacgctgcatcgagatgctcattgagtcaaccggaatggttagcttacaccgccaaaatgctggcgtagtgggtgcagactctgagactatcgaactcgcacctgaatacgctgaggctatcgcaacccgtgcaggtgcgctggctggcatctctccgatgttccaaccttgcgtagttcctcctaagccgtggactggcattactggtggtggctattgggctgcggggcgcaaacccctgcagttagtacgtactcacagtctggcggcgcttcgccgctatgaagaagtgtcgatgccggaggtcatcaaagcagtcaacattgcgcagaatacagcatggcgtattaacaagaaagttctcgacgtagcgaataccatcacccaatggcagcactgtccagtcgcggatgtgcctgcgatggatcgtggcgaaatgccagctcgtccgttggacatcgataccaacgagattgcacttaaagcgtggaagaaagaagcttccgcgttctaccgcaaagacaaagcacgcatgagccgtcgtctgtcgatggagtttatgttatctcaggcgaacaagtttgccaattatgaggctatctggtttccgcaaaacatggattggcgtgggcgcgtgtacgctgtcccgatgttcaatcctcagggcaacgatatgacgaaaggcctgctgacctttgcgcaggagaaacccattggtgaagacggcttctattggctcaagattcatggcgcaaatacagctggagtggataaagtaccgtttccacaacgcatcaaatttgttgaggataaccatacgaatattatggaatgcgcgaaagcaccgctggaaaacacttggtgggcggaacaggactcgccgttctgctttctggcgttctgctttgagtatgctggcgtcatcaatagtggtctgtcgtacaactgtagcttgcctctggcatttgatggtagttgctccggcctgcaacatttctcagcgatgttacgcgacgaaattggcggcaaagctgtgaatctcctcccatctgcggaataccaggatatttatcgtatcgtcagcgacaaagttaacgagatgctgaaacaagatctgattaacggtacctctaccaccgtggaaacggtgactgataaaaagacaggcgaaattacccaacgcacgaaatacgggaccaaagttatggcacagtggtggttagaacacggtgtgaatcgtggcgtcacgaaacgcccggttatgactttggtgtatgggagcaaagagtttggattccgcgatcaagtgctgagtgacaccattcaaccggcgatcgataacggcaagggtgacatgtttctgaatccgaatcaggctgctggttacatggcgaaactgatctggaacgcagtgtccgggaccgtagtcgcagcagttgaggcgatgaactggctgaaaagtgcggcgaaattacttgctgctgaagtgaaggatgagaagacggatacagttctgcgtggccgctgcgcagtacattgggtgactcccgacggcttccctgtgtggcaggaatacaagaagcctattcaaacgcgcttgaacctgatgttcctcggtcagttccgcttacagcctaccattaacaccaacaaagatagcgagattgatgcacgcaaacaggtgtctggtatcgctcctaactttgtacacagcctggacggtaaccaccttcgtatgactgtagtgtgggcacacgagaagtacggaatcgaatcttttgcactgattcacgactccttcggtaccattccggctgacgctgcgaacctgttcaaagcagtgcgcgaaactttcgttgacacatatgagtcttgtgatgtactggctgatttctacgaccagattgttgaccagttgcacgagtctcaacgcgacaaaatgccagcacttccggctaaaggtaagttgaacctccgtgacatcttaaaatcggacttcgcgttcgcg

SEQ ID NO: 1176 - protein, 890 aa, synthetic construct
  REGION 1..890: note = Variant of RNA polymerase
MHHHHHHMNTINIAKNDFSDIELAAIPFNTLADHYGERLASEQLALEHESYEMGEARFRKMFERQLKAGEVADNAAAKPLITTLLPKMIARINDWFEEVKAKRSKRPTAFQFLQEIKPEAVAYITIKTTLACLTSADNTTVQAVASAIGRAIEDEARFGRIRDLEAKHFKKNVEEQLNKKVGHVAKKAFMQVVEHDMLSKGLLGGEAWSSWHKEDSIHVGVRCIEMLIESTGMVSLHRQNAGVVGADSETIELAPEYAEAIATRAGALAGISPMFQPCVVPPKPWTGITGGGYWAAGRKPLQLVRTHSLAALRRYEEVSMPEVIKAVNIAQNTAWRINKKVLDVANTITQWQHCPVADVPAMDRGEMPARPLDIDTNEIALKAWKKEASAFYRKDKARMSRRLSMEFMLSQANKFANYEAIWFPQNMDWRGRVYAVPMFNPQGNDMTKGLLTFAQEKPIGEDGFYWLKIHGANTAGVDKVPFPQRIKFVEDNHTNIMECAKAPLENTWWAEQDSPFCFLAFCFEYAGVINSGLSYNCSLPLAFDGSCSGLQHFSAMLRDEIGGKAVNLLPSAEYQDIYRIVSDKVNEMLKQDLINGTSTTVETVTDKKTGEITQRTKYGTKVMAQWWLEHGVNRGVTKRPVMTLVYGSKEFGFRDQVLSDTIQPAIDNGKGDMFLNPNQAAGYMAKLIWNAVSGTVVAAVEAMNWLKSAAKLLAAEVKDEKTDTVLRGRCAVHWVTPDGFPVWQEYKKPIQTRLNLMFLGQFRLQPTINTNKDSEIDARKQVSGIAPNFVHSLDGNHLRMTVVWAHEKYGIESFALIHDSFGTIPADAANLFKAVRETFVDTYESCDVLADFYDQIVDQLHESQRDKMPALPAKGKLNLRDILKSDFAFA

SEQ ID NO: 1177 - DNA, 2670 bp, synthetic construct
  misc_feature 1..2670: note = Variant of RNA polymerase
  source 1..2670: mol_type = other DNA
atgcaccatcaccatcaccatatgaacacgattaacattgctaagaacgacttctctgacatcgaactggctgctatcccgttcaacactctggctgaccattacggtgagcgtttagctagtgaacagttggcccttgagcatgagtcttacgagatgggtgaagcacgcttccgcaagatgtttgagcgtcaacttaaagctggtgaggttgcggataacgctgccgccaagcctctcatcactaccctactccctaagatgattgcacgcatcaacgactggtttgaggaagtgaaagctaagcgcggcaagcgcccgacagccttccagttcctgcaagaaatcaagccggaagccgtagcgtacatcaccattaagaccactctggcttgcctaacccgcgaagacaatacaaccgttcaggctgtagcaagcgcaatcggtcgggccattgaggacgaggctcgcttcggtcgtatccgtgaccttgaagctaagcacttcaagaagaacgttgaggaacaactcaacaagaaggtagggcacgtcgcgaagaaagcatttatgcaagttgtcgagcacgacatgctctctaagggtctactcggtggcgaggcgtggtcttcgtggcataaggaagactctattcatgtaggagtacgctgcatcgagatgctcattgagtcaaccggaatggttagcttacaccgccaaaatgctggcgtagtgggtgcagactctgagactatcgaactcgcacctgaatacgctgaggctatcgcaacccgtgcaggtgcgctggctggcatctctccgatgttccaaccttgcgtagttcctcctaagccgtggactggcattactggtggtggctattgggctgcggggcgcaaacccctgcagttagtacgtactcgcagtctggcggcgcttcgccgctatgaagaagtgtcgatgccggaggtcatcaaagcagtcaacattgcgcagaatacagcatggcgtattaacaagaaagttctcgacgtagcgaataccatcacccaatggcagcactgtccagtcgcggatgtgcctgcgatggatcgtggcgaaatgccagctcgtccgttggacatcgataccaacgagattgcacttaaagcgtggaagaaagaagcttccgcgttctaccgcaaagacaaagcacgcatgagccgtcgtctgtcgatggagtttatgttatctcaggcgaacaagtttgccaattatgaggttatctggtttccgcaaaacatggattggcgtgggcgcgtgtacgctgtcccgatgttcaatcctcagggcaacgatatgacgaaaggcctgctgacctttgcgcaggagaaacccattggtgaagacggcttctattggctcaagattcatggcgcaaatacagctggaggggataaagtaccgtttccacaacgcatcaaatttgttgaggataaccatacgaatattatggaatgcgcgaaagcaccgctggaaaacacttggtgggcggaacaggactcgccgttctgctttctggcgttctgctttgagtatgctggcgtcatcaatagtggtctgtcgtacaactgtagcttgcctctggcatttgatggtagttgctccggcctgcaacatttctcagcgatgttacgcgacgaaattggcggcaaagctgtgaatctcctcccatctgcggaataccaggatatttatcgtatcgtcagcgacaaagttaacgagatgctgaaacaagatctgattaacggtacctctaccaccgtggaaacggtgactgataaaaagacaggcgaaattacccaacgcacgaaatacgggaccaaagttatggcacagtggtggttagaacacggtgtgaatcgtggcgtcacgaaacgcccggttatgactttggtgtatgggagcaaagagtttggattccgcgatcaagtgctgagtgacaccattcaaccggcgatcgataacggcaagggtgacatgtttctgaatccgaatcaggctgctggttacatggcgaaactgatctggaacgcagtgtccgggaccgtagtcgcagcagttgaggcgatgaactggctgaaaagtgcggcgaaattacttgctgctgaagtgaaggatgagaagacggatacagttctgcgtggccgctgcgcagtacattgggtgactcccgacggcttccctgtgtggcaggaatacaagaagcctattcaaacgcgcttgaacctgatgttcctcggtcagttccgcttacagcctaccattaacaccaacaaagatagcgagattgatgcacgcaaacaggtgtctggtatcgctcctaactttgtacacagcctggacggtaaccaccttcgtatgactgtagtgtgggcacacgagaagtacggaatcgaatcttttgcactgattcacgactccttcggtaccattccggctgacgctgcgaacctgcgcaaagcagtgcgcgaaactttcgttgacacatatgagtcttgtgatgtactggctgatttctacgaccagattgttgaccagttgcacgagtctcaacgcgacaaaatgccagcacttccggctaaaggtaagttgaacctccgtgacatcttaaaatcggacttcgcgttcgcg

SEQ ID NO: 1178 - protein, 890 aa, synthetic construct
  REGION 1..890: note = Variant of RNA polymerase
MHHHHHHMNTINIAKNDFSDIELAAIPFNTLADHYGERLASEQLALEHESYEMGEARFRKMFERQLKAGEVADNAAAKPLITTLLPKMIARINDWFEEVKAKRGKRPTAFQFLQEIKPEAVAYITIKTTLACLTREDNTTVQAVASAIGRAIEDEARFGRIRDLEAKHFKKNVEEQLNKKVGHVAKKAFMQVVEHDMLSKGLLGGEAWSSWHKEDSIHVGVRCIEMLIESTGMVSLHRQNAGVVGADSETIELAPEYAEAIATRAGALAGISPMFQPCVVPPKPWTGITGGGYWAAGRKPLQLVRTRSLAALRRYEEVSMPEVIKAVNIAQNTAWRINKKVLDVANTITQWQHCPVADVPAMDRGEMPARPLDIDTNEIALKAWKKEASAFYRKDKARMSRRLSMEFMLSQANKFANYEVIWFPQNMDWRGRVYAVPMFNPQGNDMTKGLLTFAQEKPIGEDGFYWLKIHGANTAGGDKVPFPQRIKFVEDNHTNIMECAKAPLENTWWAEQDSPFCFLAFCFEYAGVINSGLSYNCSLPLAFDGSCSGLQHFSAMLRDEIGGKAVNLLPSAEYQDIYRIVSDKVNEMLKQDLINGTSTTVETVTDKKTGEITQRTKYGTKVMAQWWLEHGVNRGVTKRPVMTLVYGSKEFGFRDQVLSDTIQPAIDNGKGDMFLNPNQAAGYMAKLIWNAVSGTVVAAVEAMNWLKSAAKLLAAEVKDEKTDTVLRGRCAVHWVTPDGFPVWQEYKKPIQTRLNLMFLGQFRLQPTINTNKDSEIDARKQVSGIAPNFVHSLDGNHLRMTVVWAHEKYGIESFALIHDSFGTIPADAANLRKAVRETFVDTYESCDVLADFYDQIVDQLHESQRDKMPALPAKGKLNLRDILKSDFAFA

SEQ ID NO: 1179 - DNA, 2670 bp, synthetic construct
  misc_feature 1..2670: note = Variant of RNA polymerase
  source 1..2670: mol_type = other DNA
atgcaccatcaccatcaccatatgaacacgattaacattgctaagaacgacttctctgacatcgaactggctgctatcccgttcaacactctggctgaccattacggtgagcgtttagctagtgaacagttggcccttgagcatgagtcttacgagatgggtgaagcacgcttccgcaagatgtttgagcgtcaacttaaagctggtgaggttgcggataacgctgccgccaagcctctcatcactaccctactccctaagatgattgcacgcatcaacgactggtttgaggaagtgaaagctaagcgcggcaagcgcccgacagccttccagttcctgcaagaaatcaagccggaagccgtagcgtacatcaccattaagaccactctggcttgcctaacccgcgcagacaatacaaccgttcaggctgtagcaagcgcaatcggtcgggccattgaggacgaggctcgcttcggtcgtatccgtgaccttgaagctaagcacttcaagaagaacgttgaggaacaactcaacaagcgtgtagggcacgtcgcgaagaaagcatttatgcaagttgtcgagcacgacatgctctctaagggtctactcggtggcgaggcgtggtcttcgtggcataaggaagactctattcatgtaggagtacgctgcatcgagatgctcattgagtcaaccggaatggttagcttacaccgccaaaatgctggcgtagtgggtgcagactctgagactatcgaactcgcacctgaatacgctgaggctatcgcaacccgtgcaggtgcgctggctggcatctctccgatgttccaaccttgcgtagttcctcctaagccgtggactggcattactggtggtggctattgggctgcggggcgcaaacccctgcagttagtacgtactcgcagtctggcggcgcttcgccgctatgaagaagtgtcgatgccggaggtcatcaaagcagtcaacattgcgcagaatacagcatggcgtattaacaagaaagttctcgacgtagcgaataccatcacccaatggcagcactgtccagtcgcggatgtgcctgcgatggatcgtggcgaaatgccagctcgtccgttggacatcgataccaacgagattgcacttaaagcgtggaagaaagaagcttccgcgttctaccgcaaagacaaagcacgcatgagccgtcgtctgtcgatggagtttatgttatctcaggcgaacaagtttgccaattatgaggttatctggtttccgcaaaacatggattggcgtgggcgcgtgtacgctgtcccgatgttcaatcctcagggcaacgatatgacgaaaggcctgctgacctttgcgcaggagaaacccattggtgaagacggcttctattggctcaagattcatggcgcaaatacagctggaggggataaagtaccgtttccacaacgcatcaaatttgttgaggataaccatacgaatattatggaatgcgcgaaagcaccgctggaaaacacttggtgggcggaacaggactcgccgttctgctttctggcgttctgctttgagtatgctggcgtcatcaatagtggtctgtcgtacaactgtagcttgcctctggcatttgatggtagttgctccggcctgcaacatttctcagcgatgttacgcgacgaaattggcggcaaagctgtgaatctcctcccatctgcggaataccaggatatttatcgtatcgtcagcgacaaagttaacgagatgctgaaacaagatctgattaacggtacctctaccaccgtggaaacggtgactgataaaaagacaggcgaaattacccaacgcacgaaatacgggaccaaagttatggcacagtggtggttagaacacggtgtgaatcgtggcgtcacgaaacgcccggttatgactttggtgtatgggagcaaagagtttggattccgcgatcaagtgctgagtgacaccattcaaccggcgatcgataacggcaagggtgacatgtttctgaatccgaatcaggctgctggttacatggcgaaactgatctggaacgcagtgtccgggaccgtagtcgcagcagttgaggcgatgaactggctgaaaagtgcggcgaaattacttgctgctgaagtgaaggatgagaagacggatacagttctgcgtggccgctgcgcagtacattgggtgactcccgacggcttccctgtgtggcaggaatacaagaagcctattcaaacgcgcttgaacctgatgttcctcggtcagttccgcttacagcctaccattaacaccaacaaagatagcgagattgatgcacgcaaacaggtgtctggtatcgctcctaactttgtacacagcctggacggtaaccaccttcgtatgactgtagtgtgggcacacgagaagtacggaatcgaatcttttgcactgattcacgactccttcggtaccattccggctgacgctgcgaacctgcgcaaagcagtgcgcgaaactttcgttgacacatatgagtcttgtgatgtactggctgatttctacgaccagattgctgaccagttgcacgagtctcaacgcgacaaaatgccagcacttccggctaaaggtaagttgaacctccgtgacatcttaaaatcggacttcgcgttcgcg

SEQ ID NO: 1180 - protein, 890 aa, synthetic construct
  REGION 1..890: note = Variant of RNA polymerase
MHHHHHHMNTINIAKNDFSDIELAAIPFNTLADHYGERLASEQLALEHESYEMGEARFRKMFERQLKAGEVADNAAAKPLITTLLPKMIARINDWFEEVKAKRGKRPTAFQFLQEIKPEAVAYITIKTTLACLTRADNTTVQAVASAIGRAIEDEARFGRIRDLEAKHFKKNVEEQLNKRVGHVAKKAFMQVVEHDMLSKGLLGGEAWSSWHKEDSIHVGVRCIEMLIESTGMVSLHRQNAGVVGADSETIELAPEYAEAIATRAGALAGISPMFQPCVVPPKPWTGITGGGYWAAGRKPLQLVRTRSLAALRRYEEVSMPEVIKAVNIAQNTAWRINKKVLDVANTITQWQHCPVADVPAMDRGEMPARPLDIDTNEIALKAWKKEASAFYRKDKARMSRRLSMEFMLSQANKFANYEVIWFPQNMDWRGRVYAVPMFNPQGNDMTKGLLTFAQEKPIGEDGFYWLKIHGANTAGGDKVPFPQRIKFVEDNHTNIMECAKAPLENTWWAEQDSPFCFLAFCFEYAGVINSGLSYNCSLPLAFDGSCSGLQHFSAMLRDEIGGKAVNLLPSAEYQDIYRIVSDKVNEMLKQDLINGTSTTVETVTDKKTGEITQRTKYGTKVMAQWWLEHGVNRGVTKRPVMTLVYGSKEFGFRDQVLSDTIQPAIDNGKGDMFLNPNQAAGYMAKLIWNAVSGTVVAAVEAMNWLKSAAKLLAAEVKDEKTDTVLRGRCAVHWVTPDGFPVWQEYKKPIQTRLNLMFLGQFRLQPTINTNKDSEIDARKQVSGIAPNFVHSLDGNHLRMTVVWAHEKYGIESFALIHDSFGTIPADAANLRKAVRETFVDTYESCDVLADFYDQIADQLHESQRDKMPALPAKGKLNLRDILKSDFAFA

SEQ ID NO: 1181 - DNA, 2670 bp, synthetic construct
  misc_feature 1..2670: note = Variant of RNA polymerase
  source 1..2670: mol_type = other DNA
atgcaccatcaccatcaccatatgaacacgattaacattgctaagaacgacttctctgacatcgaactggctgctatcccgttcaacactctggctgaccattacggtgagcgtttagctagtgaacagttggcccttgagcatgagtcttacgagatgggtgaagcacgcttccgcaagatgtttgagcgtcaacttaaagctggtgaggttgcggataacgctgccgccaagcctctcatcactaccctactccctaagatgattgcacgcatcaacgactggtttgaggaagtgaaagctaagcgcggcaagcgcccgacagccttccagttcctgcaagaaatcaagccggaagccgtagcgtacatcaccattaagaccactctggcttgcctaacccgcgcagacaatacaaccgttcaggctgtagcaagcgcaatcggtcgggccattgaggacgaggctcgcttcggtcgtatccgtgaccttgaagctaagcacttcaagaagaacgttgaggaacaactcaacaagaaggtagggcacgtcgcgaagaaagcatttatgcaagttgtcgagcacgacatgctctctaagggtctactcggtggcgaggcgtggtcttcgtggcataaggaagactctattcatgtaggagtacgctgcatcgagatgctcattgagtcaaccggaatggttagcttacaccgccaaaatgctggcgtagtgggtgcagactctgagactatcgaactcgcacctgaatacgctgaggctatcgcaacccgtgcaggtgcgctggctggcatctctccgatgttccaaccttgcgtagttcctcctaagccgtggactggcattactggtggtggctattgggctgcggggcgcaaacccctgcagttagtacgtactcgcagtctggcggcgcttcgccgctatgaagaagtgtcgatgccggaggtcatcaaagcagtcaacattgcgcagaatacagcatggcgtattaacaagaaagttctcgacgtagcgaataccatcacccaatggcagcactgtccagtcgcggatgtgcctgcgatggatcgtggcgaaatgccagctcgtccgttggacatcgataccaacgagattgcacttaaagcgtggaagaaagaagcttccgcgttctaccgcaaagacaaagcacgcatgagccgtcgtctgtcgatggagtttatgttatctcaggcgaacaagtttggcaattatgaggctatctggtttccgcaaaacatggattggcgtgggcgcgtgtacgctgtcccgatgttcaatcctcagggcaacgatatgacgaaaggcctgctgacctttgcgcaggagaaacccattggtgaagacggcttctattggctcaagattcatggcgcaaatacagctggaggagataaagtaccgtttccacaacgcatcaaatttgttgaggataaccatacgaatattatggaatgcgcgaaagcaccgctggaaaacacttggtgggcggaacaggactcgccgttctgctttctggcgttctgctttgagtatgctggcgtcatcaatagtggtctgtcgtacaactgtagcttgcctctggcatttgatggtagttgctccggcctgcaacatttctcagcgatgttacgcgacgaaattggcggcaaagctgtgaatctcctcccatctgcggaataccaggatatttatcgtatcgtcagcgacaaagttaacgagatgctgaaacaagatctgattaacggtacctctaccaccgtggaaacggtgactgataaaaagacaggcgaaattacccaacgcacgaaatacgggaccaaagttatggcacagtggtggttagaacacggtgtgaatcgtggcgtcacgaaacgcccggttatgactttggtgtatgggagcaaagagtttggattccgcgatcaagtgctgagtgacaccattcaaccggcgatcgataacggcaagggtgacatgtttctgaatccgaatcaggctgctggttacatggcgaaactgatctggaacgcagtgtccgggaccgtagtcgcagcagttgaggcgatgaactggctgaaaagtgcggcgaaattacttgctgctgaagtgaaggatgagaagacggatacagttctgcgtggccgctgcgcagtacattgggtgactcccgacggcttccctgtgtggcaggaatacaagaagcctattcaaacgcgcttgaacctgatgttcctcggtcagttccgcttacagcctaccattaacaccaacaaagatagcgagattgatgcacgcaaacaggtgtctggtatcgctcctaactttgtacacagcctggacggtaaccaccttcgtatgactgtagtgtgggcacacgagaagtacggaatcgaatcttttgcactgattcacgactccttcggtaccattccggctgacgctgcgaacctgcgcaaagcagtgcgcgaaactttcgttgacacatatgagtcttgtgatgtactggctgatttctacgaccagattgctgaccagttgcacgagtctcaacgcgacaaaatgccagcacttccggctaaaggtaagttgaacctccgtgacatcttaaaatcggacttcgcgttcgcg

SEQ ID NO: 1182 - protein, 890 aa, synthetic construct
  REGION 1..890: note = Variant of RNA polymerase
MHHHHHHMNTINIAKNDFSDIELAAIPFNTLADHYGERLASEQLALEHESYEMGEARFRKMFERQLKAGEVADNAAAKPLITTLLPKMIARINDWFEEVKAKRGKRPTAFQFLQEIKPEAVAYITIKTTLACLTRADNTTVQAVASAIGRAIEDEARFGRIRDLEAKHFKKNVEEQLNKKVGHVAKKAFMQVVEHDMLSKGLLGGEAWSSWHKEDSIHVGVRCIEMLIESTGMVSLHRQNAGVVGADSETIELAPEYAEAIATRAGALAGISPMFQPCVVPPKPWTGITGGGYWAAGRKPLQLVRTRSLAALRRYEEVSMPEVIKAVNIAQNTAWRINKKVLDVANTITQWQHCPVADVPAMDRGEMPARPLDIDTNEIALKAWKKEASAFYRKDKARMSRRLSMEFMLSQANKFGNYEAIWFPQNMDWRGRVYAVPMFNPQGNDMTKGLLTFAQEKPIGEDGFYWLKIHGANTAGGDKVPFPQRIKFVEDNHTNIMECAKAPLENTWWAEQDSPFCFLAFCFEYAGVINSGLSYNCSLPLAFDGSCSGLQHFSAMLRDEIGGKAVNLLPSAEYQDIYRIVSDKVNEMLKQDLINGTSTTVETVTDKKTGEITQRTKYGTKVMAQWWLEHGVNRGVTKRPVMTLVYGSKEFGFRDQVLSDTIQPAIDNGKGDMFLNPNQAAGYMAKLIWNAVSGTVVAAVEAMNWLKSAAKLLAAEVKDEKTDTVLRGRCAVHWVTPDGFPVWQEYKKPIQTRLNLMFLGQFRLQPTINTNKDSEIDARKQVSGIAPNFVHSLDGNHLRMTVVWAHEKYGIESFALIHDSFGTIPADAANLRKAVRETFVDTYESCDVLADFYDQIADQLHESQRDKMPALPAKGKLNLRDILKSDFAFA

SEQ ID NO: 1183 - DNA, 2670 bp, synthetic construct
  misc_feature 1..2670: note = Variant of RNA polymerase
  source 1..2670: mol_type = other DNA
atgcaccatcaccatcaccatatgaacacgattaacattgctaagaacgacttctctgacatcgaactggctgctatcccgttcaacactctggctgaccattacggtgagcgtttagctcgcgaacagttggcccttgagcatgagtcttacgagatgggtgaagcacgcttccgcaagatgtttgagcgtcaacttaaagctggtgaggttgcggataacgctgccgccaagcctctcatcactaccctactccctaagatgattgcacgcatcaacgactggtttgaggaagtgaaagctaagcgcggcaagcgcccgacagccttccagttcctgcaagaaatcaagccggaagccgtagcgtacatcaccattaagaccactctggcttgcctaaccagtgcggacaatacaaccgttcaggctgtagcaagcgcaatcggtcgggccattgaggacgaggctcgcttcggtcgtatccgtgaccttgaagctaagcacttcaagaagaacgttgaggaacaactcaacaagcgcgtagggcacgtctacaagaaagcatttatgcaagttgtcgagcacgacatgctctctaagggtctactcggtggcgaggcgtggtcttcgtggcataaggaagactctattcatgtaggagtacgctgcatcgagatgctcattgagtcaaccggaatggttagcttacaccgccaaaatgctggcgtagtgggtgcagactctgagactatcgaactcgcacctgaatacgctgaggctatcgcaacccgtgcaggtgcgctggctggcatctctccgatgttccaaccttgcgtagttcctcctaagccgtggactggcattactggtggtggctattgggctgcggggcgcaaacccctgcagttagtacgtactcgcagtctggcggcgcttcgccgctatgaagaagtgtcgatgccggaggtcatcaaagcagtcaacattgcgcagaatacagcatggcgtattaacaagaaagttctcgacgtagcgaataccatcacccaatggcagcactgtccagtcgcggatgtgcctgcgatggatcgtggcgaaatgccagctcgtccgttggacatcgataccaacgagattgcacttaaagcgtggaagaaagaagcttccgcgttctaccgcaaagacaaagcacgcatgagccgtcgtctgtcgatggagtttatgttatctcaggcgaacaagtttgcgaattatgaggcaatctggtttccgcaaaacatggattggcgtgggcgcgtgtacgctgtcccgatgttcaatcctcagggcaacgatatgacgaaaggcctgctgacctttgcgcaggagaaacccattggtgaagacggcttctattggctcaagattcatggcgcaaatacagctggagtggataaagtaccgtttccacaacgcatcaaatttgttgaggataaccatacgaatattatggaatgcgcgaaagcaccgctggaaaacacttggtgggcggaacaggactcgccgttctgctttctggcgttctgctttgagtatgctggcgtcatcaatagtggtctgtcgtacaactgtagcttgcctctggcatttgatggtagttgctccggcctgcaacatttctcagcgatgttacgcgacgaaattggcggcaaagctgtgaatctcctcccatctgcggaataccaggatatttatcgtatcgtcagcgacaaagttaacgagatgctgaaacaagatctgattaacggtacctctaccaccgtggaaacggtgactgataaaaagacaggcgaaattacccaacgcacgaaatacgggaccaaagttatggcacagtggtggttagaacacggtgtgaatcgtggcgtcacgaaacgcccggttatgactttggtgtatgggagcaaagagtttggattccgcgatcaagtgctgagtgacaccattcaaccggcgatcgataacggcaagggtgacatgtttctgaatccgaatcaggctgctggttacatggcgaaactgatctggaacgcagtgtccgggaccgtagtcgcagcagttgaggcgatgaactggctgaaaagtgcggcgaaattacttgctgctgaagtgaaggatgagaagacggatacagttctgcgtggccgctgcgcagtacattgggtgactcccgacggcttccctgtgtggcaggaatacaagaagcctattcaaacgcgcttgaacctgatgttcctcggtcagttccgcttacagcctaccattaacaccaacaaagatagcgagattgatgcacgcaaacaggtgtctggtatcgctcctaactttgtacacagcctgaacggtaaccaccttcgtatgactgtagtgtgggcacacgagaagtacggaatcgaatcttttgcactgattcacgactccttcggtaccattccggctgacgctgcgaacctgtttaaagcagtgcgcgaaactttcgttgacacatatgagtcttgtgatgtactggctgatttctacgaccagattgctgaccagttgcacgagtctcaacgcgacaaaatgccagcacttccggctaaaggtaagttgaacctccgtgacatcttaaaatcggacttcgcgttcgcg

SEQ ID NO: 1184 - protein, 890 aa, synthetic construct
  REGION 1..890: note = Variant of RNA polymerase
MHHHHHHMNTINIAKNDFSDIELAAIPFNTLADHYGERLAREQLALEHESYEMGEARFRKMFERQLKAGEVADNAAAKPLITTLLPKMIARINDWFEEVKAKRGKRPTAFQFLQEIKPEAVAYITIKTTLACLTSADNTTVQAVASAIGRAIEDEARFGRIRDLEAKHFKKNVEEQLNKRVGHVYKKAFMQVVEHDMLSKGLLGGEAWSSWHKEDSIHVGVRCIEMLIESTGMVSLHRQNAGVVGADSETIELAPEYAEAIATRAGALAGISPMFQPCVVPPKPWTGITGGGYWAAGRKPLQLVRTRSLAALRRYEEVSMPEVIKAVNIAQNTAWRINKKVLDVANTITQWQHCPVADVPAMDRGEMPARPLDIDTNEIALKAWKKEASAFYRKDKARMSRRLSMEFMLSQANKFANYEAIWFPQNMDWRGRVYAVPMFNPQGNDMTKGLLTFAQEKPIGEDGFYWLKIHGANTAGVDKVPFPQRIKFVEDNHTNIMECAKAPLENTWWAEQDSPFCFLAFCFEYAGVINSGLSYNCSLPLAFDGSCSGLQHFSAMLRDEIGGKAVNLLPSAEYQDIYRIVSDKVNEMLKQDLINGTSTTVETVTDKKTGEITQRTKYGTKVMAQWWLEHGVNRGVTKRPVMTLVYGSKEFGFRDQVLSDTIQPAIDNGKGDMFLNPNQAAGYMAKLIWNAVSGTVVAAVEAMNWLKSAAKLLAAEVKDEKTDTVLRGRCAVHWVTPDGFPVWQEYKKPIQTRLNLMFLGQFRLQPTINTNKDSEIDARKQVSGIAPNFVHSLNGNHLRMTVVWAHEKYGIESFALIHDSFGTIPADAANLFKAVRETFVDTYESCDVLADFYDQIADQLHESQRDKMPALPAKGKLNLRDILKSDFAFA

SEQ ID NO: 1185 - DNA, 2670 bp, synthetic construct
  misc_feature 1..2670: note = Variant of RNA polymerase
  source 1..2670: mol_type = other DNA
atgcaccatcaccatcaccatatgaacacgattaacattgctaagaacgacttctctgacatcgaactggctgctatcccgttcaacactctggctgaccattacggtgagcgtttagctagtgaacagttggcccttgagcatgagtcttacgagatgggtgaagcacgcttccgcgagatgtttgagcgtcaacttaaagctggtgaggttgcggataacgctgccgccaagcctctcatcactaccctactccctaagatgattgcacgcatcaacgactggtttgaggaagtgaaagctaagcgcggcaagcgcccgacagccttccagttcctgcaagaaatcaagccggaagccgtagcgtacatcaccattaagaccactctggcttgcctaaccagcgaagacaatacaaccgttcaggctgtagcaagcgcaatcggtcgggccattgaggacgaggctcgcttcggtcgtatccgtgaccttgaagctaagcacttcaagaagaacgttgaggaacaactcaacaagcgtgtagggcacgtcgcgaagaaagcatttatgcaagttgtcgagcacgacatgctctctaagggtctactcggtggcgaggcgtggtcttcgtggcataaggaagactctattcatgtaggagtacgctgcatcgagatgctcattgagtcaaccggaatggttagcttacaccgccaaaatgctggcgtagtgggtgcagactctgagactatcgaactcgcacctgaatacgctgaggctatcgcaacccgtgcaggtgcgctggctggcatctctccgatgttccaaccttgcgtagttcctcctaagccgtggactggcattactggtggtggctattgggctgcggggcgcaaacccctgcagttagtacgtactcgcagtctggcggcgcttcgccgctatgaagaagtgtcgatgccggaggtcatcaaagcagtcaacattgcgcagaatacagcatggcgtattaacaagaaagttctcgacgtagcgaataccatcacccaatggcagcactgtccagtcgcggatgtgcctgcgatggatcgtggcgaaatgccagctcgtccgttggacatcgataccaacgagattgcacttaaagcgtggaagaaagaagcttccgcgttctaccgcaaagacaaagcacgcatgagccgtcgtctgtcgatggagtttatgttatctcaggcgaacaagtttggcaattatgaggttatctggtttccgcaaaacatggattggcgtgggcgcgtgtacgctgtcccgatgttcaatcctcagggcaacgatatgacgaaaggcctgctgacctttgcgcaggagaaacccattggtgaagacggcttctattggctcaagattcatggcgcaaatacagctggaggggataaagtaccgtttccacaacgcatcaaatttgttgaggataaccatacgaatattatggaatgcgcgaaagcaccgctggaaaacacttggtgggcggaacaggactcgccgttctgctttctggcgttctgctttgagtatgctggcgtcatcaatagtggtctgtcgtacaactgtagcttgcctctggcatttgatggtagttgctccggcctgcaacatttctcagcgatgttacgcgacgaaattggcggcaaagctgtgaatctcctcccatctgcggaataccaggatatttatcgtatcgtcagcgacaaagttaacgagatgctgaaacaagatctgattaacggtacctctaccaccgtggaaacggtgactgataaaaagacaggcgaaattacccaacgcacgaaatacgggaccaaagttatggcacagtggtggttagaacacggtgtgaatcgtggcgtcacgaaacgcccggttatgactttggtgtatgggagcaaagagtttggattccgcgatcaagtgctgagtgacaccattcaaccggcgatcgataacggcaagggtgacatgtttctgaatccgaatcaggctgctggttacatggcgaaactgatctggaacgcagtgtccgggaccgtagtcgcagcagttgaggcgatgaactggctgaaaagtgcggcgaaattacttgctgctgaagtgaaggatgagaagacggatacagttctgcgtggccgctgcgcagtacattgggtgactcccgacggcttccctgtgtggcaggaatacaagaagcctattcaaacgcgcttgaacctgatgttcctcggtcagttccgcttacagcctaccattaacaccaacaaagatagcgagattgatgcacgcaaacaggtgtctggtatcgctcctaactttgtacacagcctggacggtaaccaccttcgtatgactgtagtgtgggcacacgagaagtacggaatcgaatcttttgcactgattcacgactccttcggtaccattccggctgacgctgcgaacctgtttaaagcagtgcgcgaaactttcgttgacacatatgagtcttgtgatgtactggctgatttctacgaccagattgctgaccagttgcacgagtctcaacgcgacaaaatgccagcacttccggctaaaggtaagttgaacctccgtgacatcttaaaatcggacttcgcgttcgcg

SEQ ID NO: 1186 - protein, 890 aa, synthetic construct
  REGION 1..890: note = Variant of RNA polymerase
MHHHHHHMNTINIAKNDFSDIELAAIPFNTLADHYGERLASEQLALEHESYEMGEARFREMFERQLKAGEVADNAAAKPLITTLLPKMIARINDWFEEVKAKRGKRPTAFQFLQEIKPEAVAYITIKTTLACLTSEDNTTVQAVASAIGRAIEDEARFGRIRDLEAKHFKKNVEEQLNKRVGHVAKKAFMQVVEHDMLSKGLLGGEAWSSWHKEDSIHVGVRCIEMLIESTGMVSLHRQNAGVVGADSETIELAPEYAEAIATRAGALAGISPMFQPCVVPPKPWTGITGGGYWAAGRKPLQLVRTRSLAALRRYEEVSMPEVIKAVNIAQNTAWRINKKVLDVANTITQWQHCPVADVPAMDRGEMPARPLDIDTNEIALKAWKKEASAFYRKDKARMSRRLSMEFMLSQANKFGNYEVIWFPQNMDWRGRVYAVPMFNPQGNDMTKGLLTFAQEKPIGEDGFYWLKIHGANTAGGDKVPFPQRIKFVEDNHTNIMECAKAPLENTWWAEQDSPFCFLAFCFEYAGVINSGLSYNCSLPLAFDGSCSGLQHFSAMLRDEIGGKAVNLLPSAEYQDIYRIVSDKVNEMLKQDLINGTSTTVETVTDKKTGEITQRTKYGTKVMAQWWLEHGVNRGVTKRPVMTLVYGSKEFGFRDQVLSDTIQPAIDNGKGDMFLNPNQAAGYMAKLIWNAVSGTVVAAVEAMNWLKSAAKLLAAEVKDEKTDTVLRGRCAVHWVTPDGFPVWQEYKKPIQTRLNLMFLGQFRLQPTINTNKDSEIDARKQVSGIAPNFVHSLDGNHLRMTVVWAHEKYGIESFALIHDSFGTIPADAANLFKAVRETFVDTYESCDVLADFYDQIADQLHESQRDKMPALPAKGKLNLRDILKSDFAFA

SEQ ID NO: 1187 - DNA, 2670 bp, synthetic construct
  misc_feature 1..2670: note = Variant of RNA polymerase
  source 1..2670: mol_type = other DNA
atgcaccatcaccatcaccatatgaacacgattaacattgctaagaacgacttctctgacatcgaactggctgctatcccgttcaacactctggctgaccattacggtgagcgtttagctagtgaacagttggcccttgagcatgagtcttacgagatgggtgaagcacgcttccgcaagatgtttgagcgtcaacttaaagctggtgaggttgcggataacgctgccgccaagcctctcatcactaccctactccctaagatgattgcacgcatcaacgactggtttgaggaagtgaaagctaagcgcggcaagcgcccgacagccttccagttcctgcaagaaatcaagccggaagccgtagcgtacatcaccattaagaccactctggcttgcctaacccgcgaagacaatacaaccgttcaggctgtagcaagcgcaatcggtcgggccattgaggacgaggctcgcttcggtcgtatccgtgaccttgaagctaagcacttcaagaagaacgttgaggaacaactcaacaagcgtgtagggcacgtcgacaagaaagcatttatgcaagttgtcgagcacgacatgctctctaagggtctactcggtggcgaggcgtggtcttcgtggcataaggaagactctattcatgtaggagtacgctgcatcgagatgctcattgagtcaaccggaatggttagcttacaccgccaaaatgctggcgtagtgggtgcagactctgagactatcgaactcgcacctgaatacgctgaggctatcgcaacccgtgcaggtgcgctggctggcatctctccgatgttccaaccttgcgtagttcctcctaagccgtggactggcattactggtggtggctattgggctgcggggcgcaaacccctgcagttagtacgtactcgcagtctggcggcgcttcgccgctatgaagaagtgtcgatgccggaggtcatcaaagcagtcaacattgcgcagaatacagcatggcgtattaacaagaaagttctcgacgtagcgaataccatcacccaatggcagcactgtccagtcgcggatgtgcctgcgatggatcgtggcgaaatgccagctcgtccgttggacatcgataccaacgagattgcacttaaagcgtggaagaaagaagcttccgcgttctaccgcaaagacaaagcacgcatgagccgtcgtctgtcgatggagtttatgttatctcaggcgaacaagtttgcgaattatgaggcaatctggtttccgcaaaacatggattggcgtgggcgcgtgtacgctgtcccgatgttcaatcctcagggcaacgatatgacgaaaggcctgctgacctttgcgcaggagaaacccattggtgaagacggcttctattggctcaagattcatggcgcaaatacagctggaggggataaagtaccgtttccacaacgcatcaaatttgttgaggataaccatacgaatattatggaatgcgcgaaagcaccgctggaaaacacttggtgggcggaacaggactcgccgttctgctttctggcgttctgctttgagtatgctggcgtcatcaatagtggtctgtcgtacaactgtagcttgcctctggcatttgatggtagttgctccggcctgcaacatttctcagcgatgttacgcgacgaaattggcggcaaagctgtgaatctcctcccatctgcggaataccaggatatttatcgtatcgtcagcgacaaagttaacgagatgctgaaacaagatctgattaacggtacctctaccaccgtggaaacggtgactgataaaaagacaggcgaaattacccaacgcacgaaatacgggaccaaagttatggcacagtggtggttagaacacggtgtgaatcgtggcgtcacgaaacgcccggttatgactttggtgtatgggagcaaagagtttggattccgcgatcaagtgctgagtgacaccattcaaccggcgatcgataacggcaagggtgacatgtttctgaatccgaatcaggctgctggttacatggcgaaactgatctggaacgcagtgtccgggaccgtagtcgcagcagttgaggcgatgaactggctgaaaagtgcggcgaaattacttgctgctgaagtgaaggatgagaagacggatacagttctgcgtggccgctgcgcagtacattgggtgactcccgacggcttccctgtgtggcaggaatacaagaagcctattcaaacgcgcttgaacctgatgttcctcggtcagttccgcttacagcctaccattaacaccaacaaagatagcgagattgatgcacgcaaacaggtgtctggtatcgctcctaactttgtacacagcctggacggtaaccaccttcgtatgactgtagtgtgggcacacgagaagtacggaatcgaatcttttgcactgattcacgactccttcggtaccattccggctgacgctgcgaacctgtttaaagcagtgcgcgaaactttcgttgacacatatgagtcttgtgatgtactggctgatttctacgaccagattgttgaccagttgcacgagtctcaacgcgacaaaatgccagcacttccggctaaaggtaagttgaacctccgtgacatcttaaaatcggacttcgcgttcgcg

SEQ ID NO: 1188 - protein, 890 aa, synthetic construct
  REGION 1..890: note = Variant of RNA polymerase
MHHHHHHMNTINIAKNDFSDIELAAIPFNTLADHYGERLASEQLALEHESYEMGEARFRKMFERQLKAGEVADNAAAKPLITTLLPKMIARINDWFEEVKAKRGKRPTAFQFLQEIKPEAVAYITIKTTLACLTREDNTTVQAVASAIGRAIEDEARFGRIRDLEAKHFKKNVEEQLNKRVGHVDKKAFMQVVEHDMLSKGLLGGEAWSSWHKEDSIHVGVRCIEMLIESTGMVSLHRQNAGVVGADSETIELAPEYAEAIATRAGALAGISPMFQPCVVPPKPWTGITGGGYWAAGRKPLQLVRTRSLAALRRYEEVSMPEVIKAVNIAQNTAWRINKKVLDVANTITQWQHCPVADVPAMDRGEMPARPLDIDTNEIALKAWKKEASAFYRKDKARMSRRLSMEFMLSQANKFANYEAIWFPQNMDWRGRVYAVPMFNPQGNDMTKGLLTFAQEKPIGEDGFYWLKIHGANTAGGDKVPFPQRIKFVEDNHTNIMECAKAPLENTWWAEQDSPFCFLAFCFEYAGVINSGLSYNCSLPLAFDGSCSGLQHFSAMLRDEIGGKAVNLLPSAEYQDIYRIVSDKVNEMLKQDLINGTSTTVETVTDKKTGEITQRTKYGTKVMAQWWLEHGVNRGVTKRPVMTLVYGSKEFGFRDQVLSDTIQPAIDNGKGDMFLNPNQAAGYMAKLIWNAVSGTVVAAVEAMNWLKSAAKLLAAEVKDEKTDTVLRGRCAVHWVTPDGFPVWQEYKKPIQTRLNLMFLGQFRLQPTINTNKDSEIDARKQVSGIAPNFVHSLDGNHLRMTVVWAHEKYGIESFALIHDSFGTIPADAANLFKAVRETFVDTYESCDVLADFYDQIVDQLHESQRDKMPALPAKGKLNLRDILKSDFAFA

SEQ ID NO: 1189 - DNA, 2670 bp, synthetic construct
  misc_feature 1..2670: note = Variant of RNA polymerase
  source 1..2670: mol_type = other DNA
atgcaccatcaccatcaccatatgaacacgattaacattgctaagaacgacttctctgacatcgaactggctgctatcccgttcaacactctggctgaccattacggtgagcgtttagctcgtgaacagttggcccttgagcatgagtcttacgagatgggtgaagcacgcttccgcaagatgtttgagcgtcaacttaaagctggtgaggttgcggataacgctgccgccaagcctctcatcactaccctactccctaagatgattgcacgcatcaacgactggtttgaggaagtgaaagctaagcgcggcaagcgcccgacagccttccagttcctgcaagaaatcaagccggaagccgtagcgtacatcaccattaagaccactctggcttgcctaaccagcgcagacaatacaaccgttcaggctgtagcaagcgcaatcggtcgggccattgaggacgaggctcgcttcggtcgtatccgtgaccttgaagctaagcacttcaagaagaacgttgaggaacaactcaacaagcgtgtagggcacgtcaacaagaaagcatttatgcaagttgtcgagcacgacatgctctctaagggtctactcggtggcgaggcgtggtcttcgtggcataaggaagactctattcatgtaggagtacgctgcatcgagatgctcattgagtcaaccggaatggttagcttacaccgccaaaatgctggcgtagtgggtgcagactctgagactatcgaactcgcacctgaatacgctgaggctatcgcaacccgtgcaggtgcgctggctggcatctctccgatgttccaaccttgcgtagttcctcctaagccgtggactggcattactggtggtggctattgggctgcggggcgcaaacccctgcagttagtacgtactcgcagtctggcggcgcttcgccgctatgaagaagtgtcgatgccggaggtcatcaaagcagtcaacattgcgcagaatacagcatggcgtattaacaagaaagttctcgacgtagcgaataccatcacccaatggcagcactgtccagtcgcggatgtgcctgcgatggatcgtggcgaaatgccagctcgtccgttggacatcgataccaacgagattgcacttaaagcgtggaagaaagaagcttccgcgttctaccgcaaagacaaagcacgcatgagccgtcgtctgtcgatggagtttatgttatctcaggcgaacaagtttgcgaattatgaggctatctggtttccgcaaaacatggattggcgtgggcgcgtgtacgctgtcccgatgttcaatcctcagggcaacgatatgacgaaaggcctgctgacctttgcgcaggagaaacccattggtgaagacggcttctattggctcaagattcatggcgcaaatacagctggaggggataaagtaccgtttccacaacgcatcaaatttgttgaggataaccatacgaatattatggaatgcgcgaaagcaccgctggaaaacacttggtgggcggaacaggactcgccgttctgctttctggcgttctgctttgagtatgctggcgtcatcaatagtggtctgtcgtacaactgtagcttgcctctggcatttgatggtagttgctccggcctgcaacatttctcagcgatgttacgcgacgaaattggcggcaaagctgtgaatctcctcccatctgcggaataccaggatatttatcgtatcgtcagcgacaaagttaacgagatgctgaaacaagatctgattaacggtacctctaccaccgtggaaacggtgactgataaaaagacaggcgaaattacccaacgcacgaaatacgggaccaaagttatggcacagtggtggttagaacacggtgtgaatcgtggcgtcacgaaacgcccggttatgactttggtgtatgggagcaaagagtttggattccgcgatcaagtgctgagtgacaccattcaaccggcgatcgataacggcaagggtgacatgtttctgaatccgaatcaggctgctggttacatggcgaaactgatctggaacgcagtgtccgggaccgtagtcgcagcagttgaggcgatgaactggctgaaaagtgcggcgaaattacttgctgctgaagtgaaggatgagaagacggatacagttctgcgtggccgctgcgcagtacattgggtgactcccgacggcttccctgtgtggcaggaatacaagaagcctattcaaacgcgcttgaacctgatgttcctcggtcagttccgcttacagcctaccattaacaccaacaaagatagcgagattgatgcacgcaaacaggtgtctggtatcgctcctaactttgtacacagcctggacggtaaccaccttcgtatgactgtagtgtgggcacacgagaagtacggaatcgaatcttttgcactgattcacgactccttcggtaccattccggctgacgctgcgaacctgcgcaaagcagtgcgcgaaactttcgttgacacatatgagtcttgtgatgtactggctgatttctacgaccagattgctgaccagttgcacgagtctcaacgcgacaaaatgccagcacttccggctaaaggtaagttgaacctccgtgacatcttaaaatcggacttcgcgttcgcg

SEQ ID NO: 1190 - protein, 890 aa, synthetic construct
  REGION 1..890: note = Variant of RNA polymerase
MHHHHHHMNTINIAKNDFSDIELAAIPFNTLADHYGERLAREQLALEHESYEMGEARFRKMFERQLKAGEVADNAAAKPLITTLLPKMIARINDWFEEVKAKRGKRPTAFQFLQEIKPEAVAYITIKTTLACLTSADNTTVQAVASAIGRAIEDEARFGRIRDLEAKHFKKNVEEQLNKRVGHVNKKAFMQVVEHDMLSKGLLGGEAWSSWHKEDSIHVGVRCIEMLIESTGMVSLHRQNAGVVGADSETIELAPEYAEAIATRAGALAGISPMFQPCVVPPKPWTGITGGGYWAAGRKPLQLVRTRSLAALRRYEEVSMPEVIKAVNIAQNTAWRINKKVLDVANTITQWQHCPVADVPAMDRGEMPARPLDIDTNEIALKAWKKEASAFYRKDKARMSRRLSMEFMLSQANKFANYEAIWFPQNMDWRGRVYAVPMFNPQGNDMTKGLLTFAQEKPIGEDGFYWLKIHGANTAGGDKVPFPQRIKFVEDNHTNIMECAKAPLENTWWAEQDSPFCFLAFCFEYAGVINSGLSYNCSLPLAFDGSCSGLQHFSAMLRDEIGGKAVNLLPSAEYQDIYRIVSDKVNEMLKQDLINGTSTTVETVTDKKTGEITQRTKYGTKVMAQWWLEHGVNRGVTKRPVMTLVYGSKEFGFRDQVLSDTIQPAIDNGKGDMFLNPNQAAGYMAKLIWNAVSGTVVAAVEAMNWLKSAAKLLAAEVKDEKTDTVLRGRCAVHWVTPDGFPVWQEYKKPIQTRLNLMFLGQFRLQPTINTNKDSEIDARKQVSGIAPNFVHSLDGNHLRMTVVWAHEKYGIESFALIHDSFGTIPADAANLRKAVRETFVDTYESCDVLADFYDQIADQLHESQRDKMPALPAKGKLNLRDILKSDFAFA

SEQ ID NO: 1191 - DNA, 2670 bp, synthetic construct
  misc_feature 1..2670: note = Variant of RNA polymerase
  source 1..2670: mol_type = other DNA
atgcaccatcaccatcaccatatgaacacgattaacattgctaagaacgacttctctgacatcgaactggctgctatcccgttcaacactctggctgaccattacggtgagcgtttagctcgtgaacagttggcccttgagcatgagtcttacgagatgggtgaagcacgcttccgcgagatgtttgagcgtcaacttaaagctggtgaggttgcggataacgctgccgccaagcctctcatcactaccctactccctaagatgattgcacgcatcaacgactggtttgaggaagtgaaagctaagcgcggcaagcgcccgacagccttccagttcctgcaagaaatcaagccggaagccgtagcgtacatcaccattaagaccactctggcttgcctaacccgcgaagacaatacaaccgttcaggctgtagcaagcgcaatcggtcgggccattgaggacgaggctcgcttcggtcgtatccgtgaccttgaagctaagcacttcaagaagaacgttgaggaacaactcaacaagaaggtagggcacgtctacaagaaagcatttatgcaagttgtcgagcacgacatgctctctaagggtctactcggtggcgaggcgtggtcttcgtggcataaggaagactctattcatgtaggagtacgctgcatcgagatgctcattgagtcaaccggaatggttagcttacaccgccaaaatgctggcgtagtgggtgcagactctgagactatcgaactcgcacctgaatacgctgaggctatcgcaacccgtgcaggtgcgctggctggcatctctccgatgttccaaccttgcgtagttcctcctaagccgtggactggcattactggtggtggctattgggctgcggggcgcaaacccctgcagttagtacgtactcgcagtctggcggcgcttcgccgctatgaagaagtgtcgatgccggaggtcatcaaagcagtcaacattgcgcagaatacagcatggcgtattaacaagaaagttctcgacgtagcgaataccatcacccaatggcagcactgtccagtcgcggatgtgcctgcgatggatcgtggcgaaatgccagctcgtccgttggacatcgataccaacgagattgcacttaaagcgtggaagaaagaagcttccgcgttctaccgcaaagacaaagcacgcatgagccgtcgtctgtcgatggagtttatgttatctcaggcgaacaagtttggcaattatgaggttatctggtttccgcaaaacatggattggcgtgggcgcgtgtacgctgtcccgatgttcaatcctcagggcaacgatatgacgaaaggcctgctgacctttgcgcaggagaaacccattggtgaagacggcttctattggctcaagattcatggcgcaaatacagctggaggggataaagtaccgtttccacaacgcatcaaatttgttgaggataaccatacgaatattatggaatgcgcgaaagcaccgctggaaaacacttggtgggcggaacaggactcgccgttctgctttctggcgttctgctttgagtatgctggcgtcatcaatagtggtctgtcgtacaactgtagcttgcctctggcatttgatggtagttgctccggcctgcaacatttctcagcgatgttacgcgacgaaattggcggcaaagctgtgaatctcctcccatctgcggaataccaggatatttatcgtatcgtcagcgacaaagttaacgagatgctgaaacaagatctgattaacggtacctctaccaccgtggaaacggtgactgataaaaagacaggcgaaattacccaacgcacgaaatacgggaccaaagttatggcacagtggtggttagaacacggtgtgaatcgtggcgtcacgaaacgcccggttatgactttggtgtatgggagcaaagagtttggattccgcgatcaagtgctgagtgacaccattcaaccggcgatcgataacggcaagggtgacatgtttctgaatccgaatcaggctgctggttacatggcgaaactgatctggaacgcagtgtccgggaccgtagtcgcagcagttgaggcgatgaactggctgaaaagtgtggcgaaattacttgctgctgaagtgaaggatgagaagacggatacagttctgcgtggccgctgcgcagtacattgggtgactcccgacggcttccctgtgtggcaggaatacaagaagcctattcaaacgcgcttgaacctgatgttcctcggtcagttccgcttacagcctaccattaacaccaacaaagatagcgagattgatgcacgcaaacaggtgtctggtatcgctcctaactttgtacacagcctggacggtaaccaccttcgtatgactgtagtgtgggcacacgagaagtacggaatcgaatcttttgcactgattcacgactccttcggtaccattccggctgacgctgcgaacctgcgcaaagcagtgcgcgaaactttcgttgacacatatgagtcttgtgatgtactggctgatttctacgaccagattgctgaccagttgcacgagtctcaacgcgacaaaatgccagcacttccggctaaaggtaagttgaacctccgtgacatcttaaaatcggacttcgcgttcgcg

SEQ ID NO: 1192 - protein, 890 aa, synthetic construct
  REGION 1..890: note = Variant of RNA polymerase
MHHHHHHMNTINIAKNDFSDIELAAIPFNTLADHYGERLAREQLALEHESYEMGEARFREMFERQLKAGEVADNAAAKPLITTLLPKMIARINDWFEEVKAKRGKRPTAFQFLQEIKPEAVAYITIKTTLACLTREDNTTVQAVASAIGRAIEDEARFGRIRDLEAKHFKKNVEEQLNKKVGHVYKKAFMQVVEHDMLSKGLLGGEAWSSWHKEDSIHVGVRCIEMLIESTGMVSLHRQNAGVVGADSETIELAPEYAEAIATRAGALAGISPMFQPCVVPPKPWTGITGGGYWAAGRKPLQLVRTRSLAALRRYEEVSMPEVIKAVNIAQNTAWRINKKVLDVANTITQWQHCPVADVPAMDRGEMPARPLDIDTNEIALKAWKKEASAFYRKDKARMSRRLSMEFMLSQANKFGNYEVIWFPQNMDWRGRVYAVPMFNPQGNDMTKGLLTFAQEKPIGEDGFYWLKIHGANTAGGDKVPFPQRIKFVEDNHTNIMECAKAPLENTWWAEQDSPFCFLAFCFEYAGVINSGLSYNCSLPLAFDGSCSGLQHFSAMLRDEIGGKAVNLLPSAEYQDIYRIVSDKVNEMLKQDLINGTSTTVETVTDKKTGEITQRTKYGTKVMAQWWLEHGVNRGVTKRPVMTLVYGSKEFGFRDQVLSDTIQPAIDNGKGDMFLNPNQAAGYMAKLIWNAVSGTVVAAVEAMNWLKSVAKLLAAEVKDEKTDTVLRGRCAVHWVTPDGFPVWQEYKKPIQTRLNLMFLGQFRLQPTINTNKDSEIDARKQVSGIAPNFVHSLDGNHLRMTVVWAHEKYGIESFALIHDSFGTIPADAANLRKAVRETFVDTYESCDVLADFYDQIADQLHESQRDKMPALPAKGKLNLRDILKSDFAFA

SEQ ID NO: 1193 - DNA, 2670 bp, synthetic construct
  misc_feature 1..2670: note = Variant of RNA polymerase
  source 1..2670: mol_type = other DNA
atgcaccatcaccatcaccatatgaacacgattaacattgctaagaacgacttctctgacatcgaactggctgctatcccgttcaacactctggctgaccattacggtgagcgtttagctcgtgaacagttggcccttgagcatgagtcttacgagatgggtgaagcacgcttccgcaagatgtttgagcgtcaacttaaagctggtgaggttgcggataacgctgccgccaagcctctcatcactaccctactccctaagatgattgcacgcatcaacgactggtttgaggaagtgaaagctaagcgcggcaagcgcccgacagccttccagttcctgcaagaaatcaagccggaagccgtagcgtacatcaccattaagaccactctggcttgcctaacccgcgaagacaatacaaccgttcaggctgtagcaagcgcaatcggtcgggccattgaggacgaggctcgcttcggtcgtatccgtgaccttgaagctaagcacttcaagaagaacgttgaggaacaactcaacaagaaggtagggcacgtcgcgaagaaagcatttatgcaagttgtcgagcacgacatgctctctaagggtctactcggtggcgaggcgtggtcttcgtggcataaggaagactctattcatgtaggagtacgctgcatcgagatgctcattgagtcaaccggaatggttagcttacaccgccaaaatgctggcgtagtgggtgcagactctgagactatcgaactcgcacctgaatacgctgaggctatcgcaacccgtgcaggtgcgctggctggcatctctccgatgttccaaccttgcgtagttcctcctaagccgtggactggcattactggtggtggctattgggctgcggggcgcaaacccctgcagttagtacgtactcgcagtctggcggcgcttcgccgctatgaagaagtgtcgatgccggaggtcatcaaagcagtcaacattgcgcagaatacagcatggcgtattaacaagaaagttctcgacgtagcgaataccatcacccaatggcagcactgtccagtcgcggatgtgcctgcgatggatcgtggcgaaatgccagctcgtccgttggacatcgataccaacgagattgcacttaaagcgtggaagaaagaagcttccgcgttctaccgcaaagacaaagcacgcatgagccgtcgtctgtcgatggagtttatgttatctcaggcgaacaagtttggcaattatgaggttatctggtttccgcaaaacatggattggcgtgggcgcgtgtacgctgtcccgatgttcaatcctcagggcaacgatatgacgaaaggcctgctgacctttgcgcaggagaaacccattggtgaagacggcttctattggctcaagattcatggcgcaaatacagctggagtggataaagtaccgtttccgcaacgcatcaaatttgttgaggataaccatacgaatattatggaatgcgcgaaagcaccgctggaaaacacttggtgggcggaacaggactcgccgttctgctttctggcgttctgctttgagtatgctggcgtcatcaatagtggtctgtcgtacaactgtagcttgcctctggcatttgatggtagttgctccggcctgcaacatttctcagcgatgttacgcgacgaaattggcggcaaagctgtgaatctcctcccatctgcggaataccaggatatttatcgtatcgtcagcgacaaagttaacgagatgctgaaacaagatctgattaacggtacctctaccaccgtggaaacggtgactgataaaaagacaggcgaaattacccaacgcacgaaatacgggaccaaagttatggcacagtggtggttagaacacggtgtgaatcgtggcgtcacgaaacgcccggttatgactttggtgtatgggagcaaagagtttggattccgcgatcaagtgctgagtgacaccattcaaccggcgatcgataacggcaagggtgacatgtttctgaatccgaatcaggctgctggttacatggcgaaactgatctggaacgcagtgtccgggaccgtagtcgcagcagttgaggcgatgaactggctgaaaagtgcggcgaaattacttgctgctgaagtgaaggatgagaagacggatacagttctgcgtggccgctgcgcagtacattgggtgactcccgacggcttccctgtgtggcaggaatacaagaagcctattcaaacgcgcttgaacctgatgttcctcggtcagttccgcttacagcctaccattaacaccaacaaagatagcgagattgatgcacgcaaacaggtgtctggtatcgctcctaactttgtacacagcctggacggtaaccaccttcgtatgactgtagtgtgggcacacgagaagtacggaatcgaatcttttgcactgattcacgactccttcggtaccattccggctgacgctgcgaacctgcgcaaagcagtgcgcgaaactttcgttgacacatatgagtcttgtgatgtactggctgatttctacgaccagattgctgaccagttgcacgagtctcaacgcgacaaaatgccagcacttccggctaaaggtaagttgaacctccgtgacatcttaaaatcggacttcgcgttcgcg

SEQ ID NO: 1194 - protein, 890 aa, synthetic construct
  REGION 1..890: note = Variant of RNA polymerase
MHHHHHHMNTINIAKNDFSDIELAAIPFNTLADHYGERLAREQLALEHESYEMGEARFRKMFERQLKAGEVADNAAAKPLITTLLPKMIARINDWFEEVKAKRGKRPTAFQFLQEIKPEAVAYITIKTTLACLTREDNTTVQAVASAIGRAIEDEARFGRIRDLEAKHFKKNVEEQLNKKVGHVAKKAFMQVVEHDMLSKGLLGGEAWSSWHKEDSIHVGVRCIEMLIESTGMVSLHRQNAGVVGADSETIELAPEYAEAIATRAGALAGISPMFQPCVVPPKPWTGITGGGYWAAGRKPLQLVRTRSLAALRRYEEVSMPEVIKAVNIAQNTAWRINKKVLDVANTITQWQHCPVADVPAMDRGEMPARPLDIDTNEIALKAWKKEASAFYRKDKARMSRRLSMEFMLSQANKFGNYEVIWFPQNMDWRGRVYAVPMFNPQGNDMTKGLLTFAQEKPIGEDGFYWLKIHGANTAGVDKVPFPQRIKFVEDNHTNIMECAKAPLENTWWAEQDSPFCFLAFCFEYAGVINSGLSYNCSLPLAFDGSCSGLQHFSAMLRDEIGGKAVNLLPSAEYQDIYRIVSDKVNEMLKQDLINGTSTTVETVTDKKTGEITQRTKYGTKVMAQWWLEHGVNRGVTKRPVMTLVYGSKEFGFRDQVLSDTIQPAIDNGKGDMFLNPNQAAGYMAKLIWNAVSGTVVAAVEAMNWLKSAAKLLAAEVKDEKTDTVLRGRCAVHWVTPDGFPVWQEYKKPIQTRLNLMFLGQFRLQPTINTNKDSEIDARKQVSGIAPNFVHSLDGNHLRMTVVWAHEKYGIESFALIHDSFGTIPADAANLRKAVRETFVDTYESCDVLADFYDQIADQLHESQRDKMPALPAKGKLNLRDILKSDFAFA

SEQ ID NO: 1195 - DNA, 2670 bp, synthetic construct
  misc_feature 1..2670: note = Variant of RNA polymerase
  source 1..2670: mol_type = other DNA
atgcaccatcaccatcaccatatgaacacgattaacattgctaagaacgacttctctgacatcgaactggctgctatcccgttcaacactctggctgaccattacggtgagcgtttagctcgtgaacagttggcccttgagcatgagtcttacgagatgggtgaagcacgcttccgcaagatgtttgagcgtcaacttaaagctggtgaggttgcggataacgctgccgccaagcctctcatcactaccctactccctaagatgattgcacgcatcaacgactggtttgaggaagtgaaagctaagcgcggcaagcgcccgacagccttccagttcctgcaagaaatcaagccggaagccgtagcgtacatcaccattaagaccactctggcttgcctaacccgcgaagacaatacaaccgttcaggctgtagcaagcgcaatcggtcgggccattgaggacgaggctcgcttcggtcgtatccgtgaccttgaagctaagcacttcaagaagaacgttgaggaacaactcaacaagcgtgtagggcacgtcaacaagaaagcatttatgcaagttgtcgagcacgacatgctctctaagggtctactcggtggcgaggcgtggtcttcgtggcataaggaagactctattcatgtaggagtacgctgcatcgagatgctcattgagtcaaccggaatggttagcttacaccgccaaaatgctggcgtagtgggtgcagactctgagactatcgaactcgcacctgaatacgctgaggctatcgcaacccgtgcaggtgcgctggctggcatctctccgatgttccaaccttgcgtagttcctcctaagccgtggactggcattactggtggtggctattgggctgcggggcgcaaacccctgcagttagtacgtactcgcagtctggcggcgcttcgccgctatgaagaagtgtcgatgccggaggtcatcaaagcagtcaacattgcgcagaatacagcatggcgtattaacaagaaagttctcgacgtagcgaataccatcacccaatggcagcactgtccagtcgcggatgtgcctgcgatggatcgtggcgaaatgccagctcgtccgttggacatcgataccaacgagattgcacttaaagcgtggaagaaagaagcttccgcgttctaccgcaaagacaaagcacgcatgagccgtcgtctgtcgatggagtttatgttatctcaggcgaacaagtttggcaattatgaggttatctggtttccgcaaaacatggattggcgtgggcgcgtgtacgctgtcccgatgttcaatcctcagggcaacgatatgacgaaaggcctgctgacctttgcgcaggagaaacccattggtgaagacggcttctattggctcaagattcatggcgcaaatacagctggagtggataaagtaccgtttccacaacgcatcaaatttgttgaggataaccatacgaatattatggaatgcgcgaaagcaccgctggaaaacacttggtgggcggaacaggactcgccgttctgctttctggcgttctgctttgagtatgctggcgtcatcaatagtggtctgtcgtacaactgtagcttgcctctggcatttgatggtagttgctccggcctgcaacatttctcagcgatgttacgcgacgaaattggcggcaaagctgtgaatctcctcccatctgcggaataccaggatatttatcgtatcgtcagcgacaaagttaacgagatgctgaaacaagatctgattaacggtacctctaccaccgtggaaacggtgactgataaaaagacaggcgaaattacccaacgcacgaaatacgggaccaaagttatggcacagtggtggttagaacacggtgtgaatcgtggcgtcacgaaacgcccggttatgactttggtgtatgggagcaaagagtttggattccgcgatcaagtgctgagtgacaccattcaaccggcgatcgataacggcaagggtgacatgtttctgaatccgaatcaggctgctggttacatggcgaaactgatctggaacgcagtgtccgggaccgtagtcgcagcagttgaggcgatgaactggctgaaaagtgcggcgaaattacttgctgctgaagtgaaggatgagaagacggatacagttctgcgtggccgctgcgcagtacattgggtgactcccgacggcttccctgtgtggcaggaatacaagaagcctattcaaacgcgcttgaacctgatgttcctcggtcagttccgcttacagcctaccattaacaccaacaaagatagcgagattgatgcacgcaaacaggtgtctggtatcgctcctaactttgtacacagcctggacggtaaccaccttcgtatgactgtagtgtgggcacacgagaagtacggaatcgaatcttttgcactgattcacgactccttcggtaccattccggctgacgctgcgaacctgcgcaaagcagtgcgcgaaactttcgttgacacatatgagtcttgtgatgtactggctgatttctacgaccagattgctgaccagttgcacgagtctcaacgcgacaaaatgccagcacttccggctaaaggtaagttgaacctccgtgacatcttaaaatcggacttcgcgttcgcg

SEQ ID NO: 1196 - protein, 890 aa, synthetic construct
  REGION 1..890: note = Variant of RNA polymerase
MHHHHHHMNTINIAKNDFSDIELAAIPFNTLADHYGERLAREQLALEHESYEMGEARFRKMFERQLKAGEVADNAAAKPLITTLLPKMIARINDWFEEVKAKRGKRPTAFQFLQEIKPEAVAYITIKTTLACLTREDNTTVQAVASAIGRAIEDEARFGRIRDLEAKHFKKNVEEQLNKRVGHVNKKAFMQVVEHDMLSKGLLGGEAWSSWHKEDSIHVGVRCIEMLIESTGMVSLHRQNAGVVGADSETIELAPEYAEAIATRAGALAGISPMFQPCVVPPKPWTGITGGGYWAAGRKPLQLVRTRSLAALRRYEEVSMPEVIKAVNIAQNTAWRINKKVLDVANTITQWQHCPVADVPAMDRGEMPARPLDIDTNEIALKAWKKEASAFYRKDKARMSRRLSMEFMLSQANKFGNYEVIWFPQNMDWRGRVYAVPMFNPQGNDMTKGLLTFAQEKPIGEDGFYWLKIHGANTAGVDKVPFPQRIKFVEDNHTNIMECAKAPLENTWWAEQDSPFCFLAFCFEYAGVINSGLSYNCSLPLAFDGSCSGLQHFSAMLRDEIGGKAVNLLPSAEYQDIYRIVSDKVNEMLKQDLINGTSTTVETVTDKKTGEITQRTKYGTKVMAQWWLEHGVNRGVTKRPVMTLVYGSKEFGFRDQVLSDTIQPAIDNGKGDMFLNPNQAAGYMAKLIWNAVSGTVVAAVEAMNWLKSAAKLLAAEVKDEKTDTVLRGRCAVHWVTPDGFPVWQEYKKPIQTRLNLMFLGQFRLQPTINTNKDSEIDARKQVSGIAPNFVHSLDGNHLRMTVVWAHEKYGIESFALIHDSFGTIPADAANLRKAVRETFVDTYESCDVLADFYDQIADQLHESQRDKMPALPAKGKLNLRDILKSDFAFA

SEQ ID NO: 1197 - DNA, 2670 bp, synthetic construct
  misc_feature 1..2670: note = Variant of RNA polymerase
  source 1..2670: mol_type = other DNA
atgcaccatcaccatcaccatatgaacacgattaacattgctaagaacgacttctctgacatcgaactggctgctatcccgttcaacactctggctgaccattacggtgagcgtttagctagtgaacagttggcccttgagcatgagtcttacgagatgggtgaagcacgcttccgcaagatgtttgagcgtcaacttaaagctggtgaggttgcggataacgctgccgccaagcctctcatcactaccctactccctaagatgattgcacgcatcaacgactggtttgaggaagtgaaagctaagcgcggcaagcgcccgacagccttccagttcctgcaagaaatcaagccggaagccgtagcgtacatcaccattaagaccactctggcttgcctaacccgcgaagacaatacaaccgttcaggctgtagcaagcgcaatcggtcgggccattgaggacgaggctcgcttcggtcgtatccgtgaccttgaagctaagcacttcaagaagaacgttgaggaacaactcaacaagcgtgtagggcacgtcgacaagaaagcatttatgcaagttgtcgagcacgacatgctctctaagggtctactcggtggcgaggcgtggtcttcgtggcataaggaagactctattcatgtaggagtacgctgcatcgagatgctcattgagtcaaccggaatggttagcttacaccgccaaaatgctggcgtagtgggtgcagactctgagactatcgaactcgcacctgaatacgctgaggctatcgcaacccgtgcaggtgcgctggctggcatctctccgatgttccaaccttgcgtagttcctcctaagccgtggactggcattactggtggtggctattgggctgcggggcgcaaacccctgcagttagtacgtactcacagtctggcggcgcttcgccgctatgaagaagtgtcgatgccggaggtcatcaaagcagtcaacattgcgcagaatacagcatggcgtattaacaagaaagttctcgacgtagcgaataccatcacccaatggcagcactgtccagtcgcggatgtgcctgcgatggatcgtggcgaaatgccagctcgtccgttggacatcgataccaacgagattgcacttaaagcgtggaagaaagaagcttccgcgttctaccgcaaagacaaagcacgcatgagccgtcgtctgtcgatggagtttatgttatctcaggcgaacaagtttgccaattatgaggttatctggtttccgcaaaacatggattggcgtgggcgcgtgtacgctgtcccgatgttcaatcctcagggcaacgatatgacgaaaggcctgctgacctttgcgcaggagaaacccattggtgaagacggcttctattggctcaagattcatggcgcaaatacagctggagtggataaagtaccgtttcagcaacgcatcaaatttgttgaggataaccatacgaatattatggaatgcgcgaaagcaccgctggaaaacacttggtgggcggaacaggactcgccgttctgctttctggcgttctgctttgagtatgctggcgtcatcaatagtggtctgtcgtacaactgtagcttgcctctggcatttgatggtagttgctccggcctgcaacatttctcagcgatgttacgcgacgaaattggcggcaaagctgtgaatctcctcccatctgcggaataccaggatatttatcgtatcgtcagcgacaaagttaacgagatgctgaaacaagatctgattaacggtacctctaccaccgtggaaacggtgactgataaaaagacaggcgaaattacccaacgcacgaaatacgggaccaaagttatggcacagtggtggttagaacacggtgtgaatcgtggcgtcacgaaacgcccggttatgactttggtgtatgggagcaaagagtttggattccgcgatcaagtgctgagtgacaccattcaaccggcgatcgataacggcaagggtgacatgtttctgaatccgaatcaggctgctggttacatggcgaaactgatctggaacgcagtgtccgggaccgtagtcgcagcagttgaggcgatgaactggctgaaaagtgcggcgaaattacttgctgctgaagtgaaggatgagaagacggatacagttctgcgtggccgctgcgcagtacattgggtgactcccgacggcttccctgtgtggcaggaatacaagaagcctattcaaacgcgcttgaacctgatgttcctcggtcagttccgcttacagcctaccattaacaccaacaaagatagcgagattgatgcacgcaaacaggtgtctggtatcgctcctaactttgtacacagcctggacggtaaccaccttcgtatgactgtagtgtgggcacacgagaagtacggaatcgaatcttttgcactgattcacgactccttcggtaccattccggctgacgctgcgaacctgttcaaagcagtgcgcgaaactttcgttgacacatatgagtcttgtgatgtactggctgatttctacgaccagattgctgaccagttgcacgagtctcaacgcgacaaaatgccagcacttccggctaaaggtaagttgaacctccgtgacatcttaaaatcggacttcgcgttcgcg

SEQ ID NO: 1198 - protein, 890 aa, synthetic construct
  REGION 1..890: note = Variant of RNA polymerase
MHHHHHHMNTINIAKNDFSDIELAAIPFNTLADHYGERLASEQLALEHESYEMGEARFRKMFERQLKAGEVADNAAAKPLITTLLPKMIARINDWFEEVKAKRGKRPTAFQFLQEIKPEAVAYITIKTTLACLTREDNTTVQAVASAIGRAIEDEARFGRIRDLEAKHFKKNVEEQLNKRVGHVDKKAFMQVVEHDMLSKGLLGGEAWSSWHKEDSIHVGVRCIEMLIESTGMVSLHRQNAGVVGADSETIELAPEYAEAIATRAGALAGISPMFQPCVVPPKPWTGITGGGYWAAGRKPLQLVRTHSLAALRRYEEVSMPEVIKAVNIAQNTAWRINKKVLDVANTITQWQHCPVADVPAMDRGEMPARPLDIDTNEIALKAWKKEASAFYRKDKARMSRRLSMEFMLSQANKFANYEVIWFPQNMDWRGRVYAVPMFNPQGNDMTKGLLTFAQEKPIGEDGFYWLKIHGANTAGVDKVPFQQRIKFVEDNHTNIMECAKAPLENTWWAEQDSPFCFLAFCFEYAGVINSGLSYNCSLPLAFDGSCSGLQHFSAMLRDEIGGKAVNLLPSAEYQDIYRIVSDKVNEMLKQDLINGTSTTVETVTDKKTGEITQRTKYGTKVMAQWWLEHGVNRGVTKRPVMTLVYGSKEFGFRDQVLSDTIQPAIDNGKGDMFLNPNQAAGYMAKLIWNAVSGTVVAAVEAMNWLKSAAKLLAAEVKDEKTDTVLRGRCAVHWVTPDGFPVWQEYKKPIQTRLNLMFLGQFRLQPTINTNKDSEIDARKQVSGIAPNFVHSLDGNHLRMTVVWAHEKYGIESFALIHDSFGTIPADAANLFKAVRETFVDTYESCDVLADFYDQIADQLHESQRDKMPALPAKGKLNLRDILKSDFAFA

SEQ ID NO: 1199 - DNA, 2670 bp, synthetic construct
  misc_feature 1..2670: note = Variant of RNA polymerase
  source 1..2670: mol_type = other DNA
atgcaccatcaccatcaccatatgaacacgattaacattgctaagaacgacttctctgacatcgaactggctgctatcccgttcaacactctggctgaccattacggtgagcgtttagctagtgaacagttggcccttgagcatgagtcttacgagatgggtgaagcacgcttccgcaagatgtttgagcgtcaacttaaagctggtgaggttgcggataacgctgccgccaagcctctcatcactaccctactccctaagatgattgcacgcatcaacgactggtttgaggaagtgaaagctaagcgcggcaagcgcccgacagccttccagttcctgcaagaaatcaagccggaagccgtagcgtacatcaccattaagaccactctggcttgcctaaccagcgaagacaatacaaccgttcaggctgtagcaagcgcaatcggtcgggccattgaggacgaggctcgcttcggtcgtatccgtgaccttgaagctaagcacttcaagaagaacgttgaggaacaactcaacaagaaggtagggcacgtcgcgaagaaagcatttatgcaagttgtcgagcacgacatgctctctaagggtctactcggtggcgaggcgtggtcttcgtggcataaggaagactctattcatgtaggagtacgctgcatcgagatgctcattgagtcaaccggaatggttagcttacaccgccaaaatgctggcgtagtgggtgcagactctgagactatcgaactcgcacctgaatacgctgaggctatcgcaacccgtgcaggtgcgctggctggcatctctccgatgttccaaccttgcgtagttcctcctaagccgtggactggcattactggtggtggctattgggctgcggggcgcaaacccctgcagttagtacgtactcacagtctggcggcgcttcgccgctatgaagaagtgtcgatgccggaggtcatcaaagcagtcaacattgcgcagaatacagcatggcgtattaacaagaaagttctcgacgtagcgaataccatcacccaatggcagcactgtccagtcgcggatgtgcctgcgatggatcgtggcgaaatgccagctcgtccgttggacatcgataccaacgagattgcacttaaagcgtggaagaaagaagcttccgcgttctaccgcaaagacaaagcacgcatgagccgtcgtctgtcgatggagtttatgttatctcaggcgaacaagtttggcaattatgaggttatctggtttccgcaaaacatggattggcgtgggcgcgtgtacgctgtcccgatgttcaatcctcagggcaacgatatgacgaaaggcctgctgacctttgcgcaggagaaacccattggtgaagacggcttctattggctcaagattcatggcgcaaatacagctggagtggataaagtaccgtttcagcaacgcatcaaatttgttgaggataaccatacgaatattatggaatgcgcgaaagcaccgctggaaaacacttggtgggcggaacaggactcgccgttctgctttctggcgttctgctttgagtatgctggcgtcatcaatagtggtctgtcgtacaactgtagcttgcctctggcatttgatggtagttgctccggcctgcaacatttctcagcgatgttacgcgacgaaattggcggcaaagctgtgaatctcctcccatctgcggaataccaggatatttatcgtatcgtcagcgacaaagttaacgagatgctgaaacaagatctgattaacggtacctctaccaccgtggaaacggtgactgataaaaagacaggcgaaattacccaacgcacgaaatacgggaccaaagttatggcacagtggtggttagaacacggtgtgaatcgtggcgtcacgaaacgcccggttatgactttggtgtatgggagcaaagagtttggattccgcgatcaagtgctgagtgacaccattcaaccggcgatcgataacggcaagggtgacatgtttctgaatccgaatcaggctgctggttacatggcgaaactgatctggaacgcagtgtccgggaccgtagtcgcagcagttgaggcgatgaactggctgaaaagtgcggcgaaattacttgctgctgaagtgaaggatgagaagacggatacagttctgcgtggccgctgcgcagtacattgggtgactcccgacggcttccctgtgtggcaggaatacaagaagcctattcaaacgcgcttgaacctgatgttcctcggtcagttccgcttacagcctaccattaacaccaacaaagatagcgagattgatgcacgcaaacaggtgtctggtatcgctcctaactttgtacacagcctggacggtaaccaccttcgtatgactgtagtgtgggcacacgagaagtacggaatcgaatcttttgcactgattcacgactccttcggtaccattccggctgacgctgcgaacctgcgcaaagcagtgcgcgaaactttcgttgacacatatgagtcttgtgatgtactggctgatttctacgaccagattgttgaccagttgcacgagtctcaacgcgacaaaatgccagcacttccggctaaaggtaagttgaacctccgtgacatcttaaaatcggacttcgcgttcgcg

SEQ ID NO: 1200 - protein, 890 aa, synthetic construct
  REGION 1..890: note = Variant of RNA polymerase
MHHHHHHMNTINIAKNDFSDIELAAIPFNTLADHYGERLASEQLALEHESYEMGEARFRKMFERQLKAGEVADNAAAKPLITTLLPKMIARINDWFEEVKAKRGKRPTAFQFLQEIKPEAVAYITIKTTLACLTSEDNTTVQAVASAIGRAIEDEARFGRIRDLEAKHFKKNVEEQLNKKVGHVAKKAFMQVVEHDMLSKGLLGGEAWSSWHKEDSIHVGVRCIEMLIESTGMVSLHRQNAGVVGADSETIELAPEYAEAIATRAGALAGISPMFQPCVVPPKPWTGITGGGYWAAGRKPLQLVRTHSLAALRRYEEVSMPEVIKAVNIAQNTAWRINKKVLDVANTITQWQHCPVADVPAMDRGEMPARPLDIDTNEIALKAWKKEASAFYRKDKARMSRRLSMEFMLSQANKFGNYEVIWFPQNMDWRGRVYAVPMFNPQGNDMTKGLLTFAQEKPIGEDGFYWLKIHGANTAGVDKVPFQQRIKFVEDNHTNIMECAKAPLENTWWAEQDSPFCFLAFCFEYAGVINSGLSYNCSLPLAFDGSCSGLQHFSAMLRDEIGGKAVNLLPSAEYQDIYRIVSDKVNEMLKQDLINGTSTTVETVTDKKTGEITQRTKYGTKVMAQWWLEHGVNRGVTKRPVMTLVYGSKEFGFRDQVLSDTIQPAIDNGKGDMFLNPNQAAGYMAKLIWNAVSGTVVAAVEAMNWLKSAAKLLAAEVKDEKTDTVLRGRCAVHWVTPDGFPVWQEYKKPIQTRLNLMFLGQFRLQPTINTNKDSEIDARKQVSGIAPNFVHSLDGNHLRMTVVWAHEKYGIESFALIHDSFGTIPADAANLRKAVRETFVDTYESCDVLADFYDQIVDQLHESQRDKMPALPAKGKLNLRDILKSDFAFA

SEQ ID NO: 1201 - DNA, 2670 bp, synthetic construct
  misc_feature 1..2670: note = Variant of RNA polymerase
  source 1..2670: mol_type = other DNA
atgcaccatcaccatcaccatatgaacacgattaacattgctaagaacgacttctctgacatcgaactggctgctatcccgttcaacactctggctgaccattacggtgagcgtttagctagtgaacagttggcccttgagcatgagtcttacgagatgggtgaagcacgcttccgcaagatgtttgagcgtcaacttaaagctggtgaggttgcggataacgctgccgccaagcctctcatcactaccctactccctaagatgattgcacgcatcaacgactggtttgaggaagtgaaagctaagcgcggcaagcgcccgacagccttccagttcctgcaagaaatcaagccggaagccgtagcgtacatcaccattaagaccactctggcttgcctaaccagtgcggacaatacaaccgttcaggctgtagcaagcgcaatcggtcgggccattgaggacgaggctcgcttcggtcgtatccgtgaccttgaagctaagcacttcaagaagaacgttgaggaacaactcaacaagcgtgtagggcacgtcgcgaagaaagcatttatgcaagttgtcgagcacgacatgctctctaagggtctactcggtggcgaggcgtggtcttcgtggcataaggaagactctattcatgtaggagtacgctgcatcgagatgctcattgagtcaaccggaatggttagcttacaccgccaaaatgctggcgtagtgggtgcagactctgagactatcgaactcgcacctgaatacgctgaggctatcgcaacccgtgcaggtgcgctggctggcatctctccgatgttccaaccttgcgtagttcctcctaagccgtggactggcattactggtggtggctattgggctgcggggcgcaaacccctgcagttagtacgtactcgcagtctggcggcgcttcgccgctatgaagaagtgtcgatgccggaggtcatcaaagcagtcaacattgcgcagaatacagcatggcgtattaacaagaaagttctcgacgtagcgaataccatcacccaatggcagcactgtccagtcgcggatgtgcctgcgatggatcgtggcgaaatgccagctcgtccgttggacatcgataccaacgagattgcacttaaagcgtggaagaaagaagcttccgcgttctaccgcaaagacaaagcacgcatgagccgtcgtctgtcgatggagtttatgttatctcaggcgaacaagtttgccaattatgaggttatctggtttccgcaaaacatggattggcgtgggcgcgtgtacgctgtcccgatgttcaatcctcagggcaacgatatgacgaaaggcctgctgacctttgcgcaggagaaacccattggtgaagacggcttctattggctcaagattcatggcgcaaatacagctggagtggataaagtaccgtttcagcaacgcatcaaatttgttgaggataaccatacgaatattatggaatgcgcgaaagcaccgctggaaaacacttggtgggcggaacaggactcgccgttctgctttctggcgttctgctttgagtatgctggcgtcatcaatagtggtctgtcgtacaactgtagcttgcctctggcatttgatggtagttgctccggcctgcaacatttctcagcgatgttacgcgacgaaattggcggcaaagctgtgaatctcctcccatctgcggaataccaggatatttatcgtatcgtcagcgacaaagttaacgagatgctgaaacaagatctgattaacggtacctctaccaccgtggaaacggtgactgataaaaagacaggcgaaattacccaacgcacgaaatacgggaccaaagttatggcacagtggtggttagaacacggtgtgaatcgtggcgtcacgaaacgcccggttatgactttggtgtatgggagcaaagagtttggattccgcgatcaagtgctgagtgacaccattcaaccggcgatcgataacggcaagggtgacatgtttctgaatccgaatcaggctgctggttacatggcgaaactgatctggaacgcagtgtccgggaccgtagtcgcagcagttgaggcgatgaactggctgaaaagtgcggcgaaattacttgctgctgaagtgaaggatgagaagacggatacagttctgcgtggccgctgcgcagtacattgggtgactcccgacggcttccctgtgtggcaggaatacaagaagcctattcaaacgcgcttgaacctgatgttcctcggtcagttccgcttacagcctaccattaacaccaacaaagatagcgagattgatgcacgcaaacaggtgtctggtatcgctcctaactttgtacacagcctggacggtaaccaccttcgtatgactgtagtgtgggcacacgagaagtacggaatcgaatcttttgcactgattcacgactccttcggtaccattccggctgacgctgcgaacctgcgcaaagcagtgcgcgaaactttcgttgacacatatgagtcttgtgatgtactggctgatttctacgaccagattgctgaccagttgcacgagtctcaacgcgacaaaatgccagcacttccggctaaaggtaagttgaacctccgtgacatcttaaaatcggacttcgcgttcgcg

SEQ ID NO: 1202 - protein, 890 aa, synthetic construct
  REGION 1..890: note = Variant of RNA polymerase
MHHHHHHMNTINIAKNDFSDIELAAIPFNTLADHYGERLASEQLALEHESYEMGEARFRKMFERQLKAGEVADNAAAKPLITTLLPKMIARINDWFEEVKAKRGKRPTAFQFLQEIKPEAVAYITIKTTLACLTSADNTTVQAVASAIGRAIEDEARFGRIRDLEAKHFKKNVEEQLNKRVGHVAKKAFMQVVEHDMLSKGLLGGEAWSSWHKEDSIHVGVRCIEMLIESTGMVSLHRQNAGVVGADSETIELAPEYAEAIATRAGALAGISPMFQPCVVPPKPWTGITGGGYWAAGRKPLQLVRTRSLAALRRYEEVSMPEVIKAVNIAQNTAWRINKKVLDVANTITQWQHCPVADVPAMDRGEMPARPLDIDTNEIALKAWKKEASAFYRKDKARMSRRLSMEFMLSQANKFANYEVIWFPQNMDWRGRVYAVPMFNPQGNDMTKGLLTFAQEKPIGEDGFYWLKIHGANTAGVDKVPFQQRIKFVEDNHTNIMECAKAPLENTWWAEQDSPFCFLAFCFEYAGVINSGLSYNCSLPLAFDGSCSGLQHFSAMLRDEIGGKAVNLLPSAEYQDIYRIVSDKVNEMLKQDLINGTSTTVETVTDKKTGEITQRTKYGTKVMAQWWLEHGVNRGVTKRPVMTLVYGSKEFGFRDQVLSDTIQPAIDNGKGDMFLNPNQAAGYMAKLIWNAVSGTVVAAVEAMNWLKSAAKLLAAEVKDEKTDTVLRGRCAVHWVTPDGFPVWQEYKKPIQTRLNLMFLGQFRLQPTINTNKDSEIDARKQVSGIAPNFVHSLDGNHLRMTVVWAHEKYGIESFALIHDSFGTIPADAANLRKAVRETFVDTYESCDVLADFYDQIADQLHESQRDKMPALPAKGKLNLRDILKSDFAFA

SEQ ID NO: 1203 - DNA, 2670 bp, synthetic construct
  misc_feature 1..2670: note = Variant of RNA polymerase
  source 1..2670: mol_type = other DNA
atgcaccatcaccatcaccatatgaacacgattaacattgctaagaacgacttctctgacatcgaactggctgctatcccgttcaacactctggctgaccattacggtgagcgtttagctagtgaacagttggcccttgagcatgagtcttacgagatgggtgaagcacgcttccgcaagatgtttgagcgtcaacttaaagctggtgaggttgcggataacgctgccgccaagcctctcatcactaccctactccctaagatgattgcacgcatcaacgactggtttgaggaagtgaaagctaagcgcggcaagcgcccgacagccttccagttcctgcaagaaatcaagccggaagccgtagcgtacatcaccattaagaccactctggcttgcctaaccagcgcagacaatacaaccgttcaggctgtagcaagcgcaatcggtcgggccattgaggacgaggctcgcttcggtcgtatccgtgaccttgaagctaagcacttcaagaagaacgttgaggaacaactcaacaagcgtgtagggcacgtcgacaagaaagcatttatgcaagttgtcgagcacgacatgctctctaagggtctactcggtggcgaggcgtggtcttcgtggcataaggaagactctattcatgtaggagtacgctgcatcgagatgctcattgagtcaaccggaatggttagcttacaccgccaaaatgctggcgtagtgggtgcagactctgagactatcgaactcgcacctgaatacgctgaggctatcgcaacccgtgcaggtgcgctggctggcatctctccgatgttccaaccttgcgtagttcctcctaagccgtggactggcattactggtggtggctattgggctgcggggcgcaaacccctgcagttagtacgtactcgcagtctggcggcgcttcgccgctatgaagaagtgtcgatgccggaggtcatcaaagcagtcaacattgcgcagaatacagcatggcgtattaacaagaaagttctcgacgtagcgaataccatcacccaatggcagcactgtccagtcgcggatgtgcctgcgatggatcgtggcgaaatgccagctcgtccgttggacatcgataccaacgagattgcacttaaagcgtggaagaaagaagcttccgcgttctaccgcaaagacaaagcacgcatgagccgtcgtctgtcgatggagtttatgttatctcaggcgaacaagtttgccaattatgaggttatctggtttccgcaaaacatggattggcgtgggcgcgtgtacgctgtcccgatgttcaatcctcagggcaacgatatgacgaaaggcctgctgacctttgcgcaggagaaacccattggtgaagacggcttctattggctcaagattcatggcgcaaatacagctggagtggataaagtaccgtttccacaacgcatcaaatttgttgaggataaccatacgaatattatggaatgcgcgaaagcaccgctggaaaacacttggtgggcggaacaggactcgccgttctgctttctggcgttctgctttgagtatgctggcgtcatcaatagtggtctgtcgtacaactgtagcttgcctctggcatttgatggtagttgctccggcctgcaacatttctcagcgatgttacgcgacgaaattggcggcaaagctgtgaatctcctcccatctgcggaataccaggatatttatcgtatcgtcagcgacaaagttaacgagatgctgaaacaagatctgattaacggtacctctaccaccgtggaaacggtgactgataaaaagacaggcgaaattacccaacgcacgaaatacgggaccaaagttatggcacagtggtggttagaacacggtgtgaatcgtggcgtcacgaaacgcccggttatgactttggtgtatgggagcaaagagtttggattccgcgatcaagtgctgagtgacaccattcaaccggcgatcgataacggcaagggtgacatgtttctgaatccgaatcaggctgctggttacatggcgaaactgatctggaacgcagtgtccgggaccgtagtcgcagcagttgaggcgatgaactggctgaaaagtgcggcgaaattacttgctgctgaagtgaaggatgagaagacggatacagttctgcgtggccgctgcgcagtacattgggtgactcccgacggcttccctgtgtggcaggaatacaagaagcctattcaaacgcgcttgaacctgatgttcctcggtcagttccgcttacagcctaccattaacaccaacaaagatagcgagattgatgcacgcaaacaggtgtctggtatcgctcctaactttgtacacagcctgaacggtaaccaccttcgtatgactgtagtgtgggcacacgagaagtacggaatcgaatcttttgcactgattcacgactccttcggtaccattccggctgacgctgcgaacctgtttaaagcagtgcgcgaaactttcgttgacacatatgagtcttgtgatgtactggctgatttctacgaccagattgctgaccagttgcacgagtctcaacgcgacaaaatgccagcacttccggctaaaggtaagttgaacctccgtgacatcttaaaatcggacttcgcgttcgcg

SEQ ID NO: 1204 - protein, 890 aa, synthetic construct
  REGION 1..890: note = Variant of RNA polymerase
MHHHHHHMNTINIAKNDFSDIELAAIPFNTLADHYGERLASEQLALEHESYEMGEARFRKMFERQLKAGEVADNAAAKPLITTLLPKMIARINDWFEEVKAKRGKRPTAFQFLQEIKPEAVAYITIKTTLACLTSADNTTVQAVASAIGRAIEDEARFGRIRDLEAKHFKKNVEEQLNKRVGHVDKKAFMQVVEHDMLSKGLLGGEAWSSWHKEDSIHVGVRCIEMLIESTGMVSLHRQNAGVVGADSETIELAPEYAEAIATRAGALAGISPMFQPCVVPPKPWTGITGGGYWAAGRKPLQLVRTRSLAALRRYEEVSMPEVIKAVNIAQNTAWRINKKVLDVANTITQWQHCPVADVPAMDRGEMPARPLDIDTNEIALKAWKKEASAFYRKDKARMSRRLSMEFMLSQANKFANYEVIWFPQNMDWRGRVYAVPMFNPQGNDMTKGLLTFAQEKPIGEDGFYWLKIHGANTAGVDKVPFPQRIKFVEDNHTNIMECAKAPLENTWWAEQDSPFCFLAFCFEYAGVINSGLSYNCSLPLAFDGSCSGLQHFSAMLRDEIGGKAVNLLPSAEYQDIYRIVSDKVNEMLKQDLINGTSTTVETVTDKKTGEITQRTKYGTKVMAQWWLEHGVNRGVTKRPVMTLVYGSKEFGFRDQVLSDTIQPAIDNGKGDMFLNPNQAAGYMAKLIWNAVSGTVVAAVEAMNWLKSAAKLLAAEVKDEKTDTVLRGRCAVHWVTPDGFPVWQEYKKPIQTRLNLMFLGQFRLQPTINTNKDSEIDARKQVSGIAPNFVHSLNGNHLRMTVVWAHEKYGIESFALIHDSFGTIPADAANLFKAVRETFVDTYESCDVLADFYDQIADQLHESQRDKMPALPAKGKLNLRDILKSDFAFA

SEQ ID NO: 1205 - DNA, 2670 bp, synthetic construct
  misc_feature 1..2670: note = Variant of RNA polymerase
  source 1..2670: mol_type = other DNA
atgcaccatcaccatcaccatatgaacacgattaacattgctaagaacgacttctctgacatcgaactggctgctatcccgttcaacactctggctgaccattacggtgagcgtttagctcgtgaacagttggcccttgagcatgagtcttacgagatgggtgaagcacgcttccgcaagatgtttgagcgtcaacttaaagctggtgaggttgcggataacgctgccgccaagcctctcatcactaccctactccctaagatgattgcacgcatcaacgactggtttgaggaagtgaaagctaagcgcggcaagcgcccgacagccttccagttcctgcaagaaatcaagccggaagccgtagcgtacatcaccattaagaccactctggcttgcctaaccagtgcggacaatacaaccgttcaggctgtagcaagcgcaatcggtcgggccattgaggacgaggctcgcttcggtcgtatccgtgaccttgaagctaagcacttcaagaagaacgttgaggaacaactcaacaagcgtgtagggcacgtcaacaagaaagcatttatgcaagttgtcgagcacgacatgctctctaagggtctactcggtggcgaggcgtggtcttcgtggcataaggaagactctattcatgtaggagtacgctgcatcgagatgctcattgagtcaaccggaatggttagcttacaccgccaaaatgctggcgtagtgggtgcagactctgagactatcgaactcgcacctgaatacgctgaggctatcgcaacccgtgcaggtgcgctggctggcatctctccgatgttccaaccttgcgtagttcctcctaagccgtggactggcattactggtggtggctattgggctgcggggcgcaaacccctgcagttagtacgtactcgcagtctggcggcgcttcgccgctatgaagaagtgtcgatgccggaggtcatcaaagcagtcaacattgcgcagaatacagcatggcgtattaacaagaaagttctcgacgtagcgaataccatcacccaatggcagcactgtccagtcgcggatgtgcctgcgatggatcgtggcgaaatgccagctcgtccgttggacatcgataccaacgagattgcacttaaagcgtggaagaaagaagcttccgcgttctaccgcaaagacaaagcacgcatgagccgtcgtctgtcgatggagtttatgttatctcaggcgaacaagtttggcaattatgaggttatctggtttccgcaaaacatggattggcgtgggcgcgtgtacgctgtcccgatgttcaatcctcagggcaacgatatgacgaaaggcctgctgacctttgcgcaggagaaacccattggtgaagacggcttctattggctcaagattcatggcgcaaatacagctggagtggataaagtaccgtttccacaacgcatcaaatttgttgaggataaccatacgaatattatggaatgcgcgaaagcaccgctggaaaacacttggtgggcggaacaggactcgccgttctgctttctggcgttctgctttgagtatgctggcgtcatcaatagtggtctgtcgtacaactgtagcttgcctctggcatttgatggtagttgctccggcctgcaacatttctcagcgatgttacgcgacgaaattggcggcaaagctgtgaatctcctcccatctgcggaataccaggatatttatcgtatcgtcagcgacaaagttaacgagatgctgaaacaagatctgattaacggtacctctaccaccgtggaaacggtgactgataaaaagacaggcgaaattacccaacgcacgaaatacgggaccaaagttatggcacagtggtggttagaacacggtgtgaatcgtggcgtcacgaaacgcccggttatgactttggtgtatgggagcaaagagtttggattccgcgatcaagtgctgagtgacaccattcaaccggcgatcgataacggcaagggtgacatgtttctgaatccgaatcaggctgctggttacatggcgaaactgatctggaacgcagtgtccgggaccgtagtcgcagcagttgaggcgatgaactggctgaaaagtgcggcgaaattacttgctgctgaagtgaaggatgagaagacggatacagttctgcgtggccgctgcgcagtacattgggtgactcccgacggcttccctgtgtggcaggaatacaagaagcctattcaaacgcgcttgaacctgatgttcctcggtcagttccgcttacagcctaccattaacaccaacaaagatagcgagattgatgcacgcaaacaggtgtctggtatcgctcctaactttgtacacagcctggacggtaaccaccttcgtatgactgtagtgtgggcacacgagaagtacggaatcgaatcttttgcactgattcacgactccttcggtaccattccggctgacgctgcgaacctgcgcaaagcagtgcgcgaaactttcgttgacacatatgagtcttgtgatgtactggctgatttctacgaccagattgctgaccagttgcacgagtctcaacgcgacaaaatgccagcacttccggctaaaggtaagttgaacctccgtgacatcttaaaatcggacttcgcgttcgcg

SEQ ID NO: 1206 - protein, 890 aa, synthetic construct
  REGION 1..890: note = Variant of RNA polymerase
MHHHHHHMNTINIAKNDFSDIELAAIPFNTLADHYGERLAREQLALEHESYEMGEARFRKMFERQLKAGEVADNAAAKPLITTLLPKMIARINDWFEEVKAKRGKRPTAFQFLQEIKPEAVAYITIKTTLACLTSADNTTVQAVASAIGRAIEDEARFGRIRDLEAKHFKKNVEEQLNKRVGHVNKKAFMQVVEHDMLSKGLLGGEAWSSWHKEDSIHVGVRCIEMLIESTGMVSLHRQNAGVVGADSETIELAPEYAEAIATRAGALAGISPMFQPCVVPPKPWTGITGGGYWAAGRKPLQLVRTRSLAALRRYEEVSMPEVIKAVNIAQNTAWRINKKVLDVANTITQWQHCPVADVPAMDRGEMPARPLDIDTNEIALKAWKKEASAFYRKDKARMSRRLSMEFMLSQANKFGNYEVIWFPQNMDWRGRVYAVPMFNPQGNDMTKGLLTFAQEKPIGEDGFYWLKIHGANTAGVDKVPFPQRIKFVEDNHTNIMECAKAPLENTWWAEQDSPFCFLAFCFEYAGVINSGLSYNCSLPLAFDGSCSGLQHFSAMLRDEIGGKAVNLLPSAEYQDIYRIVSDKVNEMLKQDLINGTSTTVETVTDKKTGEITQRTKYGTKVMAQWWLEHGVNRGVTKRPVMTLVYGSKEFGFRDQVLSDTIQPAIDNGKGDMFLNPNQAAGYMAKLIWNAVSGTVVAAVEAMNWLKSAAKLLAAEVKDEKTDTVLRGRCAVHWVTPDGFPVWQEYKKPIQTRLNLMFLGQFRLQPTINTNKDSEIDARKQVSGIAPNFVHSLDGNHLRMTVVWAHEKYGIESFALIHDSFGTIPADAANLRKAVRETFVDTYESCDVLADFYDQIADQLHESQRDKMPALPAKGKLNLRDILKSDFAFA

SEQ ID NO: 1207 - DNA, 2670 bp, synthetic construct
  misc_feature 1..2670: note = Variant of RNA polymerase
  source 1..2670: mol_type = other DNA
atgcaccatcaccatcaccatatgaacacgattaacattgctaagaacgacttctctgacatcgaactggctgctatcccgttcaacactctggctgaccattacggtgagcgtttagctcgtgaacagttggcccttgagcatgagtcttacgagatgggtgaagcacgcttccgcaagatgtttgagcgtcaacttaaagctggtgaggttgcggataacgctgccgccaagcctctcatcactaccctactccctaagatgattgcacgcatcaacgactggtttgaggaagtgaaagctaagcgcggcaagcgcccgacagccttccagttcctgcaagaaatcaagccggaagccgtagcgtacatcaccattaagaccactctggcttgcctaacccgcgcagacaatacaaccgttcaggctgtagcaagcgcaatcggtcgggccattgaggacgaggctcgcttcggtcgtatccgtgaccttgaagctaagcacttcaagaagaacgttgaggaacaactcaacaagggggtagggcacgtcgcgaagaaagcatttatgcaagttgtcgagcacgacatgctctctaagggtctactcggtggcgaggcgtggtcttcgtggcataaggaagactctattcatgtaggagtacgctgcatcgagatgctcattgagtcaaccggaatggttagcttacaccgccaaaatgctggcgtagtgggtgcagactctgagactatcgaactcgcacctgaatacgctgaggctatcgcaacccgtgcaggtgcgctggctggcatctctccgatgttccaaccttgcgtagttcctcctaagccgtggactggcattactggtggtggctattgggctgcggggcgcaaacccctgcagttagtacgtactcgcagtctggcggcgcttcgccgctatgaagaagtgtcgatgccggaggtcatcaaagcagtcaacattgcgcagaatacagcatggcgtattaacaagaaagttctcgacgtagcgaataccatcacccaatggcagcactgtccagtcgcggatgtgcctgcgatggatcgtggcgaaatgccagctcgtccgttggacatcgataccaacgagattgcacttaaagcgtggaagaaagaagcttccgcgttctaccgcaaagacaaagcacgcatgagccgtcgtctgtcgatggagtttatgttatctcaggcgaacaagtttgccaattatgaggttatctggtttccgcaaaacatggattggcgtgggcgcgtgtacgctgtcccgatgttcaatcctcagggcaacgatatgacgaaaggcctgctgacctttgcgcaggagaaacccattggtgaagacggcttctattggctcaagattcatggcgcaaatacagctggaggggataaagtaccgtttccacaacgcatcaaatttgttgaggataaccatacgggtattatggaatgtgcgaaagcaccgctggaaaacacttggtgggcggaacaggactcgccgttctgctttctggcgttctgctttgagtatgctggcgtcatcaatagtggtctgtcgtacaactgtagcttgcctctggcatttgatggtagttgctccggcctgcaacatttctcagcgatgttacgcgacgaaattggcggcaaagctgtgaatctcctcccatctgcggaataccaggatatttatcgtatcgtcagcgacaaagttaacgagatgctgaaacaagatctgattaacggtacctctaccaccgtggaaacggtgactgataaaaagacaggcgaaattacccaacgcacgaaatacgggaccaaagttatggcacagtggtggttagaacacggtgtgaatcgtggcgtcacgaaacgcccggttatgactttggtgtatgggagcaaagagtttggattccgcgatcaagtgctgagtgacaccattcaaccggcgatcgataacggcaagggtgacatgtttctgaatccgaatcaggctgctggttacatggcgaaactgatctggaacgcagtgtccgggaccgtagtcgcagcagttgaggcgatgaactggctgaaaagtgcggcgaaattacttgctgctgaagtgaaggatgagaagacggatacagttctgcgtggccgctgcgcagtacattgggtgactcccgacggcttccctgtgtggcaggaatacaagaagcctattcaaacgcgcttgaacctgatgttcctcggtcagttccgcttacagcctaccattaacaccaacaaagatagcgagattgatgcacgcaaacaggtgtctggtatcgctcctaactttgtacacagcctgaacggtaaccaccttcgtatgactgtagtgtgggcacacgagaagtacggaatcgaatcttttgcactgattcacgactccttcggtaccattccggctgacgctgcgaacctgcgcaaagcagtgcgcgaaactttcgttgacacatatgagtcttgtgatgtactggctgatttctacgaccagattgctgaccagttgcacgagtctcaacgcgacaaaatgccagcacttccggctaaaggtaagttgaacctccgtgacatcttaaaatcggacttcgcgttcgcg

SEQ ID NO: 1208 - protein, 890 aa, synthetic construct
  REGION 1..890: note = Variant of RNA polymerase
MHHHHHHMNTINIAKNDFSDIELAAIPFNTLADHYGERLAREQLALEHESYEMGEARFRKMFERQLKAGEVADNAAAKPLITTLLPKMIARINDWFEEVKAKRGKRPTAFQFLQEIKPEAVAYITIKTTLACLTRADNTTVQAVASAIGRAIEDEARFGRIRDLEAKHFKKNVEEQLNKGVGHVAKKAFMQVVEHDMLSKGLLGGEAWSSWHKEDSIHVGVRCIEMLIESTGMVSLHRQNAGVVGADSETIELAPEYAEAIATRAGALAGISPMFQPCVVPPKPWTGITGGGYWAAGRKPLQLVRTRSLAALRRYEEVSMPEVIKAVNIAQNTAWRINKKVLDVANTITQWQHCPVADVPAMDRGEMPARPLDIDTNEIALKAWKKEASAFYRKDKARMSRRLSMEFMLSQANKFANYEVIWFPQNMDWRGRVYAVPMFNPQGNDMTKGLLTFAQEKPIGEDGFYWLKIHGANTAGGDKVPFPQRIKFVEDNHTGIMECAKAPLENTWWAEQDSPFCFLAFCFEYAGVINSGLSYNCSLPLAFDGSCSGLQHFSAMLRDEIGGKAVNLLPSAEYQDIYRIVSDKVNEMLKQDLINGTSTTVETVTDKKTGEITQRTKYGTKVMAQWWLEHGVNRGVTKRPVMTLVYGSKEFGFRDQVLSDTIQPAIDNGKGDMFLNPNQAAGYMAKLIWNAVSGTVVAAVEAMNWLKSAAKLLAAEVKDEKTDTVLRGRCAVHWVTPDGFPVWQEYKKPIQTRLNLMFLGQFRLQPTINTNKDSEIDARKQVSGIAPNFVHSLNGNHLRMTVVWAHEKYGIESFALIHDSFGTIPADAANLRKAVRETFVDTYESCDVLADFYDQIADQLHESQRDKMPALPAKGKLNLRDILKSDFAFA

SEQ ID NO: 1209 - DNA, 2670 bp, synthetic construct
  misc_feature 1..2670: note = Variant of RNA polymerase
  source 1..2670: mol_type = other DNA
atgcaccatcaccatcaccatatgaacacgattaacattgctaagaacgacttctctgacatcgaactggctgctatcccgttcaacactctggctgaccattacggtgagcgtttagctcgtgaacagttggcccttgagcatgagtcttacgagatgggtgaagcacgcttccgcaagatgtttgagcgtcaacttaaagctggtgaggttgcggataacgctgccgccaagcctctcatcactaccctactccctaagatgattgcacgcatcaacgactggtttgaggaagtgaaagctaagcgcggcaagcgcccgacagccttccagttcctgcaagaaatcaagccggaagccgtagcgtacatcaccattaagaccactctggcttgcctaacccgcgaagacaatacaaccgttcaggctgtagcaagcgcaatcggtcgggccattgaggacgaggctcgcttcggtcgtatccgtgaccttgaagctaagcacttcaagaagaacgttgaggaacaactcaacaagcgtgtagggcacgtcgcgaagaaagcatttatgcaagttgtcgagcacgacatgctctctaagggtctactcggtggcgaggcgtggtcttcgtggcataaggaagactctattcatgtaggagtacgctgcatcgagatgctcattgagtcaaccggaatggttagcttacaccgccaaaatgctggcgtagtgggtgcagactctgagactatcgaactcgcacctgaatacgctgaggctatcgcaacccgtgcaggtgcgctggctggcatctctccgatgttccaaccttgcgtagttcctcctaagccgtggactggcattactggtggtggctattgggctgcggggcgcaaacccctgcagttagtacgtactcgcagtctggcggcgcttcgccgctatgaagaagtgtcgatgccggaggtcatcaaagcagtcaacattgcgcagaatacagcatggcgtattaacaagaaagttctcgacgtagcgaataccatcacccaatggcagcactgtccagtcgcggatgtgcctgcgatggatcgtggcgaaatgccagctcgtccgttggacatcgataccaacgagattgcacttaaagcgtggaagaaagaagcttccgcgttctaccgcaaagacaaagcacgcatgagccgtcgtctgtcgatggagtttatgttatctcaggcgaacaagtttggcaattatgaggttatctggtttccgcaaaacatggattggcgtgggcgcgtgtacgctgtcccgatgttcaatcctcagggcaacgatatgacgaaaggcctgctgacctttgcgcaggagaaacccattggtgaagacggcttctattggctcaagattcatggcgcaaatacagctggagtggataaagtaccgtttccacaacgcatcaaatttgttgaggataaccatacgaatattatggaatgcgcgaaagcaccgctggaaaacacttggtgggcggaacaggactcgccgttctgctttctggcgttctgctttgagtatgctggcgtcatcaatagtggtctgtcgtacaactgtagcttgcctctggcatttgatggtagttgctccggcctgcaacatttctcagcgatgttacgcgacgaaattggcggcaaagctgtgaatctcctcccatctgcggaataccaggatatttatcgtatcgtcagcgacaaagttaacgagatgctgaaacaagatctgattaacggtacctctaccaccgtggaaacggtgactgataaaaagacaggcgaaattacccaacgcacgaaatacgggaccaaagttatggcacagtggtggttagaacacggtgtgaatcgtggcgtcacgaaacgcccggttatgactttggtgtatgggagcaaagagtttggattccgcgatcaagtgctgagtgacaccattcaaccggcgatcgataacggcaagggtgacatgtttctgaatccgaatcaggctgctggttacatggcgaaactgatctggaacgcagtgtccgggaccgtagtcgcagcagttgaggcgatgaactggctgaaaagtgcggcgaaattacttgctgctgaagtgaaggatgagaagacggatacagttctgcgtggccgctgcgcagtacattgggtgactcccgacggcttccctgtgtggcaggaatacaagaagcctattcaaacgcgcttgaacctgatgttcctcggtcagttccgcttacagcctaccattaacaccaacaaagatagcgagattgatgcacgcaaacaggtgtctggtatcgctcctaactttgtacacagcctgaacggtaaccaccttcgtatgactgtagtgtgggcacacgagaagtacggaatcgaatcttttgcactgattcacgactccttcggtaccattccggctgacgctgcgaacctgtttaaagcagtgcgcgaaactttcgttgacacatatgagtcttgtgatgtactggctgatttctacgaccagattgctgaccagttgcacgagtctcaacgcgacaaaatgccagcacttccggctaaaggtaagttgaacctccgtgacatcttaaaatcggacttcgcgttcgcg

SEQ ID NO: 1210 - protein, 890 aa, synthetic construct
  REGION 1..890: note = Variant of RNA polymerase
MHHHHHHMNTINIAKNDFSDIELAAIPFNTLADHYGERLAREQLALEHESYEMGEARFRKMFERQLKAGEVADNAAAKPLITTLLPKMIARINDWFEEVKAKRGKRPTAFQFLQEIKPEAVAYITIKTTLACLTREDNTTVQAVASAIGRAIEDEARFGRIRDLEAKHFKKNVEEQLNKRVGHVAKKAFMQVVEHDMLSKGLLGGEAWSSWHKEDSIHVGVRCIEMLIESTGMVSLHRQNAGVVGADSETIELAPEYAEAIATRAGALAGISPMFQPCVVPPKPWTGITGGGYWAAGRKPLQLVRTRSLAALRRYEEVSMPEVIKAVNIAQNTAWRINKKVLDVANTITQWQHCPVADVPAMDRGEMPARPLDIDTNEIALKAWKKEASAFYRKDKARMSRRLSMEFMLSQANKFGNYEVIWFPQNMDWRGRVYAVPMFNPQGNDMTKGLLTFAQEKPIGEDGFYWLKIHGANTAGVDKVPFPQRIKFVEDNHTNIMECAKAPLENTWWAEQDSPFCFLAFCFEYAGVINSGLSYNCSLPLAFDGSCSGLQHFSAMLRDEIGGKAVNLLPSAEYQDIYRIVSDKVNEMLKQDLINGTSTTVETVTDKKTGEITQRTKYGTKVMAQWWLEHGVNRGVTKRPVMTLVYGSKEFGFRDQVLSDTIQPAIDNGKGDMFLNPNQAAGYMAKLIWNAVSGTVVAAVEAMNWLKSAAKLLAAEVKDEKTDTVLRGRCAVHWVTPDGFPVWQEYKKPIQTRLNLMFLGQFRLQPTINTNKDSEIDARKQVSGIAPNFVHSLNGNHLRMTVVWAHEKYGIESFALIHDSFGTIPADAANLFKAVRETFVDTYESCDVLADFYDQIADQLHESQRDKMPALPAKGKLNLRDILKSDFAFA

SEQ ID NO: 1211 - DNA, 2670 bp, synthetic construct
  misc_feature 1..2670: note = Variant of RNA polymerase
  source 1..2670: mol_type = other DNA
atgcaccatcaccatcaccatatgaacacgattaacattgctaagaacgacttctctgacatcgaactggctgctatcccgttcaacactctggctgaccattacggtgagcgtttagctagtgaacagttggcccttgagcatgagtcttacgagatgggtgaagcacgcttccgcgagatgtttgagcgtcaacttaaagctggtgaggttgcggataacgctgccgccaagcctctcatcactaccctactccctaagatgattgcacgcatcaacgactggtttgaggaagtgaaagctaagcgcggcaagcgcccgacagccttccagttcctgcaagaaatcaagccggaagccgtagcgtacatcaccattaagaccactctggcttgcctaaccagtgcggacaatacaaccgttcaggctgtagcaagcgcaatcggtcgggccattgaggacgaggctcgcttcggtcgtatccgtgaccttgaagctaagcacttcaagaagaacgttgaggaacaactcaacaagcgtgtagggcacgtcaacaagaaagcatttatgcaagttgtcgagcacgacatgctctctaagggtctactcggtggcgaggcgtggtcttcgtggcataaggaagactctattcatgtaggagtacgctgcatcgagatgctcattgagtcaaccggaatggttagcttacaccgccaaaatgctggcgtagtgggtgcagactctgagactatcgaactcgcacctgaatacgctgaggctatcgcaacccgtgcaggtgcgctggctggcatctctccgatgttccaaccttgcgtagttcctcctaagccgtggactggcattactggtggtggctattgggctgcggggcgcaaacccctgcagttagtacgtactcgcagtctggcggcgcttcgccgctatgaagaagtgtcgatgccggaggtcatcaaagcagtcaacattgcgcagaatacagcatggcgtattaacaagaaagttctcgacgtagcgaataccatcacccaatggcagcactgtccagtcgcggatgtgcctgcgatggatcgtggcgaaatgccagctcgtccgttggacatcgataccaacgagattgcacttaaagcgtggaagaaagaagcttccgcgttctaccgcaaagacaaagcacgcatgagccgtcgtctgtcgatggagtttatgttatctcaggcgaacaagtttggcaattatgaggctatctggtttccgcaaaacatggattggcgtgggcgcgtgtacgctgtcccgatgttcaatcctcagggcaacgatatgacgaaaggcctgctgacctttgcgcaggagaaacccattggtgaagacggcttctattggctcaagattcatggcgcaaatacagctggagtggataaagtaccgtttccacaacgcatcaaatttgttgaggataaccatacgaatattatggaatgcgcgaaagcaccgctggaaaacacttggtgggcggaacaggactcgccgttctgctttctggcgttctgctttgagtatgctggcgtcatcaatagtggtctgtcgtacaactgtagcttgcctctggcatttgatggtagttgctccggcctgcaacatttctcagcgatgttacgcgacgaaattggcggcaaagctgtgaatctcctcccatctgcggaataccaggatatttatcgtatcgtcagcgacaaagttaacgagatgctgaaacaagatctgattaacggtacctctaccaccgtggaaacggtgactgataaaaagacaggcgaaattacccaacgcacgaaatacgggaccaaagttatggcacagtggtggttagaacacggtgtgaatcgtggcgtcacgaaacgcccggttatgactttggtgtatgggagcaaagagtttggattccgcgatcaagtgctgagtgacaccattcaaccggcgatcgataacggcaagggtgacatgtttctgaatccgaatcaggctgctggttacatggcgaaactgatctggaacgcagtgtccgggaccgtagtcgcagcagttgaggcgatgaactggctgaaaagtgcggcgaaattacttgctgctgaagtgaaggatgagaagacggatacagttctgcgtggccgctgcgcagtacattgggtgactcccgacggcttccctgtgtggcaggaatacaagaagcctattcaaacgcgcttgaacctgatgttcctcggtcagttccgcttacagcctaccattaacaccaacaaagatagcgagattgatgcacgcaaacaggtgtctggtatcgctcctaactttgtacacagcctggacggtaaccaccttcgtatgactgtagtgtgggcacacgagaagtacggaatcgaatcttttgcactgattcacgactccttcggtaccattccggctgacgctgcgaacctgttcaaagcagtgcgcgaaactttcgttgacacatatgagtcttgtgatgtactggctgatttctacgaccagattgctgaccagttgcacgagtctcaacgcgacaaaatgccagcacttccggctaaaggtaagttgaacctccgtgacatcttaaaatcggacttcgcgttcgcg

SEQ ID NO: 1212 - protein, 890 aa, synthetic construct
  REGION 1..890: note = Variant of RNA polymerase
MHHHHHHMNTINIAKNDFSDIELAAIPFNTLADHYGERLASEQLALEHESYEMGEARFREMFERQLKAGEVADNAAAKPLITTLLPKMIARINDWFEEVKAKRGKRPTAFQFLQEIKPEAVAYITIKTTLACLTSADNTTVQAVASAIGRAIEDEARFGRIRDLEAKHFKKNVEEQLNKRVGHVNKKAFMQVVEHDMLSKGLLGGEAWSSWHKEDSIHVGVRCIEMLIESTGMVSLHRQNAGVVGADSETIELAPEYAEAIATRAGALAGISPMFQPCVVPPKPWTGITGGGYWAAGRKPLQLVRTRSLAALRRYEEVSMPEVIKAVNIAQNTAWRINKKVLDVANTITQWQHCPVADVPAMDRGEMPARPLDIDTNEIALKAWKKEASAFYRKDKARMSRRLSMEFMLSQANKFGNYEAIWFPQNMDWRGRVYAVPMFNPQGNDMTKGLLTFAQEKPIGEDGFYWLKIHGANTAGVDKVPFPQRIKFVEDNHTNIMECAKAPLENTWWAEQDSPFCFLAFCFEYAGVINSGLSYNCSLPLAFDGSCSGLQHFSAMLRDEIGGKAVNLLPSAEYQDIYRIVSDKVNEMLKQDLINGTSTTVETVTDKKTGEITQRTKYGTKVMAQWWLEHGVNRGVTKRPVMTLVYGSKEFGFRDQVLSDTIQPAIDNGKGDMFLNPNQAAGYMAKLIWNAVSGTVVAAVEAMNWLKSAAKLLAAEVKDEKTDTVLRGRCAVHWVTPDGFPVWQEYKKPIQTRLNLMFLGQFRLQPTINTNKDSEIDARKQVSGIAPNFVHSLDGNHLRMTVVWAHEKYGIESFALIHDSFGTIPADAANLFKAVRETFVDTYESCDVLADFYDQIADQLHESQRDKMPALPAKGKLNLRDILKSDFAFA

SEQ ID NO: 1213 - DNA, 2670 bp, synthetic construct
  misc_feature 1..2670: note = Variant of RNA polymerase
  source 1..2670: mol_type = other DNA
atgcaccatcaccatcaccatatgaacacgattaacattgctaagaacgacttctctgacatcgaactggctgctatcccgttcaacactctggctgaccattacggtgagcgtttagctagtgaacagttggcccttgagcatgagtcttacgagatgggtgaagcacgcttccgcaagatgtttgagcgtcaacttaaagctggtgaggttgcggataacgctgccgccaagcctctcatcactaccctactccctaagatgattgcacgcatcaacgactggtttgaggaagtgaaagctaagcgcggcaagcgcccgacagccttccagttcctgcaagaaatcaagccggaagccgtagcgtacatcaccattaagaccactctggcttgcctaaccagcgaagacaatacaaccgttcaggctgtagcaagcgcaatcggtcgggccattgaggacgaggctcgcttcggtcgtatccgtgaccttgaagctaagcacttcaagaagaacgttgaggaacaactcaacaagggggtagggcacgtctacaagaaagcatttatgcaagttgtcgagcacgacatgctctctaagggtctactcggtggcgaggcgtggtcttcgtggcataaggaagactctattcatgtaggagtacgctgcatcgagatgctcattgagtcaaccggaatggttagcttacaccgccaaaatgctggcgtagtgggtgcagactctgagactatcgaactcgcacctgaatacgctgaggctatcgcaacccgtgcaggtgcgctggctggcatctctccgatgttccaaccttgcgtagttcctcctaagccgtggactggcattactggtggtggctattgggctgcggggcgcaaacccctgcagttagtacgtactcacagtctggcggcgcttcgccgctatgaagaagtgtcgatgccggaggtcatcaaagcagtcaacattgcgcagaatacagcatggcgtattaacaagaaagttctcgacgtagcgaataccatcacccaatggcagcactgtccagtcgcggatgtgcctgcgatggatcgtggcgaaatgccagctcgtccgttggacatcgataccaacgagattgcacttaaagcgtggaagaaagaagcttccgcgttctaccgcaaagacaaagcacgcatgagccgtcgtctgtcgatggagtttatgttatctcaggcgaacaagtttggcaattatgaggttatctggtttccgcaaaacatggattggcgtgggcgcgtgtacgctgtcccgatgttcaatcctcagggcaacgatatgacgaaaggcctgctgacctttgcgcaggagaaacccattggtgaagacggcttctattggctcaagattcatggcgcaaatacagctggagtggataaagtaccgtttccacaacgcatcaaatttgttgaggataaccatacgaatattatggaatgcgcgaaagcaccgctggaaaacacttggtgggcggaacaggactcgccgttctgctttctggcgttctgctttgagtatgctggcgtcatcaatagtggtctgtcgtacaactgtagcttgcctctggcatttgatggtagttgctccggcctgcaacatttctcagcgatgttacgcgacgaaattggcggcaaagctgtgaatctcctcccatctgcggaataccaggatatttatcgtatcgtcagcgacaaagttaacgagatgctgaaacaagatctgattaacggtacctctaccaccgtggaaacggtgactgataaaaagacaggcgaaattacccaacgcacgaaatacgggaccaaagttatggcacagtggtggttagaacacggtgtgaatcgtggcgtcacgaaacgcccggttatgactttggtgtatgggagcaaagagtttggattccgcgatcaagtgctgagtgacaccattcaaccggcgatcgataacggcaagggtgacatgtttctgaatccgaatcaggctgctggttacatggcgaaactgatctggaacgcagtgtccgggaccgtagtcgcagcagttgaggcgatgaactggctgaaaagtgcggcgaaattacttgctgctgaagtgaaggatgagaagacggatacagttctgcgtggccgctgcgcagtacattgggtgactcccgacggcttccctgtgtggcaggaatacaagaagcctattcaaacgcgcttgaacctgatgttcctcggtcagttccgcttacagcctaccattaacaccaacaaagatagcgagattgatgcacgcaaacaggtgtctggtatcgctcctaactttgtacacagcctggacggtaaccaccttcgtatgactgtagtgtgggcacacgagaagtacggaatcgaatcttttgcactgattcacgactccttcggtaccattccggctgacgctgcgaacctgcgcaaagcagtgcgcgaaactttcgttgacacatatgagtcttgtgatgtactggctgatttctacgaccagattgttgaccagttgcacgagtctcaacgcgacaaaatgccagcacttccggctaaaggtaagttgaacctccgtgacatcttaaaatcggacttcgcgttcgcg

SEQ ID NO: 1214 - protein, 890 aa, synthetic construct
  REGION 1..890: note = Variant of RNA polymerase
MHHHHHHMNTINIAKNDFSDIELAAIPFNTLADHYGERLASEQLALEHESYEMGEARFRKMFERQLKAGEVADNAAAKPLITTLLPKMIARINDWFEEVKAKRGKRPTAFQFLQEIKPEAVAYITIKTTLACLTSEDNTTVQAVASAIGRAIEDEARFGRIRDLEAKHFKKNVEEQLNKGVGHVYKKAFMQVVEHDMLSKGLLGGEAWSSWHKEDSIHVGVRCIEMLIESTGMVSLHRQNAGVVGADSETIELAPEYAEAIATRAGALAGISPMFQPCVVPPKPWTGITGGGYWAAGRKPLQLVRTHSLAALRRYEEVSMPEVIKAVNIAQNTAWRINKKVLDVANTITQWQHCPVADVPAMDRGEMPARPLDIDTNEIALKAWKKEASAFYRKDKARMSRRLSMEFMLSQANKFGNYEVIWFPQNMDWRGRVYAVPMFNPQGNDMTKGLLTFAQEKPIGEDGFYWLKIHGANTAGVDKVPFPQRIKFVEDNHTNIMECAKAPLENTWWAEQDSPFCFLAFCFEYAGVINSGLSYNCSLPLAFDGSCSGLQHFSAMLRDEIGGKAVNLLPSAEYQDIYRIVSDKVNEMLKQDLINGTSTTVETVTDKKTGEITQRTKYGTKVMAQWWLEHGVNRGVTKRPVMTLVYGSKEFGFRDQVLSDTIQPAIDNGKGDMFLNPNQAAGYMAKLIWNAVSGTVVAAVEAMNWLKSAAKLLAAEVKDEKTDTVLRGRCAVHWVTPDGFPVWQEYKKPIQTRLNLMFLGQFRLQPTINTNKDSEIDARKQVSGIAPNFVHSLDGNHLRMTVVWAHEKYGIESFALIHDSFGTIPADAANLRKAVRETFVDTYESCDVLADFYDQIVDQLHESQRDKMPALPAKGKLNLRDILKSDFAFA

SEQ ID NO: 1215 - DNA, 2670 bp, synthetic construct
  misc_feature 1..2670: note = Variant of RNA polymerase
  source 1..2670: mol_type = other DNA
atgcaccatcaccatcaccatatgaacacgattaacattgctaagaacgacttctctgacatcgaactggctgctatcccgttcaacactctggctgaccattacggtgagcgtttagctcgtgaacagttggcccttgagcatgagtcttacgagatgggtgaagcacgcttccgcaagatgtttgagcgtcaacttaaagctggtgaggttgcggataacgctgccgccaagcctctcatcactaccctactccctaagatgattgcacgcatcaacgactggtttgaggaagtgaaagctaagcgcggcaagcgcccgacagccttccagttcctgcaagaaatcaagccggaagccgtagcgtacatcaccattaagaccactctggcttgcctaaccagtgcggacaatacaaccgttcaggctgtagcaagcgcaatcggtcgggccattgaggacgaggctcgcttcggtcgtatccgtgaccttgaagctaagcacttcaagaagaacgttgaggaacaactcaacaagaaggtagggcacgtcgacaagaaagcatttatgcaagttgtcgagcacgacatgctctctaagggtctactcggtggcgaggcgtggtcttcgtggcataaggaagactctattcatgtaggagtacgctgcatcgagatgctcattgagtcaaccggaatggttagcttacaccgccaaaatgctggcgtagtgggtgcagactctgagactatcgaactcgcacctgaatacgctgaggctatcgcaacccgtgcaggtgcgctggctggcatctctccgatgttccaaccttgcgtagttcctcctaagccgtggactggcattactggtggtggctattgggctgcggggcgcaaacccctgcagttagtacgtactcgcagtctggcggcgcttcgccgctatgaagaagtgtcgatgccggaggtcatcaaagcagtcaacattgcgcagaatacagcatggcgtattaacaagaaagttctcgacgtagcgaataccatcacccaatggcagcactgtccagtcgcggatgtgcctgcgatggatcgtggcgaaatgccagctcgtccgttggacatcgataccaacgagattgcacttaaagcgtggaagaaagaagcttccgcgttctaccgcaaagacaaagcacgcatgagccgtcgtctgtcgatggagtttatgttatctcaggcgaacaagtttggcaattatgaggttatctggtttccgcaaaacatggattggcgtgggcgcgtgtacgctgtcccgatgttcaatcctcagggcaacgatatgacgaaaggcctgctgacctttgcgcaggagaaacccattggtgaagacggcttctattggctcaagattcatggcgcaaatacagctggagtggataaagtaccgtttccacaacgcatcaaatttgttgaggataaccatacgaatattatggaatgcgcgaaagcaccgctggaaaacacttggtgggcggaacaggactcgccgttctgctttctggcgttctgctttgagtatgctggcgtcatcaatagtggtctgtcgtacaactgtagcttgcctctggcatttgatggtagttgctccggcctgcaacatttctcagcgatgttacgcgacgaaattggcggcaaagctgtgaatctcctcccatctgcggaataccaggatatttatcgtatcgtcagcgacaaagttaacgagatgctgaaacaagatctgattaacggtacctctaccaccgtggaaacggtgactgataaaaagacaggcgaaattacccaacgcacgaaatacgggaccaaagttatggcacagtggtggttagaacacggtgtgaatcgtggcgtcacgaaacgcccggttatgactttggtgtatgggagcaaagagtttggattccgcgatcaagtgctgagtgacaccattcaaccggcgatcgataacggcaagggtgacatgtttctgaatccgaatcaggctgctggttacatggcgaaactgatctggaacgcagtgtccgggaccgtagtcgcagcagttgaggcgatgaactggctgaaaagtgcggcgaaattacttgctgctgaagtgaaggatgagaagacggatacagttctgcgtggccgctgcgcagtacattgggtgactcccgacggcttccctgtgtggcaggaatacaagaagcctattcaaacgcgcttgaacctgatgttcctcggtcagttccgcttacagcctaccattaacaccaacaaagatagcgagattgatgcacgcaaacaggtgtctggtatcgctcctaactttgtacacagcctggacggtaaccaccttcgtatgactgtagtgtgggcacacgagaagtacggaatcgaatcttttgcactgattcacgactccttcggtaccattccggctgacgctgcgaacctgcgcaaagcagtgcgcgaaactttcgttgacacatatgagtcttgtgatgtactggctgatttctacgaccagattgctgaccagttgcacgagtctcaacgcgacaaaatgccagcacttccggctaaaggtaagttgaacctccgtgacatcttaaaatcggacttcgcgttcgcg

SEQ ID NO: 1216 - protein, 890 aa, synthetic construct
  REGION 1..890: note = Variant of RNA polymerase
MHHHHHHMNTINIAKNDFSDIELAAIPFNTLADHYGERLAREQLALEHESYEMGEARFRKMFERQLKAGEVADNAAAKPLITTLLPKMIARINDWFEEVKAKRGKRPTAFQFLQEIKPEAVAYITIKTTLACLTSADNTTVQAVASAIGRAIEDEARFGRIRDLEAKHFKKNVEEQLNKKVGHVDKKAFMQVVEHDMLSKGLLGGEAWSSWHKEDSIHVGVRCIEMLIESTGMVSLHRQNAGVVGADSETIELAPEYAEAIATRAGALAGISPMFQPCVVPPKPWTGITGGGYWAAGRKPLQLVRTRSLAALRRYEEVSMPEVIKAVNIAQNTAWRINKKVLDVANTITQWQHCPVADVPAMDRGEMPARPLDIDTNEIALKAWKKEASAFYRKDKARMSRRLSMEFMLSQANKFGNYEVIWFPQNMDWRGRVYAVPMFNPQGNDMTKGLLTFAQEKPIGEDGFYWLKIHGANTAGVDKVPFPQRIKFVEDNHTNIMECAKAPLENTWWAEQDSPFCFLAFCFEYAGVINSGLSYNCSLPLAFDGSCSGLQHFSAMLRDEIGGKAVNLLPSAEYQDIYRIVSDKVNEMLKQDLINGTSTTVETVTDKKTGEITQRTKYGTKVMAQWWLEHGVNRGVTKRPVMTLVYGSKEFGFRDQVLSDTIQPAIDNGKGDMFLNPNQAAGYMAKLIWNAVSGTVVAAVEAMNWLKSAAKLLAAEVKDEKTDTVLRGRCAVHWVTPDGFPVWQEYKKPIQTRLNLMFLGQFRLQPTINTNKDSEIDARKQVSGIAPNFVHSLDGNHLRMTVVWAHEKYGIESFALIHDSFGTIPADAANLRKAVRETFVDTYESCDVLADFYDQIADQLHESQRDKMPALPAKGKLNLRDILKSDFAFA

SEQ ID NO: 1217 - DNA, 2670 bp, synthetic construct
  misc_feature 1..2670: note = Variant of RNA polymerase
  source 1..2670: mol_type = other DNA
atgcaccatcaccatcaccatatgaacacgattaacattgctaagaacgacttctctgacatcgaactggctgctatcccgttcaacactctggctgaccattacggtgagcgtttagctagtgaacagttggcccttgagcatgagtcttacgagatgggtgaagcacgcttccgcaagatgtttgagcgtcaacttaaagctggtgaggttgcggataacgctgccgccaagcctctcatcactaccctactccctaagatgattgcacgcatcaacgactggtttgaggaagtgaaagctaagcgcggcaagcgcccgacagccttccagttcctgcaagaaatcaagccggaagccgtagcgtacatcaccattaagaccactctggcttgcctaaccagtgcggacaatacaaccgttcaggctgtagcaagcgcaatcggtcgggccattgaggacgaggctcgcttcggtcgtatccgtgaccttgaagctaagcacttcaagaagaacgttgaggaacaactcaacaaggaggtagggcacgtcgcgaagaaagcatttatgcaagttgtcgagcacgacatgctctctaagggtctactcggtggcgaggcgtggtcttcgtggcataaggaagactctattcatgtaggagtacgctgcatcgagatgctcattgagtcaaccggaatggttagcttacaccgccaaaatgctggcgtagtgggtgcagactctgagactatcgaactcgcacctgaatacgctgaggctatcgcaacccgtgcaggtgcgctggctggcatctctccgatgttccaaccttgcgtagttcctcctaagccgtggactggcattactggtggtggctattgggctgcggggcgcaaacccctgcagttagtacgtactcgcagtctggcggcgcttcgccgctatgaagaagtgtcgatgccggaggtcatcaaagcagtcaacattgcgcagaatacagcatggcgtattaacaagaaagttctcgacgtagcgaataccatcacccaatggcagcactgtccagtcgcggatgtgcctgcgatggatcgtggcgaaatgccagctcgtccgttggacatcgataccaacgagattgcacttaaagcgtggaagaaagaagcttccgcgttctaccgcaaagacaaagcacgcatgagccgtcgtctgtcgatggagtttatgttatctcaggcgaacaagtttgccaattatgaggttatctggtttccgcaaaacatggattggcgtgggcgcgtgtacgctgtcccgatgttcaatcctcagggcaacgatatgacgaaaggcctgctgacctttgcgcaggagaaacccattggtgaagacggcttctattggctcaagattcatggcgcaaatacagctggaggggataaagtaccgtttccacaacgcatcaaatttgttgaggataaccatacgaacgttatggaatgtgcgaaagcaccgctggaaaacacttggtgggcggaacaggactcgccgttctgctttctggcgttctgctttgagtatgctggcgtcatcaatagtggtctgtcgtacaactgtagcttgcctctggcatttgatggtagttgctccggcctgcaacatttctcagcgatgttacgcgacgaaattggcggcaaagctgtgaatctcctcccatctgcggaataccaggatatttatcgtatcgtcagcgacaaagttaacgagatgctgaaacaagatctgattaacggtacctctaccaccgtggaaacggtgactgataaaaagacaggcgaaattacccaacgcacgaaatacgggaccaaagttatggcacagtggtggttagaacacggtgtgaatcgtggcgtcacgaaacgcccggttatgactttggtgtatgggagcaaagagtttggattccgcgatcaagtgctgagtgacaccattcaaccggcgatcgataacggcaagggtgacatgtttctgaatccgaatcaggctgctggttacatggcgaaactgatctggaacgcagtgtccgggaccgtagtcgcagcagttgaggcgatgaactggctgaaaagtgcggcgaaattacttgctgctgaagtgaaggatgagaagacggatacagttctgcgtggccgctgcgcagtacattgggtgactcccgacggcttccctgtgtggcaggaatacaagaagcctattcaaacgcgcttgaacctgatgttcctcggtcagttccgcttacagcctaccattaacaccaacaaagatagcgagattgatgcacgcaaacaggtgtctggtatcgctcctaactttgtacacagcctggacggtaaccaccttcgtatgactgtagtgtgggcacacgagaagtacggaatcgaatcttttgcactgattcacgactccttcggtaccattccggctgacgctgcgaacctgtttaaagcagtgcgcgaaactttcgttgacacatatgagtcttgtgatgtactggctgatttctacgaccagattgttgaccagttgcacgagtctcaacgcgacaaaatgccagcacttccggctaaaggtaagttgaacctccgtgacatcttaaaatcggacttcgcgttcgcg

SEQ ID NO: 1218 - protein, 890 aa, synthetic construct
  REGION 1..890: note = Variant of RNA polymerase
MHHHHHHMNTINIAKNDFSDIELAAIPFNTLADHYGERLASEQLALEHESYEMGEARFRKMFERQLKAGEVADNAAAKPLITTLLPKMIARINDWFEEVKAKRGKRPTAFQFLQEIKPEAVAYITIKTTLACLTSADNTTVQAVASAIGRAIEDEARFGRIRDLEAKHFKKNVEEQLNKEVGHVAKKAFMQVVEHDMLSKGLLGGEAWSSWHKEDSIHVGVRCIEMLIESTGMVSLHRQNAGVVGADSETIELAPEYAEAIATRAGALAGISPMFQPCVVPPKPWTGITGGGYWAAGRKPLQLVRTRSLAALRRYEEVSMPEVIKAVNIAQNTAWRINKKVLDVANTITQWQHCPVADVPAMDRGEMPARPLDIDTNEIALKAWKKEASAFYRKDKARMSRRLSMEFMLSQANKFANYEVIWFPQNMDWRGRVYAVPMFNPQGNDMTKGLLTFAQEKPIGEDGFYWLKIHGANTAGGDKVPFPQRIKFVEDNHTNVMECAKAPLENTWWAEQDSPFCFLAFCFEYAGVINSGLSYNCSLPLAFDGSCSGLQHFSAMLRDEIGGKAVNLLPSAEYQDIYRIVSDKVNEMLKQDLINGTSTTVETVTDKKTGEITQRTKYGTKVMAQWWLEHGVNRGVTKRPVMTLVYGSKEFGFRDQVLSDTIQPAIDNGKGDMFLNPNQAAGYMAKLIWNAVSGTVVAAVEAMNWLKSAAKLLAAEVKDEKTDTVLRGRCAVHWVTPDGFPVWQEYKKPIQTRLNLMFLGQFRLQPTINTNKDSEIDARKQVSGIAPNFVHSLDGNHLRMTVVWAHEKYGIESFALIHDSFGTIPADAANLFKAVRETFVDTYESCDVLADFYDQIVDQLHESQRDKMPALPAKGKLNLRDILKSDFAFA

SEQ ID NO: 1219 - DNA, 2670 bp, synthetic construct
  misc_feature 1..2670: note = Variant of RNA polymerase
  source 1..2670: mol_type = other DNA
atgcaccatcaccatcaccatatgaacacgattaacattgctaagaacgacttctctgacatcgaactggctgctatcccgttcaacactctggctgaccattacggtgagcgtttagctagtgaacagttggcccttgagcatgagtcttacgagatgggtgaagcacgcttccgcgagatgtttgagcgtcaacttaaagctggtgaggttgcggataacgctgccgccaagcctctcatcactaccctactccctaagatgattgcacgcatcaacgactggtttgaggaagtgaaagctaagcgcggcaagcgcccgacagccttccagttcctgcaagaaatcaagccggaagccgtagcgtacatcaccattaagaccactctggcttgcctaacccgcgcagacaatacaaccgttcaggctgtagcaagcgcaatcggtcgggccattgaggacgaggctcgcttcggtcgtatccgtgaccttgaagctaagcacttcaagaagaacgttgaggaacaactcaacaaggaggtagggcacgtcgcgaagaaagcatttatgcaagttgtcgagcacgacatgctctctaagggtctactcggtggcgaggcgtggtcttcgtggcataaggaagactctattcatgtaggagtacgctgcatcgagatgctcattgagtcaaccggaatggttagcttacaccgccaaaatgctggcgtagtgggtgcagactctgagactatcgaactcgcacctgaatacgctgaggctatcgcaacccgtgcaggtgcgctggctggcatctctccgatgttccaaccttgcgtagttcctcctaagccgtggactggcattactggtggtggctattgggctgcggggcgcaaacccctgcagttagtacgtactcgcagtctggcggcgcttcgccgctatgaagaagtgtcgatgccggaggtcatcaaagcagtcaacattgcgcagaatacagcatggcgtattaacaagaaagttctcgacgtagcgaataccatcacccaatggcagcactgtccagtcgcggatgtgcctgcgatggatcgtggcgaaatgccagctcgtccgttggacatcgataccaacgagattgcacttaaagcgtggaagaaagaagcttccgcgttctaccgcaaagacaaagcacgcatgagccgtcgtctgtcgatggagtttatgttatctcaggcgaacaagtttgccaattatgaggttatctggtttccgcaaaacatggattggcgtgggcgcgtgtacgctgtcccgatgttcaatcctcagggcaacgatatgacgaaaggcctgctgacctttgcgcaggagaaacccattggtgaagacggcttctattggctcaagattcatggcgcaaatacagctggagtggataaagtaccgtttcagcaacgcatcaaatttgttgaggataaccatacgaacgttatggaatgtgcgaaagcaccgctggaaaacacttggtgggcggaacaggactcgccgttctgctttctggcgttctgctttgagtatgctggcgtcatcaatagtggtctgtcgtacaactgtagcttgcctctggcatttgatggtagttgctccggcctgcaacatttctcagcgatgttacgcgacgaaattggcggcaaagctgtgaatctcctcccatctgcggaataccaggatatttatcgtatcgtcagcgacaaagttaacgagatgctgaaacaagatctgattaacggtacctctaccaccgtggaaacggtgactgataaaaagacaggcgaaattacccaacgcacgaaatacgggaccaaagttatggcacagtggtggttagaacacggtgtgaatcgtggcgtcacgaaacgcccggttatgactttggtgtatgggagcaaagagtttggattccgcgatcaagtgctgagtgacaccattcaaccggcgatcgataacggcaagggtgacatgtttctgaatccgaatcaggctgctggttacatggcgaaactgatctggaacgcagtgtccgggaccgtagtcgcagcagttgaggcgatgaactggctgaaaagtgcggcgaaattacttgctgctgaagtgaaggatgagaagacggatacagttctgcgtggccgctgcgcagtacattgggtgactcccgacggcttccctgtgtggcaggaatacaagaagcctattcaaacgcgcttgaacctgatgttcctcggtcagttccgcttacagcctaccattaacaccaacaaagatagcgagattgatgcacgcaaacaggtgtctggtatcgctcctaactttgtacacagcctggacggtaaccaccttcgtatgactgtagtgtgggcacacgagaagtacggaatcgaatcttttgcactgattcacgactccttcggtaccattccggctgacgctgcgaacctgtttaaagcagtgcgcgaaactttcgttgacacatatgagtcttgtgatgtactggctgatttctacgaccagattgctgaccagttgcacgagtctcaacgcgacaaaatgccagcacttccggctaaaggtaagttgaacctccgtgacatcttaaaatcggacttcgcgttcgcg

SEQ ID NO: 1220 - protein, 890 aa, synthetic construct
  REGION 1..890: note = Variant of RNA polymerase
MHHHHHHMNTINIAKNDFSDIELAAIPFNTLADHYGERLASEQLALEHESYEMGEARFREMFERQLKAGEVADNAAAKPLITTLLPKMIARINDWFEEVKAKRGKRPTAFQFLQEIKPEAVAYITIKTTLACLTRADNTTVQAVASAIGRAIEDEARFGRIRDLEAKHFKKNVEEQLNKEVGHVAKKAFMQVVEHDMLSKGLLGGEAWSSWHKEDSIHVGVRCIEMLIESTGMVSLHRQNAGVVGADSETIELAPEYAEAIATRAGALAGISPMFQPCVVPPKPWTGITGGGYWAAGRKPLQLVRTRSLAALRRYEEVSMPEVIKAVNIAQNTAWRINKKVLDVANTITQWQHCPVADVPAMDRGEMPARPLDIDTNEIALKAWKKEASAFYRKDKARMSRRLSMEFMLSQANKFANYEVIWFPQNMDWRGRVYAVPMFNPQGNDMTKGLLTFAQEKPIGEDGFYWLKIHGANTAGVDKVPFQQRIKFVEDNHTNVMECAKAPLENTWWAEQDSPFCFLAFCFEYAGVINSGLSYNCSLPLAFDGSCSGLQHFSAMLRDEIGGKAVNLLPSAEYQDIYRIVSDKVNEMLKQDLINGTSTTVETVTDKKTGEITQRTKYGTKVMAQWWLEHGVNRGVTKRPVMTLVYGSKEFGFRDQVLSDTIQPAIDNGKGDMFLNPNQAAGYMAKLIWNAVSGTVVAAVEAMNWLKSAAKLLAAEVKDEKTDTVLRGRCAVHWVTPDGFPVWQEYKKPIQTRLNLMFLGQFRLQPTINTNKDSEIDARKQVSGIAPNFVHSLDGNHLRMTVVWAHEKYGIESFALIHDSFGTIPADAANLFKAVRETFVDTYESCDVLADFYDQIADQLHESQRDKMPALPAKGKLNLRDILKSDFAFA

SEQ ID NO: 1221 - DNA, 2670 bp, synthetic construct
  misc_feature 1..2670: note = Variant of RNA polymerase
  source 1..2670: mol_type = other DNA
atgcaccatcaccatcaccatatgaacacgattaacattgctaagaacgacttctctgacatcgaactggctgctatcccgttcaacactctggctgaccattacggtgagcgtttagctagtgaacagttggcccttgagcatgagtcttacgagatgggtgaagcacgcttccgcaagatgtttgagcgtcaacttaaagctggtgaggttgcggataacgctgccgccaagcctctcatcactaccctactccctaagatgattgcacgcatcaacgactggtttgaggaagtgaaagctaagcgcggcaagcgcccgacagccttccagttcctgcaagaaatcaagccggaagccgtagcgtacatcaccattaagaccactctggcttgcctaaccagcgcagacaatacaaccgttcaggctgtagcaagcgcaatcggtcgggccattgaggacgaggctcgcttcggtcgtatccgtgaccttgaagctaagcacttcaagaagaacgttgaggaacaactcaacaagaaggtagggcacgtcgcgaagaaagcatttatgcaagttgtcgagcacgacatgctctctaagggtctactcggtggcgaggcgtggtcttcgtggcataaggaagactctattcatgtaggagtacgctgcatcgagatgctcattgagtcaaccggaatggttagcttacaccgccaaaatgctggcgtagtgggtgcagactctgagactatcgaactcgcacctgaatacgctgaggctatcgcaacccgtgcaggtgcgctggctggcatctctccgatgttccaaccttgcgtagttcctcctaagccgtggactggcattactggtggtggctattgggctgcggggcgcaaacccctgcagttagtacgtactcacagtctggcggcgcttcgccgctatgaagaagtgtcgatgccggaggtcatcaaagcagtcaacattgcgcagaatacagcatggcgtattaacaagaaagttctcgacgtagcgaataccatcacccaatggcagcactgtccagtcgcggatgtgcctgcgatggatcgtggcgaaatgccagctcgtccgttggacatcgataccaacgagattgcacttaaagcgtggaagaaagaagcttccgcgttctaccgcaaagacaaagcacgcatgagccgtcgtctgtcgatggagtttatgttatctcaggcgaacaagtttggcaattatgaggttatctggtttccgcaaaacatggattggcgtgggcgcgtgtacgctgtcccgatgttcaatcctcagggcaacgatatgacgaaaggcctgctgacctttgcgcaggagaaacccattggtgaagacggcttctattggctcaagattcatggcgcaaatacagctggagtggataaagtaccgtttccgcaacgcatcaaatttgttgaggataaccatacgaatattatggaatgcgcgaaagcaccgctggaaaacacttggtgggcggaacaggactcgccgttctgctttctggcgttctgctttgagtatgctggcgtcatcaatagtggtctgtcgtacaactgtagcttgcctctggcatttgatggtagttgctccggcctgcaacatttctcagcgatgttacgcgacgaaattggcggcaaagctgtgaatctcctcccatctgcggaataccaggatatttatcgtatcgtcagcgacaaagttaacgagatgctgaaacaagatctgattaacggtacctctaccaccgtggaaacggtgactgataaaaagacaggcgaaattacccaacgcacgaaatacgggaccaaagttatggcacagtggtggttagaacacggtgtgaatcgtggcgtcacgaaacgcccggttatgactttggtgtatgggagcaaagagtttggattccgcgatcaagtgctgagtgacaccattcaaccggcgatcgataacggcaagggtgacatgtttctgaatccgaatcaggctgctggttacatggcgaaactgatctggaacgcagtgtccgggaccgtagtcgcagcagttgaggcgatgaactggctgaaaagtgcggcgaaattacttgctgctgaagtgaaggatgagaagacggatacagttctgcgtggccgctgcgcagtacattgggtgactcccgacggcttccctgtgtggcaggaatacaagaagcctattcaaacgcgcttgaacctgatgttcctcggtcagttccgcttacagcctaccattaacaccaacaaagatagcgagattgatgcacgcaaacaggtgtctggtatcgctcctaactttgtacacagcctggacggtaaccaccttcgtatgactgtagtgtgggcacacgagaagtacggaatcgaatcttttgcactgattcacgactccttcggtaccattccggctgacgctgcgaacctgcgcaaagcagtgcgcgaaactttcgttgacacatatgagtcttgtgatgtactggctgatttctacgaccagattgttgaccagttgcacgagtctcaacgcgacaaaatgccagcacttccggctaaaggtaagttgaacctccgtgacatcttaaaatcggacttcgcgttcgcg

SEQ ID NO: 1222 - protein, 890 aa, synthetic construct
  REGION 1..890: note = Variant of RNA polymerase
MHHHHHHMNTINIAKNDFSDIELAAIPFNTLADHYGERLASEQLALEHESYEMGEARFRKMFERQLKAGEVADNAAAKPLITTLLPKMIARINDWFEEVKAKRGKRPTAFQFLQEIKPEAVAYITIKTTLACLTSADNTTVQAVASAIGRAIEDEARFGRIRDLEAKHFKKNVEEQLNKKVGHVAKKAFMQVVEHDMLSKGLLGGEAWSSWHKEDSIHVGVRCIEMLIESTGMVSLHRQNAGVVGADSETIELAPEYAEAIATRAGALAGISPMFQPCVVPPKPWTGITGGGYWAAGRKPLQLVRTHSLAALRRYEEVSMPEVIKAVNIAQNTAWRINKKVLDVANTITQWQHCPVADVPAMDRGEMPARPLDIDTNEIALKAWKKEASAFYRKDKARMSRRLSMEFMLSQANKFGNYEVIWFPQNMDWRGRVYAVPMFNPQGNDMTKGLLTFAQEKPIGEDGFYWLKIHGANTAGVDKVPFPQRIKFVEDNHTNIMECAKAPLENTWWAEQDSPFCFLAFCFEYAGVINSGLSYNCSLPLAFDGSCSGLQHFSAMLRDEIGGKAVNLLPSAEYQDIYRIVSDKVNEMLKQDLINGTSTTVETVTDKKTGEITQRTKYGTKVMAQWWLEHGVNRGVTKRPVMTLVYGSKEFGFRDQVLSDTIQPAIDNGKGDMFLNPNQAAGYMAKLIWNAVSGTVVAAVEAMNWLKSAAKLLAAEVKDEKTDTVLRGRCAVHWVTPDGFPVWQEYKKPIQTRLNLMFLGQFRLQPTINTNKDSEIDARKQVSGIAPNFVHSLDGNHLRMTVVWAHEKYGIESFALIHDSFGTIPADAANLRKAVRETFVDTYESCDVLADFYDQIVDQLHESQRDKMPALPAKGKLNLRDILKSDFAFA

SEQ ID NO: 1223 - DNA, 2670 bp, synthetic construct
  misc_feature 1..2670: note = Variant of RNA polymerase
  source 1..2670: mol_type = other DNA
atgcaccatcaccatcaccatatgaacacgattaacattgctaagaacgacttctctgacatcgaactggctgctatcccgttcaacactctggctgaccattacggtgagcgtttagctagtgaacagttggcccttgagcatgagtcttacgagatgggtgaagcacgcttccgcaagatgtttgagcgtcaacttaaagctggtgaggttgcggataacgctgccgccaagcctctcatcactaccctactccctaagatgattgcacgcatcaacgactggtttgaggaagtgaaagctaagcgcggcaagcgcccgacagccttccagttcctgcaagaaatcaagccggaagccgtagcgtacatcaccattaagaccactctggcttgcctaaccagcgaagacaatacaaccgttcaggctgtagcaagcgcaatcggtcgggccattgaggacgaggctcgcttcggtcgtatccgtgaccttgaagctaagcacttcaagaagaacgttgaggaacaactcaacaagcgtgtagggcacgtcgcgaagaaagcatttatgcaagttgtcgagcacgacatgctctctaagggtctactcggtggcgaggcgtggtcttcgtggcataaggaagactctattcatgtaggagtacgctgcatcgagatgctcattgagtcaaccggaatggttagcttacaccgccaaaatgctggcgtagtgggtgcagactctgagactatcgaactcgcacctgaatacgctgaggctatcgcaacccgtgcaggtgcgctggctggcatctctccgatgttccaaccttgcgtagttcctcctaagccgtggactggcattactggtggtggctattgggctgcggggcgcaaacccctgcagttagtacgtactcgcagtctggcggcgcttcgccgctatgaagaagtgtcgatgccggaggtcatcaaagcagtcaacattgcgcagaatacagcatggcgtattaacaagaaagttctcgacgtagcgaataccatcacccaatggcagcactgtccagtcgcggatgtgcctgcgatggatcgtggcgaaatgccagctcgtccgttggacatcgataccaacgagattgcacttaaagcgtggaagaaagaagcttccgcgttctaccgcaaagacaaagcacgcatgagccgtcgtctgtcgatggagtttatgttatctcaggcgaacaagtttggcaattatgaggttatctggtttccgcaaaacatggattggcgtgggcgcgtgtacgctgtcccgatgttcaatcctcagggcaacgatatgacgaaaggcctgctgacctttgcgcaggagaaacccattggtgaagacggcttctattggctcaagattcatggcgcaaatacagctggaggggataaagtaccgtttccacaacgcatcaaatttgttgaggataaccatacgaatattatggaatgcgcgaaagcaccgctggaaaacacttggtgggcggaacaggactcgccgttctgctttctggcgttctgctttgagtatgctggcgtcatcaatagtggtctgtcgtacaactgtagcttgcctctggcatttgatggtagttgctccggcctgcaacatttctcagcgatgttacgcgacgaaattggcggcaaagctgtgaatctcctcccatctgcggaataccaggatatttatcgtatcgtcagcgacaaagttaacgagatgctgaaacaagatctgattaacggtacctctaccaccgtggaaacggtgactgataaaaagacaggcgaaattacccaacgcacgaaatacgggaccaaagttatggcacagtggtggttagaacacggtgtgaatcgtggcgtcacgaaacgcccggttatgactttggtgtatgggagcaaagagtttggattccgcgatcaagtgctgagtgacaccattcaaccggcgatcgataacggcaagggtgacatgtttctgaatccgaatcaggctgctggttacatggcgaaactgatctggaacgcagtgtccgggaccgtagtcgcagcagttgaggcgatgaactggctgaaaagtgcggcgaaattacttgctgctgaagtgaaggatgagaagacggatacagttctgcgtggccgctgcgcagtacattgggtgactcccgacggcttccctgtgtggcaggaatacaagaagcctattcaaacgcgcttgaacctgatgttcctcggtcagttccgcttacagcctaccattaacaccaacaaagatagcgagattgatgcacgcaaacaggtgtctggtatcgctcctaactttgtacacagcctggacggtaaccaccttcgtatgactgtagtgtgggcacacgagaagtacggaatcgaatcttttgcactgattcacgactccttcggtaccattccggctgacgctgcgaacctgtttaaagcagtgcgcgaaactttcgttgacacatatgagtcttgtgatgtactggctgatttctacgaccagattgttgaccagttgcacgagtctcaacgcgacaaaatgccagcacttccggctaaaggtaagttgaacctccgtgacatcttaaaatcggacttcgcgttcgcg

SEQ ID NO: 1224 - protein, 890 aa, synthetic construct
  REGION 1..890: note = Variant of RNA polymerase
MHHHHHHMNTINIAKNDFSDIELAAIPFNTLADHYGERLASEQLALEHESYEMGEARFRKMFERQLKAGEVADNAAAKPLITTLLPKMIARINDWFEEVKAKRGKRPTAFQFLQEIKPEAVAYITIKTTLACLTSEDNTTVQAVASAIGRAIEDEARFGRIRDLEAKHFKKNVEEQLNKRVGHVAKKAFMQVVEHDMLSKGLLGGEAWSSWHKEDSIHVGVRCIEMLIESTGMVSLHRQNAGVVGADSETIELAPEYAEAIATRAGALAGISPMFQPCVVPPKPWTGITGGGYWAAGRKPLQLVRTRSLAALRRYEEVSMPEVIKAVNIAQNTAWRINKKVLDVANTITQWQHCPVADVPAMDRGEMPARPLDIDTNEIALKAWKKEASAFYRKDKARMSRRLSMEFMLSQANKFGNYEVIWFPQNMDWRGRVYAVPMFNPQGNDMTKGLLTFAQEKPIGEDGFYWLKIHGANTAGGDKVPFPQRIKFVEDNHTNIMECAKAPLENTWWAEQDSPFCFLAFCFEYAGVINSGLSYNCSLPLAFDGSCSGLQHFSAMLRDEIGGKAVNLLPSAEYQDIYRIVSDKVNEMLKQDLINGTSTTVETVTDKKTGEITQRTKYGTKVMAQWWLEHGVNRGVTKRPVMTLVYGSKEFGFRDQVLSDTIQPAIDNGKGDMFLNPNQAAGYMAKLIWNAVSGTVVAAVEAMNWLKSAAKLLAAEVKDEKTDTVLRGRCAVHWVTPDGFPVWQEYKKPIQTRLNLMFLGQFRLQPTINTNKDSEIDARKQVSGIAPNFVHSLDGNHLRMTVVWAHEKYGIESFALIHDSFGTIPADAANLFKAVRETFVDTYESCDVLADFYDQIVDQLHESQRDKMPALPAKGKLNLRDILKSDFAFA

(The sequence listing continues in the following parts.)
